United States Patent Application Publication US 2018/0305689 A1 - sequence listing, part 61

SEQ ID NO: 893533 - RNA, 19 nt, Artificial Sequence
  Description of Artificial Sequence: Synthetic oligonucleotide
  Antisense strand to SEQ ID NO: 893532
uaauaccagcguuucucag

SEQ ID NO: 893534 - RNA, 19 nt, Artificial Sequence
  Description of Artificial Sequence: Synthetic oligonucleotide
  Sense strand starting at position 3093 of SEQ ID NO: 588841
ugaguaacucgcguguugu

SEQ ID NO: 893535 - RNA, 19 nt, Artificial Sequence
  Description of Artificial Sequence: Synthetic oligonucleotide
  Antisense strand to SEQ ID NO: 893534
acaacacgcgaguuacuca

SEQ ID NO: 893536 - RNA, 19 nt, Artificial Sequence
  Description of Artificial Sequence: Synthetic oligonucleotide
  Sense strand starting at position 3339 of SEQ ID NO: 588841
guagcuauucuugacucuu

SEQ ID NO: 893537 - RNA, 19 nt, Artificial Sequence
  Description of Artificial Sequence: Synthetic oligonucleotide
  Antisense strand to SEQ ID NO: 893536
aagagucaagaauagcuac

SEQ ID NO: 893538 - RNA, 19 nt, Artificial Sequence
  Description of Artificial Sequence: Synthetic oligonucleotide
  Sense strand starting at position 3428 of SEQ ID NO: 588841
aguaguauagaaggaugua

SEQ ID NO: 893539 - RNA, 19 nt, Artificial Sequence
  Description of Artificial Sequence: Synthetic oligonucleotide
  Antisense strand to SEQ ID NO: 893538
uacauccuucuauacuacu

SEQ ID NO: 893540 - RNA, 19 nt, Artificial Sequence
  Description of Artificial Sequence: Synthetic oligonucleotide
  Sense strand starting at position 3460 of SEQ ID NO: 588841
guccuauucuacucccuga

SEQ ID NO: 893541 - RNA, 19 nt, Artificial Sequence
  Description of Artificial Sequence: Synthetic oligonucleotide
  Antisense strand to SEQ ID NO: 893540
ucagggaguagaauaggac

SEQ ID NO: 893542 - RNA, 19 nt, Artificial Sequence
  Description of Artificial Sequence: Synthetic oligonucleotide
  Sense strand starting at position 3477 of SEQ ID NO: 588841
gaagauagccaccguuaag

SEQ ID NO: 893543 - RNA, 19 nt, Artificial Sequence
  Description of Artificial Sequence: Synthetic oligonucleotide
  Antisense strand to SEQ ID NO: 893542
cuuaacgguggcuaucuuc

SEQ ID NO: 893544 - RNA, 19 nt, Artificial Sequence
  Description of Artificial Sequence: Synthetic oligonucleotide
  Sense strand starting at position 3561 of SEQ ID NO: 588841
aucuucuuauugguacaua

SEQ ID NO: 893545 - RNA, 19 nt, Artificial Sequence
  Description of Artificial Sequence: Synthetic oligonucleotide
  Antisense strand to SEQ ID NO: 893544
uauguaccaauaagaagau

SEQ ID NO: 893546 - RNA, 19 nt, Artificial Sequence
  Description of Artificial Sequence: Synthetic oligonucleotide
  Sense strand starting at position 3572 of SEQ ID NO: 588841
gguacauaauugguauuau

SEQ ID NO: 893547 - RNA, 19 nt, Artificial Sequence
  Description of Artificial Sequence: Synthetic oligonucleotide
  Antisense strand to SEQ ID NO: 893546
auaauaccaauuauguacc

SEQ ID NO: 893548 - RNA, 19 nt, Artificial Sequence
  Description of Artificial Sequence: Synthetic oligonucleotide
  Sense strand starting at position 3900 of SEQ ID NO: 588841
ggacauucuuauguaucaa

SEQ ID NO: 893549 - RNA, 19 nt, Artificial Sequence
  Description of Artificial Sequence: Synthetic oligonucleotide
  Antisense strand to SEQ ID NO: 893548
uugauacauaagaaugucc

SEQ ID NO: 893550 - RNA, 19 nt, Artificial Sequence
  Description of Artificial Sequence: Synthetic oligonucleotide
  Sense strand starting at position 437 of SEQ ID NO: 588842
ucuacuauuucuuugccga

SEQ ID NO: 893551 - RNA, 19 nt, Artificial Sequence
  Description of Artificial Sequence: Synthetic oligonucleotide
  Antisense strand to SEQ ID NO: 893550
ucggcaaagaaauaguaga

SEQ ID NO: 893552 - RNA, 19 nt, Artificial Sequence
  Description of Artificial Sequence: Synthetic oligonucleotide
  Sense strand starting at position 438 of SEQ ID NO: 588842
cuacuauuucuuugccgaa

SEQ ID NO: 893553 - RNA, 19 nt, Artificial Sequence
  Description of Artificial Sequence: Synthetic oligonucleotide
  Antisense strand to SEQ ID NO: 893552
uucggcaaagaaauaguag

SEQ ID NO: 893554 - RNA, 19 nt, Artificial Sequence
  Description of Artificial Sequence: Synthetic oligonucleotide
  Sense strand starting at position 540 of SEQ ID NO: 588842
cagacucuucuugguugaa

SEQ ID NO: 893555 - RNA, 19 nt, Artificial Sequence
  Description of Artificial Sequence: Synthetic oligonucleotide
  Antisense strand to SEQ ID NO: 893554
uucaaccaagaagagucug

SEQ ID NO: 893556 - RNA, 19 nt, Artificial Sequence
  Description of Artificial Sequence: Synthetic oligonucleotide
  Sense strand starting at position 541 of SEQ ID NO: 588842
agacucuucuugguugaag

SEQ ID NO: 893557 - RNA, 19 nt, Artificial Sequence
  Description of Artificial Sequence: Synthetic oligonucleotide
  Antisense strand to SEQ ID NO: 893556
cuucaaccaagaagagucu

SEQ ID NO: 893558 - RNA, 19 nt, Artificial Sequence
  Description of Artificial Sequence: Synthetic oligonucleotide
  Sense strand starting at position 542 of SEQ ID NO: 588842
gacucuucuugguugaaga

SEQ ID NO: 893559 - RNA, 19 nt, Artificial Sequence
  Description of Artificial Sequence: Synthetic oligonucleotide
  Antisense strand to SEQ ID NO: 893558
ucuucaaccaagaagaguc

SEQ ID NO: 893560 - RNA, 19 nt, Artificial Sequence
  Description of Artificial Sequence: Synthetic oligonucleotide
  Sense strand starting at position 543 of SEQ ID NO: 588842
acucuucuugguugaagag

SEQ ID NO: 893561 - RNA, 19 nt, Artificial Sequence
  Description of Artificial Sequence: Synthetic oligonucleotide
  Antisense strand to SEQ ID NO: 893560
cucuucaaccaagaagagu

SEQ ID NO: 893562 - RNA, 19 nt, Artificial Sequence
  Description of Artificial Sequence: Synthetic oligonucleotide
  Sense strand starting at position 555 of SEQ ID NO: 588842
ugaagagcauucucucauc

SEQ ID NO: 893563 - RNA, 19 nt, Artificial Sequence
  Description of Artificial Sequence: Synthetic oligonucleotide
  Antisense strand to SEQ ID NO: 893562
gaugagagaaugcucuuca

SEQ ID NO: 893564 - RNA, 19 nt, Artificial Sequence
  Description of Artificial Sequence: Synthetic oligonucleotide
  Sense strand starting at position 667 of SEQ ID NO: 588842
agauacauacucugucacu

SEQ ID NO: 893565 - RNA, 19 nt, Artificial Sequence
  Description of Artificial Sequence: Synthetic oligonucleotide
  Antisense strand to SEQ ID NO: 893564
agugacagaguauguaucu

SEQ ID NO: 893566 - RNA, 19 nt, Artificial Sequence
  Description of Artificial Sequence: Synthetic oligonucleotide
  Sense strand starting at position 916 of SEQ ID NO: 588842
agaaauguucccgauguug

SEQ ID NO: 893567 - RNA, 19 nt, Artificial Sequence
  Description of Artificial Sequence: Synthetic oligonucleotide
  Antisense strand to SEQ ID NO: 893566
caacaucgggaacauuucu

SEQ ID NO: 893568 - RNA, 19 nt, Artificial Sequence
  Description of Artificial Sequence: Synthetic oligonucleotide
  Sense strand starting at position 959 of SEQ ID NO: 588842
acaagaaccugcuugcuaa

SEQ ID NO: 893569 - RNA, 19 nt, Artificial Sequence
  Description of Artificial Sequence: Synthetic oligonucleotide
  Antisense strand to SEQ ID NO: 893568
uuagcaagcagguucuugu

SEQ ID NO: 893570 - RNA, 19 nt, Artificial Sequence
  Description of Artificial Sequence: Synthetic oligonucleotide
  Sense strand starting at position 1085 of SEQ ID NO: 588842
aguuuagaucuuggaauaa

SEQ ID NO: 893571 - RNA, 19 nt, Artificial Sequence
  Description of Artificial Sequence: Synthetic oligonucleotide
  Antisense strand to SEQ ID NO: 893570
uuauuccaagaucuaaacu

SEQ ID NO: 893572 - RNA, 19 nt, Artificial Sequence
  Description of Artificial Sequence: Synthetic oligonucleotide
  Sense strand starting at position 1209 of SEQ ID NO: 588842
ugcagacguuuauuuccau

SEQ ID NO: 893573 - RNA, 19 nt, Artificial Sequence
  Description of Artificial Sequence: Synthetic oligonucleotide
  Antisense strand to SEQ ID NO: 893572
auggaaauaaacgucugca

SEQ ID NO: 893574 - RNA, 19 nt, Artificial Sequence
  Description of Artificial Sequence: Synthetic oligonucleotide
  Sense strand starting at position 1210 of SEQ ID NO: 588842
gcagacguuuauuuccauu

SEQ ID NO: 893575 - RNA, 19 nt, Artificial Sequence
  Description of Artificial Sequence: Synthetic oligonucleotide
  Antisense strand to SEQ ID NO: 893574
aauggaaauaaacgucugc

SEQ ID NO: 893576 - RNA, 19 nt, Artificial Sequence
  Description of Artificial Sequence: Synthetic oligonucleotide
  Sense strand starting at position 2192 of SEQ ID NO: 588842
cggagauagucuccaccaa

SEQ ID NO: 893577 - RNA, 19 nt, Artificial Sequence
  Description of Artificial Sequence: Synthetic oligonucleotide
  Antisense strand to SEQ ID NO: 893576
uugguggagacuaucuccg

SEQ ID NO: 893578 - RNA, 19 nt, Artificial Sequence
  Description of Artificial Sequence: Synthetic oligonucleotide
  Sense strand starting at position 2211 of SEQ ID NO: 588842
ggcaguagcgacuauaaac

SEQ ID NO: 893579 - RNA, 19 nt, Artificial Sequence
  Description of Artificial Sequence: Synthetic oligonucleotide
  Antisense strand to SEQ ID NO: 893578
guuuauagucgcuacugcc

SEQ ID NO: 893580 - RNA, 19 nt, Artificial Sequence
  Description of Artificial Sequence: Synthetic oligonucleotide
  Sense strand starting at position 2231 of SEQ ID NO: 588842
agaguuaggccgugauuua

SEQ ID NO: 893581 - RNA, 19 nt, Artificial Sequence
  Description of Artificial Sequence: Synthetic oligonucleotide
  Antisense strand to SEQ ID NO: 893580
uaaaucacggccuaacucu

SEQ ID NO: 893582 - RNA, 19 nt, Artificial Sequence
  Description of Artificial Sequence: Synthetic oligonucleotide
  Sense strand starting at position 2330 of SEQ ID NO: 588842
ugagcagucaccugaagag

SEQ ID NO: 893583 - RNA, 19 nt, Artificial Sequence
  Description of Artificial Sequence: Synthetic oligonucleotide
  Antisense strand to SEQ ID NO: 893582
cucuucaggugacugcuca

SEQ ID NO: 893584 - RNA, 19 nt, Artificial Sequence
  Description of Artificial Sequence: Synthetic oligonucleotide
  Sense strand starting at position 2371 of SEQ ID NO: 588842
ugaggaggccgagauuacu

SEQ ID NO: 893585 - RNA, 19 nt, Artificial Sequence
  Description of Artificial Sequence: Synthetic oligonucleotide
  Antisense strand to SEQ ID NO: 893584
aguaaucucggccuccuca

SEQ ID NO: 893586 - RNA, 19 nt, Artificial Sequence
  Description of Artificial Sequence: Synthetic oligonucleotide
  Sense strand starting at position 2431 of SEQ ID NO: 588842
uggugacuuacaggaauug

SEQ ID NO: 893587 - RNA, 19 nt, Artificial Sequence
  Description of Artificial Sequence: Synthetic oligonucleotide
  Antisense strand to SEQ ID NO: 893586
caauuccuguaagucacca

SEQ ID NO: 893588 - RNA, 19 nt, Artificial Sequence
  Description of Artificial Sequence: Synthetic oligonucleotide
  Sense strand starting at position 2491 of SEQ ID NO: 588842
ucuugaugguauccuaaau

SEQ ID NO: 893589 - RNA, 19 nt, Artificial Sequence
  Description of Artificial Sequence: Synthetic oligonucleotide
  Antisense strand to SEQ ID NO: 893588
auuuaggauaccaucaaga

SEQ ID NO: 893590 - RNA, 19 nt, Artificial Sequence
  Description of Artificial Sequence: Synthetic oligonucleotide
  Sense strand starting at position 2516 of SEQ ID NO: 588842
aaaccuuaaguuuggaagu

SEQ ID NO: 893591 - RNA, 19 nt, Artificial Sequence
  Description of Artificial Sequence: Synthetic oligonucleotide
  Antisense strand to SEQ ID NO: 893590
acuuccaaacuuaagguuu

SEQ ID NO: 893592 - RNA, 19 nt, Artificial Sequence
  Description of Artificial Sequence: Synthetic oligonucleotide
  Sense strand starting at position 2587 of SEQ ID NO: 588842
agugcuaagauauggucaa

SEQ ID NO: 893593 - RNA, 19 nt, Artificial Sequence
  Description of Artificial Sequence: Synthetic oligonucleotide
  Antisense strand to SEQ ID NO: 893592
uugaccauaucuuagcacu

SEQ ID NO: 893594 - RNA, 19 nt, Artificial Sequence
  Description of Artificial Sequence: Synthetic oligonucleotide
  Sense strand starting at position 2650 of SEQ ID NO: 588842
cagagcaaauucguuaaau

SEQ ID NO: 893595 - RNA, 19 nt, Artificial Sequence
  Description of Artificial Sequence: Synthetic oligonucleotide
  Antisense strand to SEQ ID NO: 893594
auuuaacgaauuugcucug

SEQ ID NO: 893596 - RNA, 19 nt, Artificial Sequence
  Description of Artificial Sequence: Synthetic oligonucleotide
  Sense strand starting at position 2651 of SEQ ID NO: 588842
agagcaaauucguuaaaua

SEQ ID NO: 893597 - RNA, 19 nt, Artificial Sequence
  Description of Artificial Sequence: Synthetic oligonucleotide
  Antisense strand to SEQ ID NO: 893596
uauuuaacgaauuugcucu

SEQ ID NO: 893598 - RNA, 19 nt, Artificial Sequence
  Description of Artificial Sequence: Synthetic oligonucleotide
  Sense strand starting at position 2652 of SEQ ID NO: 588842
gagcaaauucguuaaauau

SEQ ID NO: 893599 - RNA, 19 nt, Artificial Sequence
  Description of Artificial Sequence: Synthetic oligonucleotide
  Antisense strand to SEQ ID NO: 893598
auauuuaacgaauuugcuc

SEQ ID NO: 893600 - RNA, 19 nt, Artificial Sequence
  Description of Artificial Sequence: Synthetic oligonucleotide
  Sense strand starting at position 2848 of SEQ ID NO: 588842
gggauuagguugaggcaaa

SEQ ID NO: 893601 - RNA, 19 nt, Artificial Sequence
  Description of Artificial Sequence: Synthetic oligonucleotide
  Antisense strand to SEQ ID NO: 893600
uuugccucaaccuaauccc

SEQ ID NO: 893602 - RNA, 19 nt, Artificial Sequence
  Description of Artificial Sequence: Synthetic oligonucleotide
  Sense strand starting at position 2893 of SEQ ID NO: 588842
agacguuaacucuaccauu

SEQ ID NO: 893603 - RNA, 19 nt, Artificial Sequence
  Description of Artificial Sequence: Synthetic oligonucleotide
  Antisense strand to SEQ ID NO: 893602
aaugguagaguuaacgucu

SEQ ID NO: 893604 - RNA, 19 nt, Artificial Sequence
  Description of Artificial Sequence: Synthetic oligonucleotide
  Sense strand starting at position 3007 of SEQ ID NO: 588842
agaagugauccuuaggguc

SEQ ID NO: 893605 - RNA, 19 nt, Artificial Sequence
  Description of Artificial Sequence: Synthetic oligonucleotide
  Antisense strand to SEQ ID NO: 893604
gacccuaaggaucacuucu

SEQ ID NO: 893606 - RNA, 19 nt, Artificial Sequence
  Description of Artificial Sequence: Synthetic oligonucleotide
  Sense strand starting at position 3104 of SEQ ID NO: 588842
uguaaugaaguuuacuuga

SEQ ID NO: 893607 - RNA, 19 nt, Artificial Sequence
  Description of Artificial Sequence: Synthetic oligonucleotide
  Antisense strand to SEQ ID NO: 893606
ucaaguaaacuucauuaca

SEQ ID NO: 893608 - RNA, 19 nt, Artificial Sequence
  Description of Artificial Sequence: Synthetic oligonucleotide
  Sense strand starting at position 3138 of SEQ ID NO: 588842
guugguuacccuggacaca

SEQ ID NO: 893609 - RNA, 19 nt, Artificial Sequence
  Description of Artificial Sequence: Synthetic oligonucleotide
  Antisense strand to SEQ ID NO: 893608
uguguccaggguaaccaac

SEQ ID NO: 893610 - RNA, 19 nt, Artificial Sequence
  Description of Artificial Sequence: Synthetic oligonucleotide
  Sense strand starting at position 3209 of SEQ ID NO: 588842
auuuauugcccucaugugu

SEQ ID NO: 893611 - RNA, 19 nt, Artificial Sequence
  Description of Artificial Sequence: Synthetic oligonucleotide
  Antisense strand to SEQ ID NO: 893610
acacaugagggcaauaaau

SEQ ID NO: 893612 - RNA, 19 nt, Artificial Sequence
  Description of Artificial Sequence: Synthetic oligonucleotide
  Sense strand starting at position 3261 of SEQ ID NO: 588842
uaugcuggcugcucauuua

SEQ ID NO: 893613 - RNA, 19 nt, Artificial Sequence
  Description of Artificial Sequence: Synthetic oligonucleotide
  Antisense strand to SEQ ID NO: 893612
uaaaugagcagccagcaua

SEQ ID NO: 893614 - RNA, 19 nt, Artificial Sequence
  Description of Artificial Sequence: Synthetic oligonucleotide
  Sense strand starting at position 3264 of SEQ ID NO: 588842
gcuggcugcucauuuaaga

SEQ ID NO: 893615 - RNA, 19 nt, Artificial Sequence
  Description of Artificial Sequence: Synthetic oligonucleotide
  Antisense strand to SEQ ID NO: 893614
ucuuaaaugagcagccagc

SEQ ID NO: 893616 - RNA, 19 nt, Artificial Sequence
  Description of Artificial Sequence: Synthetic oligonucleotide
  Sense strand starting at position 3284 of SEQ ID NO: 588842
guuucuauagcauagcaau

SEQ ID NO: 893617 - RNA, 19 nt, Artificial Sequence
  Description of Artificial Sequence: Synthetic oligonucleotide
  Antisense strand to SEQ ID NO: 893616
auugcuaugcuauagaaac

SEQ ID NO: 893618 - RNA, 19 nt, Artificial Sequence
  Description of Artificial Sequence: Synthetic oligonucleotide
  Sense strand starting at position 3473 of SEQ ID NO: 588842
ugaaguagcccagauagua

SEQ ID NO: 893619 - RNA, 19 nt, Artificial Sequence
  Description of Artificial Sequence: Synthetic oligonucleotide
  Antisense strand to SEQ ID NO: 893618
uacuaucugggcuacuuca

SEQ ID NO: 893620 - RNA, 19 nt, Artificial Sequence
  Description of Artificial Sequence: Synthetic oligonucleotide
  Sense strand starting at position 3481 of SEQ ID NO: 588842
cccagauaguauuaauuug

SEQ ID NO: 893621 - RNA, 19 nt, Artificial Sequence
  Description of Artificial Sequence: Synthetic oligonucleotide
  Antisense strand to SEQ ID NO: 893620
caaauuaauacuaucuggg

SEQ ID NO: 893622 - RNA, 19 nt, Artificial Sequence
  Description of Artificial Sequence: Synthetic oligonucleotide
  Sense strand starting at position 3546 of SEQ ID NO: 588842
cuacuuuggcuuuaguuua

SEQ ID NO: 893623 - RNA, 19 nt, Artificial Sequence
  Description of Artificial Sequence: Synthetic oligonucleotide
  Antisense strand to SEQ ID NO: 893622
uaaacuaaagccaaaguag

SEQ ID NO: 893624 - RNA, 19 nt, Artificial Sequence
  Description of Artificial Sequence: Synthetic oligonucleotide
  Sense strand starting at position 3551 of SEQ ID NO: 588842
uuggcuuuaguuuaaacau

SEQ ID NO: 893625 - RNA, 19 nt, Artificial Sequence
  Description of Artificial Sequence: Synthetic oligonucleotide
  Antisense strand to SEQ ID NO: 893624
auguuuaaacuaaagccaa

SEQ ID NO: 893626 - RNA, 19 nt, Artificial Sequence
  Description of Artificial Sequence: Synthetic oligonucleotide
  Sense strand starting at position 3601 of SEQ ID NO: 588842
auuaaaugguauccagauc

SEQ ID NO: 893627 - RNA, 19 nt, Artificial Sequence
  Description of Artificial Sequence: Synthetic oligonucleotide
  Antisense strand to SEQ ID NO: 893626
gaucuggauaccauuuaau

SEQ ID NO: 893628 - RNA, 19 nt, Artificial Sequence
  Description of Artificial Sequence: Synthetic oligonucleotide
  Sense strand starting at position 3663 of SEQ ID NO: 588842
aguuaacuuccucagagcu

SEQ ID NO: 893629 - RNA, 19 nt, Artificial Sequence
  Description of Artificial Sequence: Synthetic oligonucleotide
  Antisense strand to SEQ ID NO: 893628
agcucugaggaaguuaacu

SEQ ID NO: 893630 - RNA, 19 nt, Artificial Sequence
  Description of Artificial Sequence: Synthetic oligonucleotide
  Sense strand starting at position 123 of SEQ ID NO: 588843
aaugaauccugagaaggaa

SEQ ID NO: 893631 - RNA, 19 nt, Artificial Sequence
  Description of Artificial Sequence: Synthetic oligonucleotide
  Antisense strand to SEQ ID NO: 893630
uuccuucucaggauucauu

SEQ ID NO: 893632 - RNA, 19 nt, Artificial Sequence
  Description of Artificial Sequence: Synthetic oligonucleotide
  Sense strand starting at position 191 of SEQ ID NO: 588843
agaacuuaagccugaaaug

SEQ ID NO: 893633 - RNA, 19 nt, Artificial Sequence
  Description of Artificial Sequence: Synthetic oligonucleotide
  Antisense strand to SEQ ID NO: 893632
cauuucaggcuuaaguucu

SEQ ID NO: 893634 - RNA, 19 nt, Artificial Sequence
  Description of Artificial Sequence: Synthetic oligonucleotide
  Sense strand starting at position 321 of SEQ ID NO: 588843
cccuucgcucaacaagauu

SEQ ID NO: 893635 - RNA, 19 nt, Artificial Sequence
  Description of Artificial Sequence: Synthetic oligonucleotide
  Antisense strand to SEQ ID NO: 893634
aaucuuguugagcgaaggg

SEQ ID NO: 893636 - RNA, 19 nt, Artificial Sequence
  Description of Artificial Sequence: Synthetic oligonucleotide
  Sense strand starting at position 358 of SEQ ID NO: 588843
aaaggaggaguacguuuau

SEQ ID NO: 893637 - RNA, 19 nt, Artificial Sequence
  Description of Artificial Sequence: Synthetic oligonucleotide
  Antisense strand to SEQ ID NO: 893636
auaaacguacuccuccuuu

SEQ ID NO: 893638 - RNA, 19 nt, Artificial Sequence
  Description of Artificial Sequence: Synthetic oligonucleotide
  Sense strand starting at position 815 of SEQ ID NO: 588843
ucuacuauuucuuugccga

SEQ ID NO: 893639 - RNA, 19 nt, Artificial Sequence
  Description of Artificial Sequence: Synthetic oligonucleotide
  Antisense strand to SEQ ID NO: 893638
ucggcaaagaaauaguaga

SEQ ID NO: 893640 - RNA, 19 nt, Artificial Sequence
  Description of Artificial Sequence: Synthetic oligonucleotide
  Sense strand starting at position 816 of SEQ ID NO: 588843
cuacuauuucuuugccgaa

SEQ ID NO: 893641 - RNA, 19 nt, Artificial Sequence
  Description of Artificial Sequence: Synthetic oligonucleotide
  Antisense strand to SEQ ID NO: 893640
uucggcaaagaaauaguag

SEQ ID NO: 893642 - RNA, 19 nt, Artificial Sequence
  Description of Artificial Sequence: Synthetic oligonucleotide
  Sense strand starting at position 918 of SEQ ID NO: 588843
cagacucuucuugguugaa

SEQ ID NO: 893643 - RNA, 19 nt, Artificial Sequence
  Description of Artificial Sequence: Synthetic oligonucleotide
  Antisense strand to SEQ ID NO: 893642
uucaaccaagaagagucug

SEQ ID NO: 893644 - RNA, 19 nt, Artificial Sequence
  Description of Artificial Sequence: Synthetic oligonucleotide
  Sense strand starting at position 919 of SEQ ID NO: 588843
agacucuucuugguugaag

SEQ ID NO: 893645 - RNA, 19 nt, Artificial Sequence
  Description of Artificial Sequence: Synthetic oligonucleotide
  Antisense strand to SEQ ID NO: 893644
cuucaaccaagaagagucu

SEQ ID NO: 893646 - RNA, 19 nt, Artificial Sequence
  Description of Artificial Sequence: Synthetic oligonucleotide
  Sense strand starting at position 920 of SEQ ID NO: 588843
gacucuucuugguugaaga

SEQ ID NO: 893647 - RNA, 19 nt, Artificial Sequence
  Description of Artificial Sequence: Synthetic oligonucleotide
  Antisense strand to SEQ ID NO: 893646
ucuucaaccaagaagaguc

SEQ ID NO: 893648 - RNA, 19 nt, Artificial Sequence
  Description of Artificial Sequence: Synthetic oligonucleotide
  Sense strand starting at position 921 of SEQ ID NO: 588843
acucuucuugguugaagag

SEQ ID NO: 893649 - RNA, 19 nt, Artificial Sequence
  Description of Artificial Sequence: Synthetic oligonucleotide
  Antisense strand to SEQ ID NO: 893648
cucuucaaccaagaagagu

SEQ ID NO: 893650 - RNA, 19 nt, Artificial Sequence
  Description of Artificial Sequence: Synthetic oligonucleotide
  Sense strand starting at position 933 of SEQ ID NO: 588843
ugaagagcauucucucauc

SEQ ID NO: 893651 - RNA, 19 nt, Artificial Sequence
  Description of Artificial Sequence: Synthetic oligonucleotide
  Antisense strand to SEQ ID NO: 893650
gaugagagaaugcucuuca

SEQ ID NO: 893652 - RNA, 19 nt, Artificial Sequence
  Description of Artificial Sequence: Synthetic oligonucleotide
  Sense strand starting at position 1045 of SEQ ID NO: 588843
agauacauacucugucacu

SEQ ID NO: 893653 - RNA, 19 nt, Artificial Sequence
  Description of Artificial Sequence: Synthetic oligonucleotide
  Antisense strand to SEQ ID NO: 893652
agugacagaguauguaucu

SEQ ID NO: 893654 - RNA, 19 nt, Artificial Sequence
  Description of Artificial Sequence: Synthetic oligonucleotide
  Sense strand starting at position 1294 of SEQ ID NO: 588843
agaaauguucccgauguug

SEQ ID NO: 893655 - RNA, 19 nt, Artificial Sequence
  Description of Artificial Sequence: Synthetic oligonucleotide
  Antisense strand to SEQ ID NO: 893654
caacaucgggaacauuucu

SEQ ID NO: 893656 - RNA, 19 nt, Artificial Sequence
  Description of Artificial Sequence: Synthetic oligonucleotide
  Sense strand starting at position 1337 of SEQ ID NO: 588843
acaagaaccugcuugcuaa

SEQ ID NO: 893657 - RNA, 19 nt, Artificial Sequence
  Description of Artificial Sequence: Synthetic oligonucleotide
  Antisense strand to SEQ ID NO: 893656
uuagcaagcagguucuugu

SEQ ID NO: 893658 - RNA, 19 nt, Artificial Sequence
  Description of Artificial Sequence: Synthetic oligonucleotide
  Sense strand starting at position 1463 of SEQ ID NO: 588843
aguuuagaucuuggaauaa

SEQ ID NO: 893659 - RNA, 19 nt, Artificial Sequence
  Description of Artificial Sequence: Synthetic oligonucleotide
  Antisense strand to SEQ ID NO: 893658
uuauuccaagaucuaaacu

SEQ ID NO: 893660 - RNA, 19 nt, Artificial Sequence
  Description of Artificial Sequence: Synthetic oligonucleotide
  Sense strand starting at position 1587 of SEQ ID NO: 588843
ugcagacguuuauuuccau

SEQ ID NO: 893661 - RNA, 19 nt, Artificial Sequence
  Description of Artificial Sequence: Synthetic oligonucleotide
  Antisense strand to SEQ ID NO: 893660
auggaaauaaacgucugca

SEQ ID NO: 893662 - RNA, 19 nt, Artificial Sequence
  Description of Artificial Sequence: Synthetic oligonucleotide
  Sense strand starting at position 1588 of SEQ ID NO: 588843
gcagacguuuauuuccauu

SEQ ID NO: 893663 - RNA, 19 nt, Artificial Sequence
  Description of Artificial Sequence: Synthetic oligonucleotide
  Antisense strand to SEQ ID NO: 893662
aauggaaauaaacgucugc

SEQ ID NO: 893664 - RNA, 19 nt, Artificial Sequence
  Description of Artificial Sequence: Synthetic oligonucleotide
  Sense strand starting at position 2570 of SEQ ID NO: 588843
cggagauagucuccaccaa

SEQ ID NO: 893665 - RNA, 19 nt, Artificial Sequence
  Description of Artificial Sequence: Synthetic oligonucleotide
  Antisense strand to SEQ ID NO: 893664
uugguggagacuaucuccg

SEQ ID NO: 893666 - RNA, 19 nt, Artificial Sequence
  Description of Artificial Sequence: Synthetic oligonucleotide
  Sense strand starting at position 2589 of SEQ ID NO: 588843
ggcaguagcgacuauaaac

SEQ ID NO: 893667 - RNA, 19 nt, Artificial Sequence
  Description of Artificial Sequence: Synthetic oligonucleotide
  Antisense strand to SEQ ID NO: 893666
guuuauagucgcuacugcc

SEQ ID NO: 893668 - RNA, 19 nt, Artificial Sequence
  Description of Artificial Sequence: Synthetic oligonucleotide
  Sense strand starting at position 2609 of SEQ ID NO: 588843
agaguuaggccgugauuua

SEQ ID NO: 893669 - RNA, 19 nt, Artificial Sequence
  Description of Artificial Sequence: Synthetic oligonucleotide
  Antisense strand to SEQ ID NO: 893668
uaaaucacggccuaacucu

SEQ ID NO: 893670 - RNA, 19 nt, Artificial Sequence
  Description of Artificial Sequence: Synthetic oligonucleotide
  Sense strand starting at position 2708 of SEQ ID NO: 588843
ugagcagucaccugaagag

SEQ ID NO: 893671 - RNA, 19 nt, Artificial Sequence
  Description of Artificial Sequence: Synthetic oligonucleotide
  Antisense strand to SEQ ID NO: 893670
cucuucaggugacugcuca

SEQ ID NO: 893672 - RNA, 19 nt, Artificial Sequence
  Description of Artificial Sequence: Synthetic oligonucleotide
  Sense strand starting at position 2749 of SEQ ID NO: 588843
ugaggaggccgagauuacu

SEQ ID NO: 893673 - RNA, 19 nt, Artificial Sequence
  Description of Artificial Sequence: Synthetic oligonucleotide
  Antisense strand to SEQ ID NO: 893672
aguaaucucggccuccuca

SEQ ID NO: 893674 - RNA, 19 nt, Artificial Sequence
  Description of Artificial Sequence: Synthetic oligonucleotide
  Sense strand starting at position 2809 of SEQ ID NO: 588843
uggugacuuacaggaauug

SEQ ID NO: 893675 - RNA, 19 nt, Artificial Sequence
  Description of Artificial Sequence: Synthetic oligonucleotide
  Antisense strand to SEQ ID NO: 893674
caauuccuguaagucacca

SEQ ID NO: 893676 - RNA, 19 nt, Artificial Sequence
  Description of Artificial Sequence: Synthetic oligonucleotide
  Sense strand starting at position 2869 of SEQ ID NO: 588843
ucuugaugguauccuaaau

SEQ ID NO: 893677 - RNA, 19 nt, Artificial Sequence
  Description of Artificial Sequence: Synthetic oligonucleotide
  Antisense strand to SEQ ID NO: 893676
auuuaggauaccaucaaga

SEQ ID NO: 893678 - RNA, 19 nt, Artificial Sequence
  Description of Artificial Sequence: Synthetic oligonucleotide
  Sense strand starting at position 2894 of SEQ ID NO: 588843
aaaccuuaaguuuggaagu

SEQ ID NO: 893679 - RNA, 19 nt, Artificial Sequence
  Description of Artificial Sequence: Synthetic oligonucleotide
  Antisense strand to SEQ ID NO: 893678
acuuccaaacuuaagguuu

SEQ ID NO: 893680 - RNA, 19 nt, Artificial Sequence
  Description of Artificial Sequence: Synthetic oligonucleotide
  Sense strand starting at position 2965 of SEQ ID NO: 588843
agugcuaagauauggucaa

SEQ ID NO: 893681 - RNA, 19 nt, Artificial Sequence
  Description of Artificial Sequence: Synthetic oligonucleotide
  Antisense strand to SEQ ID NO: 893680
uugaccauaucuuagcacu

SEQ ID NO: 893682 - RNA, 19 nt, Artificial Sequence
  Description of Artificial Sequence: Synthetic oligonucleotide
  Sense strand starting at position 3028 of SEQ ID NO: 588843
cagagcaaauucguuaaau

SEQ ID NO: 893683 - RNA, 19 nt, Artificial Sequence
  Description of Artificial Sequence: Synthetic oligonucleotide
  Antisense strand to SEQ ID NO: 893682
auuuaacgaauuugcucug

SEQ ID NO: 893684 - RNA, 19 nt, Artificial Sequence
  Description of Artificial Sequence: Synthetic oligonucleotide
  Sense strand starting at position 3029 of SEQ ID NO: 588843
agagcaaauucguuaaaua

SEQ ID NO: 893685 - RNA, 19 nt, Artificial Sequence
  Description of Artificial Sequence: Synthetic oligonucleotide
  Antisense strand to SEQ ID NO: 893684
uauuuaacgaauuugcucu

SEQ ID NO: 893686 - RNA, 19 nt, Artificial Sequence
  Description of Artificial Sequence: Synthetic oligonucleotide
  Sense strand starting at position 3030 of SEQ ID NO: 588843
gagcaaauucguuaaauau

SEQ ID NO: 893687 - RNA, 19 nt, Artificial Sequence
  Description of Artificial Sequence: Synthetic oligonucleotide
  Antisense strand to SEQ ID NO: 893686
auauuuaacgaauuugcuc

SEQ ID NO: 893688 - RNA, 19 nt, Artificial Sequence
  Description of Artificial Sequence: Synthetic oligonucleotide
  Sense strand starting at position 3271 of SEQ ID NO: 588843
agacguuaacucuaccauu

SEQ ID NO: 893689 - RNA, 19 nt, Artificial Sequence
  Description of Artificial Sequence: Synthetic oligonucleotide
  Antisense strand to SEQ ID NO: 893688
aaugguagaguuaacgucu

SEQ ID NO: 893690 - RNA, 19 nt, Artificial Sequence
  Description of Artificial Sequence: Synthetic oligonucleotide
  Sense strand starting at position 3385 of SEQ ID NO: 588843
agaagugauccuuaggguc

SEQ ID NO: 893691 - RNA, 19 nt, Artificial Sequence
  Description of Artificial Sequence: Synthetic oligonucleotide
  Antisense strand to SEQ ID NO: 893690
gacccuaaggaucacuucu

SEQ ID NO: 893692 - RNA, 19 nt, Artificial Sequence
  Description of Artificial Sequence: Synthetic oligonucleotide
  Sense strand starting at position 3482 of SEQ ID NO: 588843
uguaaugaaguuuacuuga

SEQ ID NO: 893693 - RNA, 19 nt, Artificial Sequence
  Description of Artificial Sequence: Synthetic oligonucleotide
  Antisense strand to SEQ ID NO: 893692
ucaaguaaacuucauuaca

SEQ ID NO: 893694 - RNA, 19 nt, Artificial Sequence
  Description of Artificial Sequence: Synthetic oligonucleotide
  Sense strand starting at position 3516 of SEQ ID NO: 588843
guugguuacccuggacaca

SEQ ID NO: 893695 - RNA, 19 nt, Artificial Sequence
  Description of Artificial Sequence: Synthetic oligonucleotide
  Antisense strand to SEQ ID NO: 893694
uguguccaggguaaccaac

SEQ ID NO: 893696 - RNA, 19 nt, Artificial Sequence
  Description of Artificial Sequence: Synthetic oligonucleotide
  Sense strand starting at position 3587 of SEQ ID NO: 588843
auuuauugcccucaugugu

SEQ ID NO: 893697 - RNA, 19 nt, Artificial Sequence
  Description of Artificial Sequence: Synthetic oligonucleotide
  Antisense strand to SEQ ID NO: 893696
acacaugagggcaauaaau

SEQ ID NO: 893698 - RNA, 19 nt, Artificial Sequence
  Description of Artificial Sequence: Synthetic oligonucleotide
  Sense strand starting at position 3639 of SEQ ID NO: 588843
uaugcuggcugcucauuua

SEQ ID NO: 893699 - RNA, 19 nt, Artificial Sequence
  Description of Artificial Sequence: Synthetic oligonucleotide
  Antisense strand to SEQ ID NO: 893698
uaaaugagcagccagcaua

SEQ ID NO: 893700 - RNA, 19 nt, Artificial Sequence
  Description of Artificial Sequence: Synthetic oligonucleotide
  Sense strand starting at position 3642 of SEQ ID NO: 588843
gcuggcugcucauuuaaga

SEQ ID NO: 893701 - RNA, 19 nt, Artificial Sequence
  Description of Artificial Sequence: Synthetic oligonucleotide
  Antisense strand to SEQ ID NO: 893700
ucuuaaaugagcagccagc

SEQ ID NO: 893702 - RNA, 19 nt, Artificial Sequence
  Description of Artificial Sequence: Synthetic oligonucleotide
  Sense strand starting at position 3851 of SEQ ID NO: 588843
ugaaguagcccagauagua

SEQ ID NO: 893703 - RNA, 19 nt, Artificial Sequence
  Description of Artificial Sequence: Synthetic oligonucleotide
  Antisense strand to SEQ ID NO: 893702
uacuaucugggcuacuuca

SEQ ID NO: 893704 - RNA, 19 nt, Artificial Sequence
  Description of Artificial Sequence: Synthetic oligonucleotide
  Sense strand starting at position 3859 of SEQ ID NO: 588843
cccagauaguauuaauuug

SEQ ID NO: 893705 - RNA, 19 nt, Artificial Sequence
  Description of Artificial Sequence: Synthetic oligonucleotide
  Antisense strand to SEQ ID NO: 893704
caaauuaauacuaucuggg

SEQ ID NO: 893706 - RNA, 19 nt, Artificial Sequence
  Description of Artificial Sequence: Synthetic oligonucleotide
  Sense strand starting at position 3929 of SEQ ID NO: 588843
uuggcuuuaguuuaaacau

SEQ ID NO: 893707 - RNA, 19 nt, Artificial Sequence
  Description of Artificial Sequence: Synthetic oligonucleotide
  Antisense strand to SEQ ID NO: 893706
auguuuaaacuaaagccaa

SEQ ID NO: 893708 - RNA, 19 nt, Artificial Sequence
  Description of Artificial Sequence: Synthetic oligonucleotide
  Sense strand starting at position 3979 of SEQ ID NO: 588843
auuaaaugguauccagauc

SEQ ID NO: 893709 - RNA, 19 nt, Artificial Sequence
  Description of Artificial Sequence: Synthetic oligonucleotide
  Antisense strand to SEQ ID NO: 893708
gaucuggauaccauuuaau

SEQ ID NO: 893710 - RNA, 19 nt, Artificial Sequence
  Description of Artificial Sequence: Synthetic oligonucleotide
  Sense strand starting at position 10 of SEQ ID NO: 588844
gcagguuguuuauggcauu

SEQ ID NO: 893711 - RNA, 19 nt, Artificial Sequence
  Description of Artificial Sequence: Synthetic oligonucleotide
  Antisense strand to SEQ ID NO: 893710
aaugccauaaacaaccugc

SEQ ID NO: 893712 - RNA, 19 nt, Artificial Sequence
  Description of Artificial Sequence: Synthetic oligonucleotide
  Sense strand starting at position 150 of SEQ ID NO: 588844
uccaacaaguauucuugua

SEQ ID NO: 893713 - RNA, 19 nt, Artificial Sequence
  Description of Artificial Sequence: Synthetic oligonucleotide
  Antisense strand to SEQ ID NO: 893712
uacaagaauacuuguugga

SEQ ID NO: 893714 - RNA, 19 nt, Artificial Sequence
  Description of Artificial Sequence: Synthetic oligonucleotide
  Sense strand starting at position 157 of SEQ ID NO: 588844
aguauucuuguagaaacac

SEQ ID NO: 893715 - RNA, 19 nt, Artificial Sequence
  Description of Artificial Sequence: Synthetic oligonucleotide
  Antisense strand to SEQ ID NO: 893714
guguuucuacaagaauacu

SEQ ID NO: 893716 - RNA, 19 nt, Artificial Sequence
  Description of Artificial Sequence: Synthetic oligonucleotide
  Sense strand starting at position 285 of SEQ ID NO: 588844
gagaguuuccacuguacuc

SEQ ID NO: 893717 - RNA, 19 nt, Artificial Sequence
  Description of Artificial Sequence: Synthetic oligonucleotide
  Antisense strand to SEQ ID NO: 893716
gaguacaguggaaacucuc

SEQ ID NO: 893718 - RNA, 19 nt, Artificial Sequence
  Description of Artificial Sequence: Synthetic oligonucleotide
  Sense strand starting at position 359 of SEQ ID NO: 588844
cugauaaagcccugcugaa

SEQ ID NO: 893719 - RNA, 19 nt, Artificial Sequence
  Description of Artificial Sequence: Synthetic oligonucleotide
  Antisense strand to SEQ ID NO: 893718
uucagcagggcuuuaucag

SEQ ID NO: 893720 - RNA, 19 nt, Artificial Sequence
  Description of Artificial Sequence: Synthetic oligonucleotide
  Sense strand starting at position 372 of SEQ ID NO: 588844
gcugaaauauauccuggag

SEQ ID NO: 893721 - RNA, 19 nt, Artificial Sequence
  Description of Artificial Sequence: Synthetic oligonucleotide
  Antisense strand to SEQ ID NO: 893720
cuccaggauauauuucagc

SEQ ID NO: 893722 - RNA, 19 nt, Artificial Sequence
  Description of Artificial Sequence: Synthetic oligonucleotide
  Sense strand starting at position 460 of SEQ ID NO: 588844
ugccuucuugugugcugua

SEQ ID NO: 893723 - RNA, 19 nt, Artificial Sequence
  Description of Artificial Sequence: Synthetic oligonucleotide
  Antisense strand to SEQ ID NO: 893722
uacagcacacaagaaggca

SEQ ID NO: 893724 - RNA, 19 nt, Artificial Sequence
  Description of Artificial Sequence: Synthetic oligonucleotide
  Sense strand starting at position 461 of SEQ ID NO: 588844
gccuucuugugugcuguaa

SEQ ID NO: 893725 - RNA, 19 nt, Artificial Sequence
  Description of Artificial Sequence: Synthetic oligonucleotide
  Antisense strand to SEQ ID NO: 893724
uuacagcacacaagaaggc

SEQ ID NO: 893726 - RNA, 19 nt, Artificial Sequence
  Description of Artificial Sequence: Synthetic oligonucleotide
  Sense strand starting at position 463 of SEQ ID NO: 588844
cuucuugugugcuguaaca

SEQ ID NO: 893727 - RNA, 19 nt, Artificial Sequence
  Description of Artificial Sequence: Synthetic oligonucleotide
  Antisense strand to SEQ ID NO: 893726
uguuacagcacacaagaag

SEQ ID NO: 893728 - RNA, 19 nt, Artificial Sequence
  Description of Artificial Sequence: Synthetic oligonucleotide
  Sense strand starting at position 470 of SEQ ID NO: 588844
ugugcuguaacagguugaa

SEQ ID NO: 893729 - RNA, 19 nt, Artificial Sequence
  Description of Artificial Sequence: Synthetic oligonucleotide
  Antisense strand to SEQ ID NO: 893728
uucaaccuguuacagcaca

SEQ ID NO: 893730 - RNA, 19 nt, Artificial Sequence
  Description of Artificial Sequence: Synthetic oligonucleotide
  Sense strand starting at position 483 of SEQ ID NO: 588844
guugaagagaugcaaucuu

SEQ ID NO: 893731 - RNA, 19 nt, Artificial Sequence
  Description of Artificial Sequence: Synthetic oligonucleotide
  Antisense strand to SEQ ID NO: 893730
aagauugcaucucuucaac

SEQ ID NO: 893732 - RNA, 19 nt, Artificial Sequence
  Description of Artificial Sequence: Synthetic oligonucleotide
  Sense strand starting at position 491 of SEQ ID NO: 588844
gaugcaaucuuguuugcaa

SEQ ID NO: 893733 - RNA, 19 nt, Artificial Sequence
  Description of Artificial Sequence: Synthetic oligonucleotide
  Antisense strand to SEQ ID NO: 893732
uugcaaacaagauugcauc

SEQ ID NO: 893734 - RNA, 19 nt, Artificial Sequence
  Description of Artificial Sequence: Synthetic oligonucleotide
  Sense strand starting at position 514 of SEQ ID NO: 588844
ggucuuucuagauguaaga

SEQ ID NO: 893735 - RNA, 19 nt, Artificial Sequence
  Description of Artificial Sequence: Synthetic oligonucleotide
  Antisense strand to SEQ ID NO: 893734
ucuuacaucuagaaagacc

SEQ ID NO: 893736 - RNA, 19 nt, Artificial Sequence
  Description of Artificial Sequence: Synthetic oligonucleotide
  Sense strand starting at position 525 of SEQ ID NO: 588844
auguaagaaucucaggaug

SEQ ID NO: 893737 - RNA, 19 nt, Artificial Sequence
  Description of Artificial Sequence: Synthetic oligonucleotide
  Antisense strand to SEQ ID NO: 893736
cauccugagauucuuacau

SEQ ID NO: 893738 - RNA, 19 nt, Artificial Sequence
  Description of Artificial Sequence: Synthetic oligonucleotide
  Sense strand starting at position 527 of SEQ ID NO: 588844
guaagaaucucaggaugag

SEQ ID NO: 893739 - RNA, 19 nt, Artificial Sequence
  Description of Artificial Sequence: Synthetic oligonucleotide
  Antisense strand to SEQ ID NO: 893738
cucauccugagauucuuac

SEQ ID NO: 893740 - RNA, 19 nt, Artificial Sequence
  Description of Artificial Sequence: Synthetic oligonucleotide
  Sense strand starting at position 541 of SEQ ID NO: 588844
augagaucucccuggguua

SEQ ID NO: 893741 - RNA, 19 nt, Artificial Sequence
  Description of Artificial Sequence: Synthetic oligonucleotide
  Antisense strand to SEQ ID NO: 893740
uaacccagggagaucucau

SEQ ID NO: 893742 - RNA, 19 nt, Artificial Sequence
  Description of Artificial Sequence: Synthetic oligonucleotide
  Sense strand starting at position 542 of SEQ ID NO: 588844
ugagaucucccuggguuau

SEQ ID NO: 893743 - RNA, 19 nt, Artificial Sequence
  Description of Artificial Sequence: Synthetic oligonucleotide
  Antisense strand to SEQ ID NO: 893742
auaacccagggagaucuca

SEQ ID NO: 893744 - RNA, 19 nt, Artificial Sequence
  Description of Artificial Sequence: Synthetic oligonucleotide
  Sense strand starting at position 543 of SEQ ID NO: 588844
gagaucucccuggguuauc

SEQ ID NO: 893745 - RNA, 19 nt, Artificial Sequence
  Description of Artificial Sequence: Synthetic oligonucleotide
  Antisense strand to SEQ ID NO: 893744
gauaacccagggagaucuc

SEQ ID NO: 893746 - RNA, 19 nt, Artificial Sequence
  Description of Artificial Sequence: Synthetic oligonucleotide
  Sense strand starting at position 569 of SEQ ID NO: 588844
gcccuaaauccagggacaa

SEQ ID NO: 893747 - RNA, 19 nt, Artificial Sequence
  Description of Artificial Sequence: Synthetic oligonucleotide
  Antisense strand to SEQ ID NO: 893746
uugucccuggauuuagggc

SEQ ID NO: 893748 - RNA, 19 nt, Artificial Sequence
  Description of Artificial Sequence: Synthetic oligonucleotide
  Sense strand starting at position 580 of SEQ ID NO: 588844
agggacaagugcccuuaua

SEQ ID NO: 893749 - RNA, 19 nt, Artificial Sequence
  Description of Artificial Sequence: Synthetic oligonucleotide
  Antisense strand to SEQ ID NO: 893748
uauaagggcacuugucccu

SEQ ID NO: 893750 - RNA, 19 nt, Artificial Sequence
  Description of Artificial Sequence: Synthetic oligonucleotide
  Sense strand starting at position 793 of SEQ ID NO: 588844
auaaguuucuguuguugga

SEQ ID NO: 893751 - RNA, 19 nt, Artificial Sequence
  Description of Artificial Sequence: Synthetic oligonucleotide
  Antisense strand to SEQ ID NO: 893750
uccaacaacagaaacuuau

SEQ ID NO: 893752 - RNA, 19 nt, Artificial Sequence
  Description of Artificial Sequence: Synthetic oligonucleotide
  Sense strand starting at position 795 of SEQ ID NO: 588844
aaguuucuguuguuggaaa

SEQ ID NO: 893753 - RNA, 19 nt, Artificial Sequence
  Description of Artificial Sequence: Synthetic oligonucleotide
  Antisense strand to SEQ ID NO: 893752
uuuccaacaacagaaacuu

SEQ ID NO: 893754 - RNA, 19 nt, Artificial Sequence
  Description of Artificial Sequence: Synthetic oligonucleotide
  Sense strand starting at position 957 of SEQ ID NO: 588844
ugcggaaugagaugaaaug

SEQ ID NO: 893755 - RNA, 19 nt, Artificial Sequence
  Description of Artificial Sequence: Synthetic oligonucleotide
  Antisense strand to SEQ ID NO: 893754
cauuucaucucauuccgca

SEQ ID NO: 893756 - RNA, 19 nt, Artificial Sequence
  Description of Artificial Sequence: Synthetic oligonucleotide
  Sense strand starting at position 1153 of SEQ ID NO: 588844
gcauguuacccugaacuca

SEQ ID NO: 893757 - RNA, 19 nt, Artificial Sequence
  Description of Artificial Sequence: Synthetic oligonucleotide
  Antisense strand to SEQ ID NO: 893756
ugaguucaggguaacaugc

SEQ ID NO: 893758 - RNA, 19 nt, Artificial Sequence
  Description of Artificial Sequence: Synthetic oligonucleotide
  Sense strand starting at position 1195 of SEQ ID NO: 588844
cucccaauucuguggguga

SEQ ID NO: 893759 - RNA, 19 nt, Artificial Sequence
  Description of Artificial Sequence: Synthetic oligonucleotide
  Antisense strand to SEQ ID NO: 893758
ucacccacagaauugggag

SEQ ID NO: 893760 - RNA, 19 nt, Artificial Sequence
  Description of Artificial Sequence: Synthetic oligonucleotide
  Sense strand starting at position 1406 of SEQ ID NO: 588844
gagcuuggguuuccucaca

SEQ ID NO: 893761 - RNA, 19 nt, Artificial Sequence
  Description of Artificial Sequence: Synthetic oligonucleotide
  Antisense strand to SEQ ID NO: 893760
ugugaggaaacccaagcuc

SEQ ID NO: 893762 - RNA, 19 nt, Artificial Sequence
  Description of Artificial Sequence: Synthetic oligonucleotide
  Sense strand starting at position 1474 of SEQ ID NO: 588844
gagccagcauccuggugaa

SEQ ID NO: 893763 - RNA, 19 nt, Artificial Sequence
  Description of Artificial Sequence: Synthetic oligonucleotide
  Antisense strand to SEQ ID NO: 893762
uucaccaggaugcuggcuc

SEQ ID NO: 893764 - RNA, 19 nt, Artificial Sequence
  Description of Artificial Sequence: Synthetic oligonucleotide
  Sense strand starting at position 1622 of SEQ ID NO: 588844
gagauuggccaccauguuu

SEQ ID NO: 893765 - RNA, 19 nt, Artificial Sequence
  Description of Artificial Sequence: Synthetic oligonucleotide
  Antisense strand to SEQ ID NO: 893764
aaacaugguggccaaucuc

SEQ ID NO: 893766 - RNA, 19 nt, Artificial Sequence
  Description of Artificial Sequence: Synthetic oligonucleotide
  Sense strand starting at position 1682 of SEQ ID NO: 588844
uccgauuugcucugaguuc

SEQ ID NO: 893767 - RNA, 19 nt, Artificial Sequence
  Description of Artificial Sequence: Synthetic oligonucleotide
  Antisense strand to SEQ ID NO: 893766
gaacucagagcaaaucgga

SEQ ID NO: 893768 - RNA, 19 nt, Artificial Sequence
  Description of Artificial Sequence: Synthetic oligonucleotide
  Sense strand starting at position 1683 of SEQ ID NO: 588844
ccgauuugcucugaguucu

SEQ ID NO: 893769 - RNA, 19 nt, Artificial Sequence
  Description of Artificial Sequence: Synthetic oligonucleotide
  Antisense strand to SEQ ID NO: 893768
agaacucagagcaaaucgg

SEQ ID NO: 893770 - RNA, 19 nt, Artificial Sequence
  Description of Artificial Sequence: Synthetic oligonucleotide
  Sense strand starting at position 1689 of SEQ ID NO: 588844
ugcucugaguucuaacuca

SEQ ID NO: 893771 - RNA, 19 nt, Artificial Sequence
  Description of Artificial Sequence: Synthetic oligonucleotide
  Antisense strand to SEQ ID NO: 893770
ugaguuagaacucagagca

SEQ ID NO: 893772 - RNA, 19 nt, Artificial Sequence
  Description of Artificial Sequence: Synthetic oligonucleotide
  Sense strand starting at position 1694 of SEQ ID NO: 588844
ugaguucuaacucaguguu

SEQ ID NO: 893773 - RNA, 19 nt, Artificial Sequence
  Description of Artificial Sequence: Synthetic oligonucleotide
  Antisense strand to SEQ ID NO: 893772
aacacugaguuagaacuca

SEQ ID NO: 893774 - RNA, 19 nt, Artificial Sequence
  Description of Artificial Sequence: Synthetic oligonucleotide
  Sense strand starting at position 1697 of SEQ ID NO: 588844
guucuaacucaguguuugu

SEQ ID NO: 893775 - RNA, 19 nt, Artificial Sequence
  Description of Artificial Sequence: Synthetic oligonucleotide
  Antisense strand to SEQ ID NO: 893774
acaaacacugaguuagaac

SEQ ID NO: 893776 - RNA, 19 nt, Artificial Sequence
  Description of Artificial Sequence: Synthetic oligonucleotide
  Sense strand starting at position 3322 of SEQ ID NO: 588844
aguaacacgucuuguccau

SEQ ID NO: 893777 - RNA, 19 nt, Artificial Sequence
  Description of Artificial Sequence: Synthetic oligonucleotide
  Antisense strand to SEQ ID NO: 893776
auggacaagacguguuacu

SEQ ID NO: 893778 - RNA, 19 nt, Artificial Sequence
  Description of Artificial Sequence: Synthetic oligonucleotide
  Sense strand starting at position 3684 of SEQ ID NO: 588844
cgugggaggucugagacaa

SEQ ID NO: 893779 - RNA, 19 nt, Artificial Sequence
  Description of Artificial Sequence: Synthetic oligonucleotide
  Antisense strand to SEQ ID NO: 893778
uugucucagaccucccacg

SEQ ID NO: 893780 - RNA, 19 nt, Artificial Sequence
  Description of Artificial Sequence: Synthetic oligonucleotide
  Sense strand starting at position 3770 of SEQ ID NO: 588844
ggcccuugguguccugaaa

SEQ ID NO: 893781 - RNA, 19 nt, Artificial Sequence
  Description of Artificial Sequence: Synthetic oligonucleotide
  Antisense strand to SEQ ID NO: 893780
uuucaggacaccaagggcc

SEQ ID NO: 893782 - RNA, 19 nt, Artificial Sequence
  Description of Artificial Sequence: Synthetic oligonucleotide
  Sense strand starting at position 3777 of SEQ ID NO: 588844
gguguccugaaaggacaau

SEQ ID NO: 893783 - RNA, 19 nt, Artificial Sequence
  Description of Artificial Sequence: Synthetic oligonucleotide
  Antisense strand to SEQ ID NO: 893782
auuguccuuucaggacacc

SEQ ID NO: 893784 - RNA, 19 nt, Artificial Sequence
  Description of Artificial Sequence: Synthetic oligonucleotide
  Sense strand starting at position 3812 of SEQ ID NO: 588844
gccugugugcaaggauguu

SEQ ID NO: 893785 - RNA, 19 nt, Artificial Sequence
  Description of Artificial Sequence: Synthetic oligonucleotide
  Antisense strand to SEQ ID NO: 893784
aacauccuugcacacaggc

SEQ ID NO: 893786 - RNA, 19 nt, Artificial Sequence
  Description of Artificial Sequence: Synthetic oligonucleotide
  Sense strand starting at position 3882 of SEQ ID NO: 588844
acccguggcggauauaaau

SEQ ID NO: 893787 - RNA, 19 nt, Artificial Sequence
  Description of Artificial Sequence: Synthetic oligonucleotide
  Antisense strand to SEQ ID NO: 893786
auuuauauccgccacgggu

SEQ ID NO: 893788 - RNA, 19 nt, Artificial Sequence
  Description of Artificial Sequence: Synthetic oligonucleotide
  Sense strand starting at position 3890 of SEQ ID NO: 588844
cggauauaaaugugccuaa

SEQ ID NO: 893789 - RNA, 19 nt, Artificial Sequence
  Description of Artificial Sequence: Synthetic oligonucleotide
  Antisense strand to SEQ ID NO: 893788
uuaggcacauuuauauccg

SEQ ID NO: 893790 - RNA, 19 nt, Artificial Sequence
  Description of Artificial Sequence: Synthetic oligonucleotide
  Sense strand starting at position 90 of SEQ ID NO: 588845
uugggauguccacagcaua

SEQ ID NO: 893791 - RNA, 19 nt, Artificial Sequence
  Description of Artificial Sequence: Synthetic oligonucleotide
  Antisense strand to SEQ ID NO: 893790
uaugcuguggacaucccaa

SEQ ID NO: 893792 - RNA, 19 nt, Artificial Sequence
  Description of Artificial Sequence: Synthetic oligonucleotide
  Sense strand starting at position 121 of SEQ ID NO: 588845
uagagaagugcuuggcaca

SEQ ID NO: 893793 - RNA, 19 nt, Artificial Sequence
  Description of Artificial Sequence: Synthetic oligonucleotide
  Antisense strand to SEQ ID NO: 893792
ugugccaagcacuucucua

SEQ ID NO: 893794 - RNA, 19 nt, Artificial Sequence
  Description of Artificial Sequence: Synthetic oligonucleotide
  Sense strand starting at position 150 of SEQ ID NO: 588845
ugccaucagugccuacuaa

SEQ ID NO: 893795 - RNA, 19 nt, Artificial Sequence
  Description of Artificial Sequence: Synthetic oligonucleotide
  Antisense strand to SEQ ID NO: 893794
uuaguaggcacugauggca

SEQ ID NO: 893796 - RNA, 19 nt, Artificial Sequence
  Description of Artificial Sequence: Synthetic oligonucleotide
  Sense strand starting at position 175 of SEQ ID NO: 588845
ggagcuguucuuuggguuu

SEQ ID NO: 893797 - RNA, 19 nt, Artificial Sequence
  Description of Artificial Sequence: Synthetic oligonucleotide
  Antisense strand to SEQ ID NO: 893796
aaacccaaagaacagcucc

SEQ ID NO: 893798 - RNA, 19 nt, Artificial Sequence
  Description of Artificial Sequence: Synthetic oligonucleotide
  Sense strand starting at position 178 of SEQ ID NO: 588845
gcuguucuuuggguuuaga

SEQ ID NO: 893799 - RNA, 19 nt, Artificial Sequence
  Description of Artificial Sequence: Synthetic oligonucleotide
  Antisense strand to SEQ ID NO: 893798
ucuaaacccaaagaacagc

SEQ ID NO: 893800 - RNA, 19 nt, Artificial Sequence
  Description of Artificial Sequence: Synthetic oligonucleotide
  Sense strand starting at position 181 of SEQ ID NO: 588845
guucuuuggguuuagauga

SEQ ID NO: 893801 - RNA, 19 nt, Artificial Sequence
  Description of Artificial Sequence: Synthetic oligonucleotide
  Antisense strand to SEQ ID NO: 893800
ucaucuaaacccaaagaac

SEQ ID NO: 893802 - RNA, 19 nt, Artificial Sequence
  Description of Artificial Sequence: Synthetic oligonucleotide
  Sense strand starting at position 304 of SEQ ID NO: 588845
acucuagagcacugaugau

SEQ ID NO: 893803 - RNA, 19 nt, Artificial Sequence
  Description of Artificial Sequence: Synthetic oligonucleotide
  Antisense strand to SEQ ID NO: 893802
aucaucagugcucuagagu

SEQ ID NO: 893804 - RNA, 19 nt, Artificial Sequence
  Description of Artificial Sequence: Synthetic oligonucleotide
  Sense strand starting at position 565 of SEQ ID NO: 588845
gugcuucuuccauaagagu

SEQ ID NO: 893805 - RNA, 19 nt, Artificial Sequence
  Description of Artificial Sequence: Synthetic oligonucleotide
  Antisense strand to SEQ ID NO: 893804
acucuuauggaagaagcac

SEQ ID NO: 893806 - RNA, 19 nt, Artificial Sequence
  Description of Artificial Sequence: Synthetic oligonucleotide
  Sense strand starting at position 782 of SEQ ID NO: 588845
caugaaacugcugguuaca

SEQ ID NO: 893807 - RNA, 19 nt, Artificial Sequence
  Description of Artificial Sequence: Synthetic oligonucleotide
  Antisense strand to SEQ ID NO: 893806
uguaaccagcaguuucaug

SEQ ID NO: 893808 - RNA, 19 nt, Artificial Sequence
  Description of Artificial Sequence: Synthetic oligonucleotide
  Sense strand starting at position 784 of SEQ ID NO: 588845
ugaaacugcugguuacaau

SEQ ID NO: 893809 - RNA, 19 nt, Artificial Sequence
  Description of Artificial Sequence: Synthetic oligonucleotide
  Antisense strand to SEQ ID NO: 893808
auuguaaccagcaguuuca

SEQ ID NO: 893810 - RNA, 19 nt, Artificial Sequence
  Description of Artificial Sequence: Synthetic oligonucleotide
  Sense strand starting at position 795 of SEQ ID NO: 588845
guuacaauguaaugacaag

SEQ ID NO: 893811 - RNA, 19 nt, Artificial Sequence
  Description of Artificial Sequence: Synthetic oligonucleotide
  Antisense strand to SEQ ID NO: 893810
cuugucauuacauuguaac

SEQ ID NO: 893812 - RNA, 19 nt, Artificial Sequence
  Description of Artificial Sequence: Synthetic oligonucleotide
  Sense strand starting at position 822 of SEQ ID NO: 588845
gcagcaugacucugggacu

SEQ ID NO: 893813 - RNA, 19 nt, Artificial Sequence
  Description of Artificial Sequence: Synthetic oligonucleotide
  Antisense strand to SEQ ID NO: 893812
agucccagagucaugcugc

SEQ ID NO: 893814 - RNA, 19 nt, Artificial Sequence
  Description of Artificial Sequence: Synthetic oligonucleotide
  Sense strand starting at position 883 of SEQ ID NO: 588845
gugacuuuccagcagagag

SEQ ID NO: 893815 - RNA, 19 nt, Artificial Sequence
  Description of Artificial Sequence: Synthetic oligonucleotide
  Antisense strand to SEQ ID NO: 893814
cucucugcuggaaagucac

SEQ ID NO: 893816 - RNA, 19 nt, Artificial Sequence
  Description of Artificial Sequence: Synthetic oligonucleotide
  Sense strand starting at position 1025 of SEQ ID NO: 588845
gagucucagaagugugaac

SEQ ID NO: 893817 - RNA, 19 nt, Artificial Sequence
  Description of Artificial Sequence: Synthetic oligonucleotide
  Antisense strand to SEQ ID NO: 893816
guucacacuucugagacuc

SEQ ID NO: 893818 - RNA, 19 nt, Artificial Sequence
  Description of Artificial Sequence: Synthetic oligonucleotide
  Sense strand starting at position 1134 of SEQ ID NO: 588845
gggagugggccacgugauu

SEQ ID NO: 893819 - RNA, 19 nt, Artificial Sequence
  Description of Artificial Sequence: Synthetic oligonucleotide
  Antisense strand to SEQ ID NO: 893818
aaucacguggcccacuccc

SEQ ID NO: 893820 - RNA, 19 nt, Artificial Sequence
  Description of Artificial Sequence: Synthetic oligonucleotide
  Sense strand starting at position 1266 of SEQ ID NO: 588845
guggacagaucugagagau

SEQ ID NO: 893821 - RNA, 19 nt, Artificial Sequence
  Description of Artificial Sequence: Synthetic oligonucleotide
  Antisense strand to SEQ ID NO: 893820
aucucucagaucuguccac

SEQ ID NO: 893822 - RNA, 19 nt, Artificial Sequence
  Description of Artificial Sequence: Synthetic oligonucleotide
  Sense strand starting at position 1278 of SEQ ID NO: 588845
gagagauacugagguagaa

SEQ ID NO: 893823 - RNA, 19 nt, Artificial Sequence
  Description of Artificial Sequence: Synthetic oligonucleotide
  Antisense strand to SEQ ID NO: 893822
uucuaccucaguaucucuc

SEQ ID NO: 893824 - RNA, 19 nt, Artificial Sequence
  Description of Artificial Sequence: Synthetic oligonucleotide
  Sense strand starting at position 1591 of SEQ ID NO: 588845
gagagucaauccuugcaaa

SEQ ID NO: 893825 - RNA, 19 nt, Artificial Sequence
  Description of Artificial Sequence: Synthetic oligonucleotide
  Antisense strand to SEQ ID NO: 893824
uuugcaaggauugacucuc

SEQ ID NO: 893826 - RNA, 19 nt, Artificial Sequence
  Description of Artificial Sequence: Synthetic oligonucleotide
  Sense strand starting at position 1592 of SEQ ID NO: 588845
agagucaauccuugcaaau

SEQ ID NO: 893827 - RNA, 19 nt, Artificial Sequence
  Description of Artificial Sequence: Synthetic oligonucleotide
  Antisense strand to SEQ ID NO: 893826
auuugcaaggauugacucu

SEQ ID NO: 893828 - RNA, 19 nt, Artificial Sequence
  Description of Artificial Sequence: Synthetic oligonucleotide
  Sense strand starting at position 2022 of SEQ ID NO: 588845
gcaaguucuuccuugagga

SEQ ID NO: 893829 - RNA, 19 nt, Artificial Sequence
  Description of Artificial Sequence: Synthetic oligonucleotide
  Antisense strand to SEQ ID NO: 893828
uccucaaggaagaacuugc

SEQ ID NO: 893830 - RNA, 19 nt, Artificial Sequence
  Description of Artificial Sequence: Synthetic oligonucleotide
  Sense strand starting at position 2023 of SEQ ID NO: 588845
caaguucuuccuugaggag

SEQ ID NO: 893831 - RNA, 19 nt, Artificial Sequence
  Description of Artificial Sequence: Synthetic oligonucleotide
  Antisense strand to SEQ ID NO: 893830
cuccucaaggaagaacuug

SEQ ID NO: 893832 - RNA, 19 nt, Artificial Sequence
  Description of Artificial Sequence: Synthetic oligonucleotide
  Sense strand starting at position 2040 of SEQ ID NO: 588845
agaggaucccugugcuuuc

SEQ ID NO: 893833 - RNA, 19 nt, Artificial Sequence
  Description of Artificial Sequence: Synthetic oligonucleotide
  Antisense strand to SEQ ID NO: 893832
gaaagcacagggauccucu

SEQ ID NO: 893834 - RNA, 19 nt, Artificial Sequence
  Description of Artificial Sequence: Synthetic oligonucleotide
  Sense strand starting at position 2206 of SEQ ID NO: 588845
ucaccuaagcuuggaacau

SEQ ID NO: 893835 - RNA, 19 nt, Artificial Sequence
  Description of Artificial Sequence: Synthetic oligonucleotide
  Antisense strand to SEQ ID NO: 893834
auguuccaagcuuagguga

SEQ ID NO: 893836 - RNA, 19 nt, Artificial Sequence
  Description of Artificial Sequence: Synthetic oligonucleotide
  Sense strand starting at position 2215 of SEQ ID NO: 588845
cuuggaacauuccucagua

SEQ ID NO: 893837 - RNA, 19 nt, Artificial Sequence
  Description of Artificial Sequence: Synthetic oligonucleotide
  Antisense strand to SEQ ID NO: 893836
uacugaggaauguuccaag

SEQ ID NO: 893838 - RNA, 19 nt, Artificial Sequence
  Description of Artificial Sequence: Synthetic oligonucleotide
  Sense strand starting at position 2216 of SEQ ID NO: 588845
uuggaacauuccucaguaa

SEQ ID NO: 893839 - RNA, 19 nt, Artificial Sequence
  Description of Artificial Sequence: Synthetic oligonucleotide
  Antisense strand to SEQ ID NO: 893838
uuacugaggaauguuccaa

SEQ ID NO: 893840 - RNA, 19 nt, Artificial Sequence
  Description of Artificial Sequence: Synthetic oligonucleotide
  Sense strand starting at position 2277 of SEQ ID NO: 588845
ucccuugucucugcuugaa

SEQ ID NO: 893841 - RNA, 19 nt, Artificial Sequence
  Description of Artificial Sequence: Synthetic oligonucleotide
  Antisense strand to SEQ ID NO: 893840
uucaagcagagacaaggga

SEQ ID NO: 893842 - RNA, 19 nt, Artificial Sequence
  Description of Artificial Sequence: Synthetic oligonucleotide
  Sense strand starting at position 2285 of SEQ ID NO: 588845
cucugcuugaagggauaga

SEQ ID NO: 893843 - RNA, 19 nt, Artificial Sequence
  Description of Artificial Sequence: Synthetic oligonucleotide
  Antisense strand to SEQ ID NO: 893842
ucuaucccuucaagcagag

SEQ ID NO: 893844 - RNA, 19 nt, Artificial Sequence
  Description of Artificial Sequence: Synthetic oligonucleotide
  Sense strand starting at position 2296 of SEQ ID NO: 588845
gggauagauuaauguugaa

SEQ ID NO: 893845 - RNA, 19 nt, Artificial Sequence
  Description of Artificial Sequence: Synthetic oligonucleotide
  Antisense strand to SEQ ID NO: 893844
uucaacauuaaucuauccc

SEQ ID NO: 893846 - RNA, 19 nt, Artificial Sequence
  Description of Artificial Sequence: Synthetic oligonucleotide
  Sense strand starting at position 2344 of SEQ ID NO: 588845
ggaauuagaugccugcuuu

SEQ ID NO: 893847 - RNA, 19 nt, Artificial Sequence
  Description of Artificial Sequence: Synthetic oligonucleotide
  Antisense strand to SEQ ID NO: 893846
aaagcaggcaucuaauucc

SEQ ID NO: 893848 - RNA, 19 nt, Artificial Sequence
  Description of Artificial Sequence: Synthetic oligonucleotide
  Sense strand starting at position 2411 of SEQ ID NO: 588845
gcaggaaacuuuggagacu

SEQ ID NO: 893849 - RNA, 19 nt, Artificial Sequence
  Description of Artificial Sequence: Synthetic oligonucleotide
  Antisense strand to SEQ ID NO: 893848
agucuccaaaguuuccugc

SEQ ID NO: 893850 - RNA, 19 nt, Artificial Sequence
  Description of Artificial Sequence: Synthetic oligonucleotide
  Sense strand starting at position 2412 of SEQ ID NO: 588845
caggaaacuuuggagacuu

SEQ ID NO: 893851 - RNA, 19 nt, Artificial Sequence
  Description of Artificial Sequence: Synthetic oligonucleotide
  Antisense strand to SEQ ID NO: 893850
aagucuccaaaguuuccug

SEQ ID NO: 893852 - RNA, 19 nt, Artificial Sequence
  Description of Artificial Sequence: Synthetic oligonucleotide
  Sense strand starting at position 2420 of SEQ ID NO: 588845
uuuggagacuuggaguauu

SEQ ID NO: 893853 - RNA, 19 nt, Artificial Sequence
  Description of Artificial Sequence: Synthetic oligonucleotide
  Antisense strand to SEQ ID NO: 893852
aauacuccaagucuccaaa

SEQ ID NO: 893854 - RNA, 19 nt, Artificial Sequence
  Description of Artificial Sequence: Synthetic oligonucleotide
  Sense strand starting at position 2467 of SEQ ID NO: 588845
gauacaaguuaagagaaga

SEQ ID NO: 893855 - RNA, 19 nt, Artificial Sequence
  Description of Artificial Sequence: Synthetic oligonucleotide
  Antisense strand to SEQ ID NO: 893854
ucuucucuuaacuuguauc

SEQ ID NO: 893856 - RNA, 19 nt, Artificial Sequence
  Description of Artificial Sequence: Synthetic oligonucleotide
  Sense strand starting at position 3009 of SEQ ID NO: 588845
gcucaaguacauuagugau

SEQ ID NO: 893857 - RNA, 19 nt, Artificial Sequence
  Description of Artificial Sequence: Synthetic oligonucleotide
  Antisense strand to SEQ ID NO: 893856
aucacuaauguacuugagc

SEQ ID NO: 893858 - RNA, 19 nt, Artificial Sequence
  Description of Artificial Sequence: Synthetic oligonucleotide
  Sense strand starting at position 3011 of SEQ ID NO: 588845
ucaaguacauuagugauca

SEQ ID NO: 893859 - RNA, 19 nt, Artificial Sequence
  Description of Artificial Sequence: Synthetic oligonucleotide
  Antisense strand to SEQ ID NO: 893858
ugaucacuaauguacuuga

SEQ ID NO: 893860 - RNA, 19 nt, Artificial Sequence
  Description of Artificial Sequence: Synthetic oligonucleotide
  Sense strand starting at position 3623 of SEQ ID NO: 588845
uggcauaaucuuuggcuca

SEQ ID NO: 893861 - RNA, 19 nt, Artificial Sequence
  Description of Artificial Sequence: Synthetic oligonucleotide
  Antisense strand to SEQ ID NO: 893860
ugagccaaagauuaugcca

SEQ ID NO: 893862 - RNA, 19 nt, Artificial Sequence
  Description of Artificial Sequence: Synthetic oligonucleotide
  Sense strand starting at position 3625 of SEQ ID NO: 588845
gcauaaucuuuggcucacu

SEQ ID NO: 893863 - RNA, 19 nt, Artificial Sequence
  Description of Artificial Sequence: Synthetic oligonucleotide
  Antisense strand to SEQ ID NO: 893862
agugagccaaagauuaugc

SEQ ID NO: 893864 - RNA, 19 nt, Artificial Sequence
  Description of Artificial Sequence: Synthetic oligonucleotide
  Sense strand starting at position 3714 of SEQ ID NO: 588845
cgccacuaggcgugacuaa

SEQ ID NO: 893865 - RNA, 19 nt, Artificial Sequence
  Description of Artificial Sequence: Synthetic oligonucleotide
  Antisense strand to SEQ ID NO: 893864
uuagucacgccuaguggcg

SEQ ID NO: 893866 - RNA, 19 nt, Artificial Sequence
  Description of Artificial Sequence: Synthetic oligonucleotide
  Sense strand starting at position 3715 of SEQ ID NO: 588845
gccacuaggcgugacuaau

SEQ ID NO: 893867 - RNA, 19 nt, Artificial Sequence
  Description of Artificial Sequence: Synthetic oligonucleotide
  Antisense strand to SEQ ID NO: 893866
auuagucacgccuaguggc

SEQ ID NO: 893868 - RNA, 19 nt, Artificial Sequence
  Description of Artificial Sequence: Synthetic oligonucleotide
  Sense strand starting at position 3979 of SEQ ID NO: 588845
aagguagauugguacaacu

SEQ ID NO: 893869 - RNA, 19 nt, Artificial Sequence
  Description of Artificial Sequence: Synthetic oligonucleotide
  Antisense strand to SEQ ID NO: 893868
aguuguaccaaucuaccuu

SEQ ID NO: 893870 - RNA, 19 nt, Artificial Sequence
  Description of Artificial Sequence: Synthetic oligonucleotide
  Sense strand starting at position 25 of SEQ ID NO: 588846
cuuuguugcaagugacaga

SEQ ID NO: 893871 - RNA, 19 nt, Artificial Sequence
  Description of Artificial Sequence: Synthetic oligonucleotide
  Antisense strand to SEQ ID NO: 893870
ucugucacuugcaacaaag

SEQ ID NO: 893872 - RNA, 19 nt, Artificial Sequence
  Description of Artificial Sequence: Synthetic oligonucleotide
  Sense strand starting at position 113 of SEQ ID NO: 588846
uguuauuauuaugagacag

SEQ ID NO: 893873 - RNA, 19 nt, Artificial Sequence
  Description of Artificial Sequence: Synthetic oligonucleotide
  Antisense strand to SEQ ID NO: 893872
cugucucauaauaauaaca

SEQ ID NO: 893874 - RNA, 19 nt, Artificial Sequence
  Description of Artificial Sequence: Synthetic oligonucleotide
  Sense strand starting at position 372 of SEQ ID NO: 588846
acaagaguuagccaucgca

SEQ ID NO: 893875 - RNA, 19 nt, Artificial Sequence
  Description of Artificial Sequence: Synthetic oligonucleotide
  Antisense strand to SEQ ID NO: 893874
ugcgauggcuaacucuugu

SEQ ID NO: 893876 - RNA, 19 nt, Artificial Sequence
  Description of Artificial Sequence: Synthetic oligonucleotide
  Sense strand starting at position 556 of SEQ ID NO: 588846
ggcugagucugucugagaa

SEQ ID NO: 893877 - RNA, 19 nt, Artificial Sequence
  Description of Artificial Sequence: Synthetic oligonucleotide
  Antisense strand to SEQ ID NO: 893876
uucucagacagacucagcc

SEQ ID NO: 893878 - RNA, 19 nt, Artificial Sequence
  Description of Artificial Sequence: Synthetic oligonucleotide
  Sense strand starting at position 566 of SEQ ID NO: 588846
gucugagaacacuaugcca

SEQ ID NO: 893879 - RNA, 19 nt, Artificial Sequence
  Description of Artificial Sequence: Synthetic oligonucleotide
  Antisense strand to SEQ ID NO: 893878
uggcauaguguucucagac

SEQ ID NO: 893880 - RNA, 19 nt, Artificial Sequence
  Description of Artificial Sequence: Synthetic oligonucleotide
  Sense strand starting at position 635 of SEQ ID NO: 588846
cccacaaugucuccuaagu

SEQ ID NO: 893881 - RNA, 19 nt, Artificial Sequence
  Description of Artificial Sequence: Synthetic oligonucleotide
  Antisense strand to SEQ ID NO: 893880
acuuaggagacauuguggg

SEQ ID NO: 893882 - RNA, 19 nt, Artificial Sequence
  Description of Artificial Sequence: Synthetic oligonucleotide
  Sense strand starting at position 804 of SEQ ID NO: 588846
agugcuucucaagauaaau

SEQ ID NO: 893883 - RNA, 19 nt, Artificial Sequence
  Description of Artificial Sequence: Synthetic oligonucleotide
  Antisense strand to SEQ ID NO: 893882
auuuaucuugagaagcacu

SEQ ID NO: 893884 - RNA, 19 nt, Artificial Sequence
  Description of Artificial Sequence: Synthetic oligonucleotide
  Sense strand starting at position 898 of SEQ ID NO: 588846
ggcacacugagagguuauu

SEQ ID NO: 893885 - RNA, 19 nt, Artificial Sequence
  Description of Artificial Sequence: Synthetic oligonucleotide
  Antisense strand to SEQ ID NO: 893884
aauaaccucucagugugcc

SEQ ID NO: 893886 - RNA, 19 nt, Artificial Sequence
  Description of Artificial Sequence: Synthetic oligonucleotide
  Sense strand starting at position 1204 of SEQ ID NO: 588846
ggcuaacugucuuugguag

SEQ ID NO: 893887 - RNA, 19 nt, Artificial Sequence
  Description of Artificial Sequence: Synthetic oligonucleotide
  Antisense strand to SEQ ID NO: 893886
cuaccaaagacaguuagcc

SEQ ID NO: 893888 - RNA, 19 nt, Artificial Sequence
  Description of Artificial Sequence: Synthetic oligonucleotide
  Sense strand starting at position 1205 of SEQ ID NO: 588846
gcuaacugucuuugguaga

SEQ ID NO: 893889 - RNA, 19 nt, Artificial Sequence
  Description of Artificial Sequence: Synthetic oligonucleotide
  Antisense strand to SEQ ID NO: 893888
ucuaccaaagacaguuagc

SEQ ID NO: 893890 - RNA, 19 nt, Artificial Sequence
  Description of Artificial Sequence: Synthetic oligonucleotide
  Sense strand starting at position 1521 of SEQ ID NO: 588846
uugggauguccacagcaua

SEQ ID NO: 893891 - RNA, 19 nt, Artificial Sequence
  Description of Artificial Sequence: Synthetic oligonucleotide
  Antisense strand to SEQ ID NO: 893890
uaugcuguggacaucccaa

SEQ ID NO: 893892 - RNA, 19 nt, Artificial Sequence
  Description of Artificial Sequence: Synthetic oligonucleotide
  Sense strand starting at position 1552 of SEQ ID NO: 588846
uagagaagugcuuggcaca

SEQ ID NO: 893893 - RNA, 19 nt, Artificial Sequence
  Description of Artificial Sequence: Synthetic oligonucleotide
  Antisense strand to SEQ ID NO: 893892
ugugccaagcacuucucua

SEQ ID NO: 893894 - RNA, 19 nt, Artificial Sequence
  Description of Artificial Sequence: Synthetic oligonucleotide
  Sense strand starting at position 1581 of SEQ ID NO: 588846
ugccaucagugccuacuaa

SEQ ID NO: 893895 - RNA, 19 nt, Artificial Sequence
  Description of Artificial Sequence: Synthetic oligonucleotide
  Antisense strand to SEQ ID NO: 893894
uuaguaggcacugauggca

SEQ ID NO: 893896 - RNA, 19 nt, Artificial Sequence
  Description of Artificial Sequence: Synthetic oligonucleotide
  Sense strand starting at position 1606 of SEQ ID NO: 588846
ggagcuguucuuuggguuu

SEQ ID NO: 893897 - RNA, 19 nt, Artificial Sequence
  Description of Artificial Sequence: Synthetic oligonucleotide
  Antisense strand to SEQ ID NO: 893896
aaacccaaagaacagcucc

SEQ ID NO: 893898 - RNA, 19 nt, Artificial Sequence
  Description of Artificial Sequence: Synthetic oligonucleotide
  Sense strand starting at position 1609 of SEQ ID NO: 588846
gcuguucuuuggguuuaga

SEQ ID NO: 893899 - RNA, 19 nt, Artificial Sequence
  Description of Artificial Sequence: Synthetic oligonucleotide
  Antisense strand to SEQ ID NO: 893898
ucuaaacccaaagaacagc

SEQ ID NO: 893900 - RNA, 19 nt, Artificial Sequence
  Description of Artificial Sequence: Synthetic oligonucleotide
  Sense strand starting at position 1612 of SEQ ID NO: 588846
guucuuuggguuuagauga

SEQ ID NO: 893901 - RNA, 19 nt, Artificial Sequence
  Description of Artificial Sequence: Synthetic oligonucleotide
  Antisense strand to SEQ ID NO: 893900
ucaucuaaacccaaagaac

SEQ ID NO: 893902 - RNA, 19 nt, Artificial Sequence
  Description of Artificial Sequence: Synthetic oligonucleotide
  Sense strand starting at position 1735 of SEQ ID NO: 588846
acucuagagcacugaugau

SEQ ID NO: 893903 - RNA, 19 nt, Artificial Sequence
  Description of Artificial Sequence: Synthetic oligonucleotide
  Antisense strand to SEQ ID NO: 893902
aucaucagugcucuagagu

SEQ ID NO: 893904 - RNA, 19 nt, Artificial Sequence
  Description of Artificial Sequence: Synthetic oligonucleotide
  Sense strand starting at position 1996 of SEQ ID NO: 588846
gugcuucuuccauaagagu

SEQ ID NO: 893905 - RNA, 19 nt, Artificial Sequence
  Description of Artificial Sequence: Synthetic oligonucleotide
  Antisense strand to SEQ ID NO: 893904
acucuuauggaagaagcac

SEQ ID NO: 893906 - RNA, 19 nt, Artificial Sequence
  Description of Artificial Sequence: Synthetic oligonucleotide
  Sense strand starting at position 2213 of SEQ ID NO: 588846
caugaaacugcugguuaca

SEQ ID NO: 893907 - RNA, 19 nt, Artificial Sequence
  Description of Artificial Sequence: Synthetic oligonucleotide
  Antisense strand to SEQ ID NO: 893906
uguaaccagcaguuucaug

SEQ ID NO: 893908 - RNA, 19 nt, Artificial Sequence
  Description of Artificial Sequence: Synthetic oligonucleotide
  Sense strand starting at position 2215 of SEQ ID NO: 588846
ugaaacugcugguuacaau

SEQ ID NO: 893909 - RNA, 19 nt, Artificial Sequence
  Description of Artificial Sequence: Synthetic oligonucleotide
  Antisense strand to SEQ ID NO: 893908
auuguaaccagcaguuuca

SEQ ID NO: 893910 - RNA, 19 nt, Artificial Sequence
  Description of Artificial Sequence: Synthetic oligonucleotide
  Sense strand starting at position 2253 of SEQ ID NO: 588846
gcagcaugacucugggacu

SEQ ID NO: 893911 - RNA, 19 nt, Artificial Sequence
  Description of Artificial Sequence: Synthetic oligonucleotide
  Antisense strand to SEQ ID NO: 893910
agucccagagucaugcugc

SEQ ID NO: 893912 - RNA, 19 nt, Artificial Sequence
  Description of Artificial Sequence: Synthetic oligonucleotide
  Sense strand starting at position 2314 of SEQ ID NO: 588846
gugacuuuccagcagagag

SEQ ID NO: 893913 - RNA, 19 nt, Artificial Sequence
  Description of Artificial Sequence: Synthetic oligonucleotide
  Antisense strand to SEQ ID NO: 893912
cucucugcuggaaagucac

SEQ ID NO: 893914 - RNA, 19 nt, Artificial Sequence
  Description of Artificial Sequence: Synthetic oligonucleotide
  Sense strand starting at position 2456 of SEQ ID NO: 588846
gagucucagaagugugaac

SEQ ID NO: 893915 - RNA, 19 nt, Artificial Sequence
  Description of Artificial Sequence: Synthetic oligonucleotide
  Antisense strand to SEQ ID NO: 893914
guucacacuucugagacuc

SEQ ID NO: 893916 - RNA, 19 nt, Artificial Sequence
  Description of Artificial Sequence: Synthetic oligonucleotide
  Sense strand starting at position 2565 of SEQ ID NO: 588846
gggagugggccacgugauu

SEQ ID NO: 893917 - RNA, 19 nt, Artificial Sequence
  Description of Artificial Sequence: Synthetic oligonucleotide
  Antisense strand to SEQ ID NO: 893916
aaucacguggcccacuccc

SEQ ID NO: 893918 - RNA, 19 nt, Artificial Sequence
  Description of Artificial Sequence: Synthetic oligonucleotide
  Sense strand starting at position 2697 of SEQ ID NO: 588846
guggacagaucugagagau

SEQ ID NO: 893919 - RNA, 19 nt, Artificial Sequence
  Description of Artificial Sequence: Synthetic oligonucleotide
  Antisense strand to SEQ ID NO: 893918
aucucucagaucuguccac

SEQ ID NO: 893920 - RNA, 19 nt, Artificial Sequence
  Description of Artificial Sequence: Synthetic oligonucleotide
  Sense strand starting at position 2709 of SEQ ID NO: 588846
gagagauacugagguagaa

SEQ ID NO: 893921 - RNA, 19 nt, Artificial Sequence
  Description of Artificial Sequence: Synthetic oligonucleotide
  Antisense strand to SEQ ID NO: 893920
uucuaccucaguaucucuc

SEQ ID NO: 893922 - RNA, 19 nt, Artificial Sequence
  Description of Artificial Sequence: Synthetic oligonucleotide
  Sense strand starting at position 3022 of SEQ ID NO: 588846
gagagucaauccuugcaaa

SEQ ID NO: 893923 - RNA, 19 nt, Artificial Sequence
  Description of Artificial Sequence: Synthetic oligonucleotide
  Antisense strand to SEQ ID NO: 893922
uuugcaaggauugacucuc

SEQ ID NO: 893924 - RNA, 19 nt, Artificial Sequence
  Description of Artificial Sequence: Synthetic oligonucleotide
  Sense strand starting at position 3023 of SEQ ID NO: 588846
agagucaauccuugcaaau

SEQ ID NO: 893925 - RNA, 19 nt, Artificial Sequence
  Description of Artificial Sequence: Synthetic oligonucleotide
  Antisense strand to SEQ ID NO: 893924
auuugcaaggauugacucu

SEQ ID NO: 893926 - RNA, 19 nt, Artificial Sequence
  Description of Artificial Sequence: Synthetic oligonucleotide
  Sense strand starting at position 3453 of SEQ ID NO: 588846
gcaaguucuuccuugagga

SEQ ID NO: 893927 - RNA, 19 nt, Artificial Sequence
  Description of Artificial Sequence: Synthetic oligonucleotide
  Antisense strand to SEQ ID NO: 893926
uccucaaggaagaacuugc

SEQ ID NO: 893928 - RNA, 19 nt, Artificial Sequence
  Description of Artificial Sequence: Synthetic oligonucleotide
  Sense strand starting at position 3454 of SEQ ID NO: 588846
caaguucuuccuugaggag

SEQ ID NO: 893929 - RNA, 19 nt, Artificial Sequence
  Description of Artificial Sequence: Synthetic oligonucleotide
  Antisense strand to SEQ ID NO: 893928
cuccucaaggaagaacuug

SEQ ID NO: 893930 - RNA, 19 nt, Artificial Sequence
  Description of Artificial Sequence: Synthetic oligonucleotide
  Sense strand starting at position 3471 of SEQ ID NO: 588846
agaggaucccugugcuuuc

SEQ ID NO: 893931 - RNA, 19 nt, Artificial Sequence
  Description of Artificial Sequence: Synthetic oligonucleotide
  Antisense strand to SEQ ID NO: 893930
gaaagcacagggauccucu

SEQ ID NO: 893932 - RNA, 19 nt, Artificial Sequence
  Description of Artificial Sequence: Synthetic oligonucleotide
  Sense strand starting at position 3637 of SEQ ID NO: 588846
ucaccuaagcuuggaacau

SEQ ID NO: 893933 - RNA, 19 nt, Artificial Sequence
  Description of Artificial Sequence: Synthetic oligonucleotide
  Antisense strand to SEQ ID NO: 893932
auguuccaagcuuagguga

SEQ ID NO: 893934 - RNA, 19 nt, Artificial Sequence
  Description of Artificial Sequence: Synthetic oligonucleotide
  Sense strand starting at position 3646 of SEQ ID NO: 588846
cuuggaacauuccucagua

SEQ ID NO: 893935 - RNA, 19 nt, Artificial Sequence
  Description of Artificial Sequence: Synthetic oligonucleotide
  Antisense strand to SEQ ID NO: 893934
uacugaggaauguuccaag

SEQ ID NO: 893936 - RNA, 19 nt, Artificial Sequence
  Description of Artificial Sequence: Synthetic oligonucleotide
  Sense strand starting at position 3647 of SEQ ID NO: 588846
uuggaacauuccucaguaa

SEQ ID NO: 893937 - RNA, 19 nt, Artificial Sequence
  Description of Artificial Sequence: Synthetic oligonucleotide
  Antisense strand to SEQ ID NO: 893936
uuacugaggaauguuccaa

SEQ ID NO: 893938 - RNA, 19 nt, Artificial Sequence
  Description of Artificial Sequence: Synthetic oligonucleotide
  Sense strand starting at position 3708 of SEQ ID NO: 588846
ucccuugucucugcuugaa

SEQ ID NO: 893939 - RNA, 19 nt, Artificial Sequence
  Description of Artificial Sequence: Synthetic oligonucleotide
  Antisense strand to SEQ ID NO: 893938
uucaagcagagacaaggga

SEQ ID NO: 893940 - RNA, 19 nt, Artificial Sequence
  Description of Artificial Sequence: Synthetic oligonucleotide
  Sense strand starting at position 3716 of SEQ ID NO: 588846
cucugcuugaagggauaga

SEQ ID NO: 893941 - RNA, 19 nt, Artificial Sequence
  Description of Artificial Sequence: Synthetic oligonucleotide
  Antisense strand to SEQ ID NO: 893940
ucuaucccuucaagcagag

SEQ ID NO: 893942 - RNA, 19 nt, Artificial Sequence
  Description of Artificial Sequence: Synthetic oligonucleotide
  Sense strand starting at position 3727 of SEQ ID NO: 588846
gggauagauuaauguugaa

SEQ ID NO: 893943 - RNA, 19 nt, Artificial Sequence
  Description of Artificial Sequence: Synthetic oligonucleotide
  Antisense strand to SEQ ID NO: 893942
uucaacauuaaucuauccc

SEQ ID NO: 893944 - RNA, 19 nt, Artificial Sequence
  Description of Artificial Sequence: Synthetic oligonucleotide
  Sense strand starting at position 3775 of SEQ ID NO: 588846
ggaauuagaugccugcuuu

SEQ ID NO: 893945 - RNA, 19 nt, Artificial Sequence
  Description of Artificial Sequence: Synthetic oligonucleotide
  Antisense strand to SEQ ID NO: 893944
aaagcaggcaucuaauucc

SEQ ID NO: 893946 - RNA, 19 nt, Artificial Sequence
  Description of Artificial Sequence: Synthetic oligonucleotide
  Sense strand starting at position 3843 of SEQ ID NO: 588846
caggaaacuuuggagacuu

SEQ ID NO: 893947 - RNA, 19 nt, Artificial Sequence
  Description of Artificial Sequence: Synthetic oligonucleotide
  Antisense strand to SEQ ID NO: 893946
aagucuccaaaguuuccug

SEQ ID NO: 893948 - RNA, 19 nt, Artificial Sequence
  Description of Artificial Sequence: Synthetic oligonucleotide
  Sense strand starting at position 3898 of SEQ ID NO: 588846
gauacaaguuaagagaaga

SEQ ID NO: 893949 - RNA, 19 nt, Artificial Sequence
  Description of Artificial Sequence: Synthetic oligonucleotide
  Antisense strand to SEQ ID NO: 893948
ucuucucuuaacuuguauc

SEQ ID NO: 893950 - RNA, 19 nt, Artificial Sequence
  Description of Artificial Sequence: Synthetic oligonucleotide
  Sense strand starting at position 133 of SEQ ID NO: 588847
aagagauguugacaaugau

SEQ ID NO: 893951 - RNA, 19 nt, Artificial Sequence
  Description of Artificial Sequence: Synthetic oligonucleotide
  Antisense strand to SEQ ID NO: 893950
aucauugucaacaucucuu

SEQ ID NO: 893952 - RNA, 19 nt, Artificial Sequence
  Description of Artificial Sequence: Synthetic oligonucleotide
  Sense strand starting at position 136 of SEQ ID NO: 588847
agauguugacaaugauagu

SEQ ID NO: 893953 - RNA, 19 nt, Artificial Sequence
  Description of Artificial Sequence: Synthetic oligonucleotide
  Antisense strand to SEQ ID NO: 893952
acuaucauugucaacaucu

SEQ ID NO: 893954 - RNA, 19 nt, Artificial Sequence
  Description of Artificial Sequence: Synthetic oligonucleotide
  Sense strand starting at position 198 of SEQ ID NO: 588847
acuuacuagcuugagucau

SEQ ID NO: 893955 - RNA, 19 nt, Artificial Sequence
  Description of Artificial Sequence: Synthetic oligonucleotide
  Antisense strand to SEQ ID NO: 893954
augacucaagcuaguaagu

SEQ ID NO: 893956 - RNA, 19 nt, Artificial Sequence
  Description of Artificial Sequence: Synthetic oligonucleotide
  Sense strand starting at position 307 of SEQ ID NO: 588847
gaguaauaaugacuguuaa

SEQ ID NO: 893957 - RNA, 19 nt, Artificial Sequence
  Description of Artificial Sequence: Synthetic oligonucleotide
  Antisense strand to SEQ ID NO: 893956
uuaacagucauuauuacuc

SEQ ID NO: 893958 - RNA, 19 nt, Artificial Sequence
  Description of Artificial Sequence: Synthetic oligonucleotide
  Sense strand starting at position 308 of SEQ ID NO: 588847
aguaauaaugacuguuaag

SEQ ID NO: 893959 - RNA, 19 nt, Artificial Sequence
  Description of Artificial Sequence: Synthetic oligonucleotide
  Antisense strand to SEQ ID NO: 893958
cuuaacagucauuauuacu

SEQ ID NO: 893960 - RNA, 19 nt, Artificial Sequence
  Description of Artificial Sequence: Synthetic oligonucleotide
  Sense strand starting at position 317 of SEQ ID NO: 588847
gacuguuaagagugcccaa

SEQ ID NO: 893961 - RNA, 19 nt, Artificial Sequence
  Description of Artificial Sequence: Synthetic oligonucleotide
  Antisense strand to SEQ ID NO: 893960
uugggcacucuuaacaguc

SEQ ID NO: 893962 - RNA, 19 nt, Artificial Sequence
  Description of Artificial Sequence: Synthetic oligonucleotide
  Sense strand starting at position 320 of SEQ ID NO: 588847
uguuaagagugcccaaacu

SEQ ID NO: 893963 - RNA, 19 nt, Artificial Sequence
  Description of Artificial Sequence: Synthetic oligonucleotide
  Antisense strand to SEQ ID NO: 893962
aguuugggcacucuuaaca

SEQ ID NO: 893964 - RNA, 19 nt, Artificial Sequence
  Description of Artificial Sequence: Synthetic oligonucleotide
  Sense strand starting at position 346 of SEQ ID NO: 588847
cugguaacguguguauuua

SEQ ID NO: 893965 - RNA, 19 nt, Artificial Sequence
  Description of Artificial Sequence: Synthetic oligonucleotide
  Antisense strand to SEQ ID NO: 893964
uaaauacacacguuaccag

SEQ ID NO: 893966 - RNA, 19 nt, Artificial Sequence
  Description of Artificial Sequence: Synthetic oligonucleotide
  Sense strand starting at position 408 of SEQ ID NO: 588847
aagcgcgauuucuaaauaa

SEQ ID NO: 893967 - RNA, 19 nt, Artificial Sequence
  Description of Artificial Sequence: Synthetic oligonucleotide
  Antisense strand to SEQ ID NO: 893966
uuauuuagaaaucgcgcuu

SEQ ID NO: 893968 - RNA, 19 nt, Artificial Sequence
  Description of Artificial Sequence: Synthetic oligonucleotide
  Sense strand starting at position 428 of SEQ ID NO: 588847
guggcuaauccauaacaaa

SEQ ID NO: 893969 - RNA, 19 nt, Artificial Sequence
  Description of Artificial Sequence: Synthetic oligonucleotide
  Antisense strand to SEQ ID NO: 893968
uuuguuauggauuagccac

SEQ ID NO: 893970 - RNA, 19 nt, Artificial Sequence
  Description of Artificial Sequence: Synthetic oligonucleotide
  Sense strand starting at position 649 of SEQ ID NO: 588847
cccuuugacaguggauaga

SEQ ID NO: 893971 - RNA, 19 nt, Artificial Sequence
  Description of Artificial Sequence: Synthetic oligonucleotide
  Antisense strand to SEQ ID NO: 893970
ucuauccacugucaaaggg

SEQ ID NO: 893972 - RNA, 19 nt, Artificial Sequence
  Description of Artificial Sequence: Synthetic oligonucleotide
  Sense strand starting at position 659 of SEQ ID NO: 588847
guggauagauuugaccaua

SEQ ID NO: 893973 - RNA, 19 nt, Artificial Sequence
  Description of Artificial Sequence: Synthetic oligonucleotide
  Antisense strand to SEQ ID NO: 893972
uauggucaaaucuauccac

SEQ ID NO: 893974 - RNA, 19 nt, Artificial Sequence
  Description of Artificial Sequence: Synthetic oligonucleotide
  Sense strand starting at position 670 of SEQ ID NO: 588847
ugaccauagcuucgauaau

SEQ ID NO: 893975 - RNA, 19 nt, Artificial Sequence
  Description of Artificial Sequence: Synthetic oligonucleotide
  Antisense strand to SEQ ID NO: 893974
auuaucgaagcuaugguca

SEQ ID NO: 893976 - RNA, 19 nt, Artificial Sequence
  Description of Artificial Sequence: Synthetic oligonucleotide
  Sense strand starting at position 681 of SEQ ID NO: 588847
ucgauaauuaccgggcuau

SEQ ID NO: 893977 - RNA, 19 nt, Artificial Sequence
  Description of Artificial Sequence: Synthetic oligonucleotide
  Antisense strand to SEQ ID NO: 893976
auagcccgguaauuaucga

SEQ ID NO: 893978 - RNA, 19 nt, Artificial Sequence
  Description of Artificial Sequence: Synthetic oligonucleotide
  Sense strand starting at position 682 of SEQ ID NO: 588847
cgauaauuaccgggcuauu

SEQ ID NO: 893979 - RNA, 19 nt, Artificial Sequence
  Description of Artificial Sequence: Synthetic oligonucleotide
  Antisense strand to SEQ ID NO: 893978
aauagcccgguaauuaucg

SEQ ID NO: 893980 - RNA, 19 nt, Artificial Sequence
  Description of Artificial Sequence: Synthetic oligonucleotide
  Sense strand starting at position 685 of SEQ ID NO: 588847
uaauuaccgggcuauuaga

SEQ ID NO: 893981 - RNA, 19 nt, Artificial Sequence
  Description of Artificial Sequence: Synthetic oligonucleotide
  Antisense strand to SEQ ID NO: 893980
ucuaauagcccgguaauua

SEQ ID NO: 893982 - RNA, 19 nt, Artificial Sequence
  Description of Artificial Sequence: Synthetic oligonucleotide
  Sense strand starting at position 722 of SEQ ID NO: 588847
uccgaaguauauuaagaaa

SEQ ID NO: 893983 - RNA, 19 nt, Artificial Sequence
  Description of Artificial Sequence: Synthetic oligonucleotide
  Antisense strand to SEQ ID NO: 893982
uuucuuaauauacuucgga

SEQ ID NO: 893984 - RNA, 19 nt, Artificial Sequence
  Description of Artificial Sequence: Synthetic oligonucleotide
  Sense strand starting at position 942 of SEQ ID NO: 588847
augcuuguagcugacuaau

SEQ ID NO: 893985 - RNA, 19 nt, Artificial Sequence
  Description of Artificial Sequence: Synthetic oligonucleotide
  Antisense strand to SEQ ID NO: 893984
auuagucagcuacaagcau

SEQ ID NO: 893986 - RNA, 19 nt, Artificial Sequence
  Description of Artificial Sequence: Synthetic oligonucleotide
  Sense strand starting at position 944 of SEQ ID NO: 588847
gcuuguagcugacuaauuu

SEQ ID NO: 893987 - RNA, 19 nt, Artificial Sequence
  Description of Artificial Sequence: Synthetic oligonucleotide
  Antisense strand to SEQ ID NO: 893986
aaauuagucagcuacaagc

SEQ ID NO: 893988 - RNA, 19 nt, Artificial Sequence
  Description of Artificial Sequence: Synthetic oligonucleotide
  Sense strand starting at position 1002 of SEQ ID NO: 588847
ucugcugguuuacucagaa

SEQ ID NO: 893989 - RNA, 19 nt, Artificial Sequence
  Description of Artificial Sequence: Synthetic oligonucleotide
  Antisense strand to SEQ ID NO: 893988
uucugaguaaaccagcaga

SEQ ID NO: 893990 - RNA, 19 nt, Artificial Sequence
  Description of Artificial Sequence: Synthetic oligonucleotide
  Sense strand starting at position 1062 of SEQ ID NO: 588847
cagaccgaucauuaagguu

SEQ ID NO: 893991 - RNA, 19 nt, Artificial Sequence
  Description of Artificial Sequence: Synthetic oligonucleotide
  Antisense strand to SEQ ID NO: 893990
aaccuuaaugaucggucug

SEQ ID NO: 893992 - RNA, 19 nt, Artificial Sequence
  Description of Artificial Sequence: Synthetic oligonucleotide
  Sense strand starting at position 1076 of SEQ ID NO: 588847
agguuucuacuaugaaaga

SEQ ID NO: 893993 - RNA, 19 nt, Artificial Sequence
  Description of Artificial Sequence: Synthetic oligonucleotide
  Antisense strand to SEQ ID NO: 893992
ucuuucauaguagaaaccu

SEQ ID NO: 893994 - RNA, 19 nt, Artificial Sequence
  Description of Artificial Sequence: Synthetic oligonucleotide
  Sense strand starting at position 1139 of SEQ ID NO: 588847
auuauacacuugcaagaga

SEQ ID NO: 893995 - RNA, 19 nt, Artificial Sequence
  Description of Artificial Sequence: Synthetic oligonucleotide
  Antisense strand to SEQ ID NO: 893994
ucucuugcaaguguauaau

SEQ ID NO: 893996 - RNA, 19 nt, Artificial Sequence
  Description of Artificial Sequence: Synthetic oligonucleotide
  Sense strand starting at position 1163 of SEQ ID NO: 588847
agcagcugcuaacuagaau

SEQ ID NO: 893997 - RNA, 19 nt, Artificial Sequence
  Description of Artificial Sequence: Synthetic oligonucleotide
  Antisense strand to SEQ ID NO: 893996
auucuaguuagcagcugcu

SEQ ID NO: 893998 - RNA, 19 nt, Artificial Sequence
  Description of Artificial Sequence: Synthetic oligonucleotide
  Sense strand starting at position 1260 of SEQ ID NO: 588847
aguugacgacucugcuauu

SEQ ID NO: 893999 - RNA, 19 nt, Artificial Sequence
  Description of Artificial Sequence: Synthetic oligonucleotide
  Antisense strand to SEQ ID NO: 893998
aauagcagagucgucaacu

SEQ ID NO: 894000 - RNA, 19 nt, Artificial Sequence
  Description of Artificial Sequence: Synthetic oligonucleotide
  Sense strand starting at position 1261 of SEQ ID NO: 588847
guugacgacucugcuauua

SEQ ID NO: 894001 - RNA, 19 nt, Artificial Sequence
  Description of Artificial Sequence: Synthetic oligonucleotide
  Antisense strand to SEQ ID NO: 894000
uaauagcagagucgucaac

SEQ ID NO: 894002 - RNA, 19 nt, Artificial Sequence
  Description of Artificial Sequence: Synthetic oligonucleotide
  Sense strand starting at position 1271 of SEQ ID NO: 588847
cugcuauuacgaugaagau

SEQ ID NO: 894003 - RNA, 19 nt, Artificial Sequence
  Description of Artificial Sequence: Synthetic oligonucleotide
  Antisense strand to SEQ ID NO: 894002
aucuucaucguaauagcag

SEQ ID NO: 894004 - RNA, 19 nt, Artificial Sequence
  Description of Artificial Sequence: Synthetic oligonucleotide
  Sense strand starting at position 1272 of SEQ ID NO: 588847
ugcuauuacgaugaagaua

SEQ ID NO: 894005 - RNA, 19 nt, Artificial Sequence
  Description of Artificial Sequence: Synthetic oligonucleotide
  Antisense strand to SEQ ID NO: 894004
uaucuucaucguaauagca

SEQ ID NO: 894006 - RNA, 19 nt, Artificial Sequence
  Description of Artificial Sequence: Synthetic oligonucleotide
  Sense strand starting at position 1545 of SEQ ID NO: 588847
aagcuaagugggugugaaa

SEQ ID NO: 894007 - RNA, 19 nt, Artificial Sequence
  Description of Artificial Sequence: Synthetic oligonucleotide
  Antisense strand to SEQ ID NO: 894006
uuucacacccacuuagcuu

SEQ ID NO: 894008 - RNA, 19 nt, Artificial Sequence
  Description of Artificial Sequence: Synthetic oligonucleotide
  Sense strand starting at position 1567 of SEQ ID NO: 588847
ccagaucgcgcgguucauu

SEQ ID NO: 894009 - RNA, 19 nt, Artificial Sequence
  Description of Artificial Sequence: Synthetic oligonucleotide
  Antisense strand to SEQ ID NO: 894008
aaugaaccgcgcgaucugg

SEQ ID NO: 894010 - RNA, 19 nt, Artificial Sequence
  Description of Artificial Sequence: Synthetic oligonucleotide
  Sense strand starting at position 1575 of SEQ ID NO: 588847
cgcgguucauuuccgguaa

SEQ ID NO: 894011 - RNA, 19 nt, Artificial Sequence
  Description of Artificial Sequence: Synthetic oligonucleotide
  Antisense strand to SEQ ID NO: 894010
uuaccggaaaugaaccgcg

SEQ ID NO: 894012 - RNA, 19 nt, Artificial Sequence
  Description of Artificial Sequence: Synthetic oligonucleotide
  Sense strand starting at position 3168 of SEQ ID NO: 588847
cuuccacuucguggagaaa

SEQ ID NO: 894013 - RNA, 19 nt, Artificial Sequence
  Description of Artificial Sequence: Synthetic oligonucleotide
  Antisense strand to SEQ ID NO: 894012
uuucuccacgaaguggaag

SEQ ID NO: 894014 - RNA, 19 nt, Artificial Sequence
  Description of Artificial Sequence: Synthetic oligonucleotide
  Sense strand starting at position 3358 of SEQ ID NO: 588847
gaacccguuucuguuauga

SEQ ID NO: 894015 - RNA, 19 nt, Artificial Sequence
  Description of Artificial Sequence: Synthetic oligonucleotide
  Antisense strand to SEQ ID NO: 894014
ucauaacagaaacggguuc

SEQ ID NO: 894016 - RNA, 19 nt, Artificial Sequence
  Description of Artificial Sequence: Synthetic oligonucleotide
  Sense strand starting at position 3472 of SEQ ID NO: 588847
gaaucauacugagcguuaa

SEQ ID NO: 894017 - RNA, 19 nt, Artificial Sequence
  Description of Artificial Sequence: Synthetic oligonucleotide
  Antisense strand to SEQ ID NO: 894016
uuaacgcucaguaugauuc

SEQ ID NO: 894018 - RNA, 19 nt, Artificial Sequence
  Description of Artificial Sequence: Synthetic oligonucleotide
  Sense strand starting at position 3473 of SEQ ID NO: 588847
aaucauacugagcguuaag

SEQ ID NO: 894019 - RNA, 19 nt, Artificial Sequence
  Description of Artificial Sequence: Synthetic oligonucleotide
  Antisense strand to SEQ ID NO: 894018
cuuaacgcucaguaugauu

SEQ ID NO: 894020 - RNA, 19 nt, Artificial Sequence
  Description of Artificial Sequence: Synthetic oligonucleotide
  Sense strand starting at position 3482 of SEQ ID NO: 588847
gagcguuaagugccaguuu

SEQ ID NO: 894021 - RNA, 19 nt, Artificial Sequence
  Description of Artificial Sequence: Synthetic oligonucleotide
  Antisense strand to SEQ ID NO: 894020
aaacuggcacuuaacgcuc

SEQ ID NO: 894022 - RNA, 19 nt, Artificial Sequence
  Description of Artificial Sequence: Synthetic oligonucleotide
  Sense strand starting at position 3556 of SEQ ID NO: 588847
ggcgguguucuguucauag

SEQ ID NO: 894023 - RNA, 19 nt, Artificial Sequence
  Description of Artificial Sequence: Synthetic oligonucleotide
  Antisense strand to SEQ ID NO: 894022
cuaugaacagaacaccgcc

SEQ ID NO: 894024 - RNA, 19 nt, Artificial Sequence
  Description of Artificial Sequence: Synthetic oligonucleotide
  Sense strand starting at position 3558 of SEQ ID NO: 588847
cgguguucuguucauagag

SEQ ID NO: 894025 - RNA, 19 nt, Artificial Sequence
  Description of Artificial Sequence: Synthetic oligonucleotide
  Antisense strand to SEQ ID NO: 894024
cucuaugaacagaacaccg

SEQ ID NO: 894026 - RNA, 19 nt, Artificial Sequence
  Description of Artificial Sequence: Synthetic oligonucleotide
  Sense strand starting at position 3590 of SEQ ID NO: 588847
acaaguucuacuugagagg

SEQ ID NO: 894027 - RNA, 19 nt, Artificial Sequence
  Description of Artificial Sequence: Synthetic oligonucleotide
  Antisense strand to SEQ ID NO: 894026
ccucucaaguagaacuugu

SEQ ID NO: 894028 - RNA, 19 nt, Artificial Sequence
  Description of Artificial Sequence: Synthetic oligonucleotide
  Sense strand starting at position 3597 of SEQ ID NO: 588847
cuacuugagaggcaaaguu

SEQ ID NO: 894029 - RNA, 19 nt, Artificial Sequence
  Description of Artificial Sequence: Synthetic oligonucleotide
  Antisense strand to SEQ ID NO: 894028
aacuuugccucucaaguag

SEQ ID NO: 894030 - RNA, 19 nt, Artificial Sequence
  Description of Artificial Sequence: Synthetic oligonucleotide
  Sense strand starting at position 197 of SEQ ID NO: 588848
augcuuguagcugacuaau

SEQ ID NO: 894031 - RNA, 19 nt, Artificial Sequence
  Description of Artificial Sequence: Synthetic oligonucleotide
  Antisense strand to SEQ ID NO: 894030
auuagucagcuacaagcau

SEQ ID NO: 894032 - RNA, 19 nt, Artificial Sequence
  Description of Artificial Sequence: Synthetic oligonucleotide
  Sense strand starting at position 199 of SEQ ID NO: 588848
gcuuguagcugacuaauuu

SEQ ID NO: 894033 - RNA, 19 nt, Artificial Sequence
  Description of Artificial Sequence: Synthetic oligonucleotide
  Antisense strand to SEQ ID NO: 894032
aaauuagucagcuacaagc

SEQ ID NO: 894034 - RNA, 19 nt, Artificial Sequence
  Description of Artificial Sequence: Synthetic oligonucleotide
  Sense strand starting at position 257 of SEQ ID NO: 588848
ucugcugguuuacucagaa

SEQ ID NO: 894035 - RNA, 19 nt, Artificial Sequence
  Description of Artificial Sequence: Synthetic oligonucleotide
  Antisense strand to SEQ ID NO: 894034
uucugaguaaaccagcaga

SEQ ID NO: 894036 - RNA, 19 nt, Artificial Sequence
  Description of Artificial Sequence: Synthetic oligonucleotide
  Sense strand starting at position 261 of SEQ ID NO: 588848
cugguuuacucagaaauug

SEQ ID NO: 894037 - RNA, 19 nt, Artificial Sequence
  Description of Artificial Sequence: Synthetic oligonucleotide
  Antisense strand to SEQ ID NO: 894036
caauuucugaguaaaccag

SEQ ID NO: 894038 - RNA, 19 nt, Artificial Sequence
  Description of Artificial Sequence: Synthetic oligonucleotide
  Sense strand starting at position 317 of SEQ ID NO: 588848
cagaccgaucauuaagguu

SEQ ID NO: 894039 - RNA, 19 nt, Artificial Sequence
  Description of Artificial Sequence: Synthetic oligonucleotide
  Antisense strand to SEQ ID NO: 894038
aaccuuaaugaucggucug

SEQ ID NO: 894040 - RNA, 19 nt, Artificial Sequence
  Description of Artificial Sequence: Synthetic oligonucleotide
  Sense strand starting at position 331 of SEQ ID NO: 588848
agguuucuacuaugaaaga

SEQ ID NO: 894041 - RNA, 19 nt, Artificial Sequence
  Description of Artificial Sequence: Synthetic oligonucleotide
  Antisense strand to SEQ ID NO: 894040
ucuuucauaguagaaaccu

SEQ ID NO: 894042 - RNA, 19 nt, Artificial Sequence
  Description of Artificial Sequence: Synthetic oligonucleotide
  Sense strand starting at position 332 of SEQ ID NO: 588848
gguuucuacuaugaaagac

SEQ ID NO: 894043 - RNA, 19 nt, Artificial Sequence
  Description of Artificial Sequence: Synthetic oligonucleotide
  Antisense strand to SEQ ID NO: 894042
gucuuucauaguagaaacc

SEQ ID NO: 894044 - RNA, 19 nt, Artificial Sequence
  Description of Artificial Sequence: Synthetic oligonucleotide
  Sense strand starting at position 394 of SEQ ID NO: 588848
auuauacacuugcaagaga

SEQ ID NO: 894045 - RNA, 19 nt, Artificial Sequence
  Description of Artificial Sequence: Synthetic oligonucleotide
  Antisense strand to SEQ ID NO: 894044
ucucuugcaaguguauaau

SEQ ID NO: 894046 - RNA, 19 nt, Artificial Sequence
  Description of Artificial Sequence: Synthetic oligonucleotide
  Sense strand starting at position 418 of SEQ ID NO: 588848
agcagcugcuaacuagaau

SEQ ID NO: 894047 - RNA, 19 nt, Artificial Sequence
  Description of Artificial Sequence: Synthetic oligonucleotide
  Antisense strand to SEQ ID NO: 894046
auucuaguuagcagcugcu

SEQ ID NO: 894048 - RNA, 19 nt, Artificial Sequence
  Description of Artificial Sequence: Synthetic oligonucleotide
  Sense strand starting at position 515 of SEQ ID NO: 588848
aguugacgacucugcuauu

SEQ ID NO: 894049 - RNA, 19 nt, Artificial Sequence
  Description of Artificial Sequence: Synthetic oligonucleotide
  Antisense strand to SEQ ID NO: 894048
aauagcagagucgucaacu

SEQ ID NO: 894050 - RNA, 19 nt, Artificial Sequence
  Description of Artificial Sequence: Synthetic oligonucleotide
  Sense strand starting at position 516 of SEQ ID NO: 588848
guugacgacucugcuauua

SEQ ID NO: 894051 - RNA, 19 nt, Artificial Sequence
  Description of Artificial Sequence: Synthetic oligonucleotide
  Antisense strand to SEQ ID NO: 894050
uaauagcagagucgucaac

SEQ ID NO: 894052 - RNA, 19 nt, Artificial Sequence
  Description of Artificial Sequence: Synthetic oligonucleotide
  Sense strand starting at position 526 of SEQ ID NO: 588848
cugcuauuacgaugaagau

SEQ ID NO: 894053 - RNA, 19 nt, Artificial Sequence
  Description of Artificial Sequence: Synthetic oligonucleotide
  Antisense strand to SEQ ID NO: 894052
aucuucaucguaauagcag

SEQ ID NO: 894054 - RNA, 19 nt, Artificial Sequence
  Description of Artificial Sequence: Synthetic oligonucleotide
  Sense strand starting at position 527 of SEQ ID NO: 588848
ugcuauuacgaugaagaua

SEQ ID NO: 894055 - RNA, 19 nt, Artificial Sequence
  Description of Artificial Sequence: Synthetic oligonucleotide
  Antisense strand to SEQ ID NO: 894054
uaucuucaucguaauagca

SEQ ID NO: 894056 - RNA, 19 nt, Artificial Sequence
  Description of Artificial Sequence: Synthetic oligonucleotide
  Sense strand starting at position 800 of SEQ ID NO: 588848
aagcuaagugggugugaaa

SEQ ID NO: 894057 - RNA, 19 nt, Artificial Sequence
  Description of Artificial Sequence: Synthetic oligonucleotide
  Antisense strand to SEQ ID NO: 894056
uuucacacccacuuagcuu

SEQ ID NO: 894058 - RNA, 19 nt, Artificial Sequence
  Description of Artificial Sequence: Synthetic oligonucleotide
  Sense strand starting at position 821 of SEQ ID NO: 588848
gccagaucgcgcgguucau

SEQ ID NO: 894059 - RNA, 19 nt, Artificial Sequence
  Description of Artificial Sequence: Synthetic oligonucleotide
  Antisense strand to SEQ ID NO: 894058
augaaccgcgcgaucuggc

SEQ ID NO: 894060 - RNA, 19 nt, Artificial Sequence
  Description of Artificial Sequence: Synthetic oligonucleotide
  Sense strand starting at position 822 of SEQ ID NO: 588848
ccagaucgcgcgguucauu

SEQ ID NO: 894061 - RNA, 19 nt, Artificial Sequence
  Description of Artificial Sequence: Synthetic oligonucleotide
  Antisense strand to SEQ ID NO: 894060
aaugaaccgcgcgaucugg

SEQ ID NO: 894062 - RNA, 19 nt, Artificial Sequence
  Description of Artificial Sequence: Synthetic oligonucleotide
  Sense strand starting at position 830 of SEQ ID NO: 588848
cgcgguucauuuccgguaa

SEQ ID NO: 894063 - RNA, 19 nt, Artificial Sequence
  Description of Artificial Sequence: Synthetic oligonucleotide
  Antisense strand to SEQ ID NO: 894062
uuaccggaaaugaaccgcg

SEQ ID NO: 894064 - RNA, 19 nt, Artificial Sequence
  Description of Artificial Sequence: Synthetic oligonucleotide
  Sense strand starting at position 2422 of SEQ ID NO: 588848
ccuuccacuucguggagaa

SEQ ID NO: 894065 - RNA, 19 nt, Artificial Sequence
  Description of Artificial Sequence: Synthetic oligonucleotide
  Antisense strand to SEQ ID NO: 894064
uucuccacgaaguggaagg

SEQ ID NO: 894066 - RNA, 19 nt, Artificial Sequence
  Description of Artificial Sequence: Synthetic oligonucleotide
  Sense strand starting at position 2423 of SEQ ID NO: 588848
cuuccacuucguggagaaa

SEQ ID NO: 894067 - RNA, 19 nt, Artificial Sequence
  Description of Artificial Sequence: Synthetic oligonucleotide
  Antisense strand to SEQ ID NO: 894066
uuucuccacgaaguggaag

SEQ ID NO: 894068 - RNA, 19 nt, Artificial Sequence
  Description of Artificial Sequence: Synthetic oligonucleotide
  Sense strand starting at position 2613 of SEQ ID NO: 588848
gaacccguuucuguuauga

SEQ ID NO: 894069 - RNA, 19 nt, Artificial Sequence
  Description of Artificial Sequence: Synthetic oligonucleotide
  Antisense strand to SEQ ID NO: 894068
ucauaacagaaacggguuc

SEQ ID NO: 894070 - RNA, 19 nt, Artificial Sequence
  Description of Artificial Sequence: Synthetic oligonucleotide
  Sense strand starting at position 2615 of SEQ ID NO: 588848
acccguuucuguuaugaaa

SEQ ID NO: 894071 - RNA, 19 nt, Artificial Sequence
  Description of Artificial Sequence: Synthetic oligonucleotide
  Antisense strand to SEQ ID NO: 894070
uuucauaacagaaacgggu

SEQ ID NO: 894072 - RNA, 19 nt, Artificial Sequence
  Description of Artificial Sequence: Synthetic oligonucleotide
  Sense strand starting at position 2617 of SEQ ID NO: 588848
ccguuucuguuaugaaaug

SEQ ID NO: 894073 - RNA, 19 nt, Artificial Sequence
  Description of Artificial Sequence: Synthetic oligonucleotide
  Antisense strand to SEQ ID NO: 894072
cauuucauaacagaaacgg

SEQ ID NO: 894074 - RNA, 19 nt, Artificial Sequence
  Description of Artificial Sequence: Synthetic oligonucleotide
  Sense strand starting at position 2618 of SEQ ID NO: 588848
cguuucuguuaugaaauga

SEQ ID NO: 894075 - RNA, 19 nt, Artificial Sequence
  Description of Artificial Sequence: Synthetic oligonucleotide
  Antisense strand to SEQ ID NO: 894074
ucauuucauaacagaaacg

SEQ ID NO: 894076 - RNA, 19 nt, Artificial Sequence
  Description of Artificial Sequence: Synthetic oligonucleotide
  Sense strand starting at position 2724 of SEQ ID NO: 588848
caagaaucauacugagcgu

SEQ ID NO: 894077 - RNA, 19 nt, Artificial Sequence
  Description of Artificial Sequence: Synthetic oligonucleotide
  Antisense strand to SEQ ID NO: 894076
acgcucaguaugauucuug

SEQ ID NO: 894078 - RNA, 19 nt, Artificial Sequence
  Description of Artificial Sequence: Synthetic oligonucleotide
  Sense strand starting at position 2727 of SEQ ID NO: 588848
gaaucauacugagcguuaa

SEQ ID NO: 894079 - RNA, 19 nt, Artificial Sequence
  Description of Artificial Sequence: Synthetic oligonucleotide
  Antisense strand to SEQ ID NO: 894078
uuaacgcucaguaugauuc

SEQ ID NO: 894080 - RNA, 19 nt, Artificial Sequence
  Description of Artificial Sequence: Synthetic oligonucleotide
  Sense strand starting at position 2728 of SEQ ID NO: 588848
aaucauacugagcguuaag

SEQ ID NO: 894081 - RNA, 19 nt, Artificial Sequence
  Description of Artificial Sequence: Synthetic oligonucleotide
  Antisense strand to SEQ ID NO: 894080
cuuaacgcucaguaugauu

SEQ ID NO: 894082 - RNA, 19 nt, Artificial Sequence
  Description of Artificial Sequence: Synthetic oligonucleotide
  Sense strand starting at position 2737 of SEQ ID NO: 588848
gagcguuaagugccaguuu

SEQ ID NO: 894083 - RNA, 19 nt, Artificial Sequence
  Description of Artificial Sequence: Synthetic oligonucleotide
  Antisense strand to SEQ ID NO: 894082
aaacuggcacuuaacgcuc

SEQ ID NO: 894084 - RNA, 19 nt, Artificial Sequence
  Description of Artificial Sequence: Synthetic oligonucleotide
  Sense strand starting at position 2811 of SEQ ID NO: 588848
ggcgguguucuguucauag

SEQ ID NO: 894085 - RNA, 19 nt, Artificial Sequence
  Description of Artificial Sequence: Synthetic oligonucleotide
  Antisense strand to SEQ ID NO: 894084
cuaugaacagaacaccgcc

SEQ ID NO: 894086 - RNA, 19 nt, Artificial Sequence
  Description of Artificial Sequence: Synthetic oligonucleotide
  Sense strand starting at position 2813 of SEQ ID NO: 588848
cgguguucuguucauagag

SEQ ID NO: 894087 - RNA, 19 nt, Artificial Sequence
  Description of Artificial Sequence: Synthetic oligonucleotide
  Antisense strand to SEQ ID NO: 894086
cucuaugaacagaacaccg

SEQ ID NO: 894088 - RNA, 19 nt, Artificial Sequence
  Description of Artificial Sequence: Synthetic oligonucleotide
  Sense strand starting at position 2841 of SEQ ID NO: 588848
gccaacaaguucuacuuga

SEQ ID NO: 894089 - RNA, 19 nt, Artificial Sequence
  Description of Artificial Sequence: Synthetic oligonucleotide
  Antisense strand to SEQ ID NO: 894088
ucaaguagaacuuguuggc

SEQ ID NO: 894090 - RNA, 19 nt, Artificial Sequence
  Description of Artificial Sequence: Synthetic oligonucleotide
  Sense strand starting at position 2845 of SEQ ID NO: 588848
acaaguucuacuugagagg

SEQ ID NO: 894091 - RNA, 19 nt, Artificial Sequence
  Description of Artificial Sequence: Synthetic oligonucleotide
  Antisense strand to SEQ ID NO: 894090
ccucucaaguagaacuugu

SEQ ID NO: 894092 - RNA, 19 nt, Artificial Sequence
  Description of Artificial Sequence: Synthetic oligonucleotide
  Sense strand starting at position 2848 of SEQ ID NO: 588848
aguucuacuugagaggcaa

SEQ ID NO: 894093 - RNA, 19 nt, Artificial Sequence
  Description of Artificial Sequence: Synthetic oligonucleotide
  Antisense strand to SEQ ID NO: 894092
uugccucucaaguagaacu

SEQ ID NO: 894094 - RNA, 19 nt, Artificial Sequence
  Description of Artificial Sequence: Synthetic oligonucleotide
  Sense strand starting at position 2852 of SEQ ID NO: 588848
cuacuugagaggcaaaguu

SEQ ID NO: 894095 - RNA, 19 nt, Artificial Sequence
  Description of Artificial Sequence: Synthetic oligonucleotide
  Antisense strand to SEQ ID NO: 894094
aacuuugccucucaaguag

SEQ ID NO: 894096 - RNA, 19 nt, Artificial Sequence
  Description of Artificial Sequence: Synthetic oligonucleotide
  Sense strand starting at position 2860 of SEQ ID NO: 588848
gaggcaaaguucugaacca

SEQ ID NO: 894097 - RNA, 19 nt, Artificial Sequence
  Description of Artificial Sequence: Synthetic oligonucleotide
  Antisense strand to SEQ ID NO: 894096
ugguucagaacuuugccuc

SEQ ID NO: 894098 - RNA, 19 nt, Artificial Sequence
  Description of Artificial Sequence: Synthetic oligonucleotide
  Sense strand starting at position 3315 of SEQ ID NO: 588848
uagugauacgcuggccaau

SEQ ID NO: 894099 - RNA, 19 nt, Artificial Sequence
  Description of Artificial Sequence: Synthetic oligonucleotide
  Antisense strand to SEQ ID NO: 894098
auuggccagcguaucacua

SEQ ID NO: 894100 - RNA, 19 nt, Artificial Sequence
  Description of Artificial Sequence: Synthetic oligonucleotide
  Sense strand starting at position 3317 of SEQ ID NO: 588848
gugauacgcuggccaauuu

SEQ ID NO: 894101 - RNA, 19 nt, Artificial Sequence
  Description of Artificial Sequence: Synthetic oligonucleotide
  Antisense strand to SEQ ID NO: 894100
aaauuggccagcguaucac

SEQ ID NO: 894102 - RNA, 19 nt, Artificial Sequence
  Description of Artificial Sequence: Synthetic oligonucleotide
  Sense strand starting at position 3353 of SEQ ID NO: 588848
auagcucacuccuguuauc

SEQ ID NO: 894103 - RNA, 19 nt, Artificial Sequence
  Description of Artificial Sequence: Synthetic oligonucleotide
  Antisense strand to SEQ ID NO: 894102
gauaacaggagugagcuau

SEQ ID NO: 894104 - RNA, 19 nt, Artificial Sequence
  Description of Artificial Sequence: Synthetic oligonucleotide
  Sense strand starting at position 3510 of SEQ ID NO: 588848
ccugaaaucucucuuugga

SEQ ID NO: 894105 - RNA, 19 nt, Artificial Sequence
  Description of Artificial Sequence: Synthetic oligonucleotide
  Antisense strand to SEQ ID NO: 894104
uccaaagagagauuucagg

SEQ ID NO: 894106 - RNA, 19 nt, Artificial Sequence
  Description of Artificial Sequence: Synthetic oligonucleotide
  Sense strand starting at position 3512 of SEQ ID NO: 588848
ugaaaucucucuuuggaca

SEQ ID NO: 894107 - RNA, 19 nt, Artificial Sequence
  Description of Artificial Sequence: Synthetic oligonucleotide
  Antisense strand to SEQ ID NO: 894106
uguccaaagagagauuuca

SEQ ID NO: 894108 - RNA, 19 nt, Artificial Sequence
  Description of Artificial Sequence: Synthetic oligonucleotide
  Sense strand starting at position 3721 of SEQ ID NO: 588848
ucagcauccugaguugcua

SEQ ID NO: 894109 - RNA, 19 nt, Artificial Sequence
  Description of Artificial Sequence: Synthetic oligonucleotide
  Antisense strand to SEQ ID NO: 894108
uagcaacucaggaugcuga

SEQ ID NO: 894110 - RNA, 19 nt, Artificial Sequence
  Description of Artificial Sequence: Synthetic oligonucleotide
  Sense strand starting at position 62 of SEQ ID NO: 588849
cuucuuugaucgccaucaa

SEQ ID NO: 894111 - RNA, 19 nt, Artificial Sequence
  Description of Artificial Sequence: Synthetic oligonucleotide
  Antisense strand to SEQ ID NO: 894110
uugauggcgaucaaagaag

SEQ ID NO: 894112 - RNA, 19 nt, Artificial Sequence
  Description of Artificial Sequence: Synthetic oligonucleotide
  Sense strand starting at position 63 of SEQ ID NO: 588849
uucuuugaucgccaucaau

SEQ ID NO: 894113 - RNA, 19 nt, Artificial Sequence
  Description of Artificial Sequence: Synthetic oligonucleotide
  Antisense strand to SEQ ID NO: 894112
auugauggcgaucaaagaa

SEQ ID NO: 894114 - RNA, 19 nt, Artificial Sequence
  Description of Artificial Sequence: Synthetic oligonucleotide
  Sense strand starting at position 147 of SEQ ID NO: 588849
uccuccaauguugggauaa

SEQ ID NO: 894115 - RNA, 19 nt, Artificial Sequence
  Description of Artificial Sequence: Synthetic oligonucleotide
  Antisense strand to SEQ ID NO: 894114
uuaucccaacauuggagga

SEQ ID NO: 894116 - RNA, 19 nt, Artificial Sequence
  Description of Artificial Sequence: Synthetic oligonucleotide
  Sense strand starting at position 148 of SEQ ID NO: 588849
ccuccaauguugggauaaa

SEQ ID NO: 894117 - RNA, 19 nt, Artificial Sequence
  Description of Artificial Sequence: Synthetic oligonucleotide
  Antisense strand to SEQ ID NO: 894116
uuuaucccaacauuggagg

SEQ ID NO: 894118 - RNA, 19 nt, Artificial Sequence
  Description of Artificial Sequence: Synthetic oligonucleotide
  Sense strand starting at position 346 of SEQ ID NO: 588849
cccgguacuuaacugugaa

SEQ ID NO: 894119 - RNA, 19 nt, Artificial Sequence
  Description of Artificial Sequence: Synthetic oligonucleotide
  Antisense strand to SEQ ID NO: 894118
uucacaguuaaguaccggg

SEQ ID NO: 894120 - RNA, 19 nt, Artificial Sequence
  Description of Artificial Sequence: Synthetic oligonucleotide
  Sense strand starting at position 347 of SEQ ID NO: 588849
ccgguacuuaacugugaau

SEQ ID NO: 894121 - RNA, 19 nt, Artificial Sequence
  Description of Artificial Sequence: Synthetic oligonucleotide
  Antisense strand to SEQ ID NO: 894120
auucacaguuaaguaccgg

SEQ ID NO: 894122 - RNA, 19 nt, Artificial Sequence
  Description of Artificial Sequence: Synthetic oligonucleotide
  Sense strand starting at position 349 of SEQ ID NO: 588849
gguacuuaacugugaauac

SEQ ID NO: 894123 - RNA, 19 nt, Artificial Sequence
  Description of Artificial Sequence: Synthetic oligonucleotide
  Antisense strand to SEQ ID NO: 894122
guauucacaguuaaguacc

SEQ ID NO: 894124 - RNA, 19 nt, Artificial Sequence
  Description of Artificial Sequence: Synthetic oligonucleotide
  Sense strand starting at position 350 of SEQ ID NO: 588849
guacuuaacugugaauaca

SEQ ID NO: 894125 - RNA, 19 nt, Artificial Sequence
  Description of Artificial Sequence: Synthetic oligonucleotide
  Antisense strand to SEQ ID NO: 894124
uguauucacaguuaaguac

SEQ ID NO: 894126 - RNA, 19 nt, Artificial Sequence
  Description of Artificial Sequence: Synthetic oligonucleotide
  Sense strand starting at position 373 of SEQ ID NO: 588849
agacuuaccucaggaacuu

SEQ ID NO: 894127 - RNA, 19 nt, Artificial Sequence
  Description of Artificial Sequence: Synthetic oligonucleotide
  Antisense strand to SEQ ID NO: 894126
aaguuccugagguaagucu

SEQ ID NO: 894128 - RNA, 19 nt, Artificial Sequence
  Description of Artificial Sequence: Synthetic oligonucleotide
  Sense strand starting at position 447 of SEQ ID NO: 588849
ccacuaagauucgaagaga

SEQ ID NO: 894129 - RNA, 19 nt, Artificial Sequence
  Description of Artificial Sequence: Synthetic oligonucleotide
  Antisense strand to SEQ ID NO: 894128
ucucuucgaaucuuagugg

SEQ ID NO: 894130 - RNA, 19 nt, Artificial Sequence
  Description of Artificial Sequence: Synthetic oligonucleotide
  Sense strand starting at position 477 of SEQ ID NO: 588849
gagaacaaccagugugcaa

SEQ ID NO: 894131 - RNA, 19 nt, Artificial Sequence
  Description of Artificial Sequence: Synthetic oligonucleotide
  Antisense strand to SEQ ID NO: 894130
uugcacacugguuguucuc

SEQ ID NO: 894132 - RNA, 19 nt, Artificial Sequence
  Description of Artificial Sequence: Synthetic oligonucleotide
  Sense strand starting at position 495 of SEQ ID NO: 588849
agcucuuccugagugucau

SEQ ID NO: 894133 - RNA, 19 nt, Artificial Sequence
  Description of Artificial Sequence: Synthetic oligonucleotide
  Antisense strand to SEQ ID NO: 894132
augacacucaggaagagcu

SEQ ID NO: 894134 - RNA, 19 nt, Artificial Sequence
  Description of Artificial Sequence: Synthetic oligonucleotide
  Sense strand starting at position 496 of SEQ ID NO: 588849
gcucuuccugagugucauc

SEQ ID NO: 894135 - RNA, 19 nt, Artificial Sequence
  Description of Artificial Sequence: Synthetic oligonucleotide
  Antisense strand to SEQ ID NO: 894134
gaugacacucaggaagagc

SEQ ID NO: 894136 - RNA, 19 nt, Artificial Sequence
  Description of Artificial Sequence: Synthetic oligonucleotide
  Sense strand starting at position 550 of SEQ ID NO: 588849
cuuccagucuaucucugau

SEQ ID NO: 894137 - RNA, 19 nt, Artificial Sequence
  Description of Artificial Sequence: Synthetic oligonucleotide
  Antisense strand to SEQ ID NO: 894136
aucagagauagacuggaag

SEQ ID NO: 894138 - RNA, 19 nt, Artificial Sequence
  Description of Artificial Sequence: Synthetic oligonucleotide
  Sense strand starting at position 552 of SEQ ID NO: 588849
uccagucuaucucugauga

SEQ ID NO: 894139 - RNA, 19 nt, Artificial Sequence
  Description of Artificial Sequence: Synthetic oligonucleotide
  Antisense strand to SEQ ID NO: 894138
ucaucagagauagacugga

SEQ ID NO: 894140 - RNA, 19 nt, Artificial Sequence
  Description of Artificial Sequence: Synthetic oligonucleotide
  Sense strand starting at position 585 of SEQ ID NO: 588849
ccuuuaggacucugcacau

SEQ ID NO: 894141 - RNA, 19 nt, Artificial Sequence
  Description of Artificial Sequence: Synthetic oligonucleotide
  Antisense strand to SEQ ID NO: 894140
augugcagaguccuaaagg

SEQ ID NO: 894142 - RNA, 19 nt, Artificial Sequence
  Description of Artificial Sequence: Synthetic oligonucleotide
  Sense strand starting at position 600 of SEQ ID NO: 588849
acauguuuccaucauugca

SEQ ID NO: 894143 - RNA, 19 nt, Artificial Sequence
  Description of Artificial Sequence: Synthetic oligonucleotide
  Antisense strand to SEQ ID NO: 894142
ugcaaugauggaaacaugu

SEQ ID NO: 894144 - RNA, 19 nt, Artificial Sequence
  Description of Artificial Sequence: Synthetic oligonucleotide
  Sense strand starting at position 796 of SEQ ID NO: 588849
auugguaaguggcauuuau

SEQ ID NO: 894145 - RNA, 19 nt, Artificial Sequence
  Description of Artificial Sequence: Synthetic oligonucleotide
  Antisense strand to SEQ ID NO: 894144
auaaaugccacuuaccaau

SEQ ID NO: 894146 - RNA, 19 nt, Artificial Sequence
  Description of Artificial Sequence: Synthetic oligonucleotide
  Sense strand starting at position 883 of SEQ ID NO: 588849
ccagauagguuagacaacu

SEQ ID NO: 894147 - RNA, 19 nt, Artificial Sequence
  Description of Artificial Sequence: Synthetic oligonucleotide
  Antisense strand to SEQ ID NO: 894146
aguugucuaaccuaucugg

SEQ ID NO: 894148 - RNA, 19 nt, Artificial Sequence
  Description of Artificial Sequence: Synthetic oligonucleotide
  Sense strand starting at position 906 of SEQ ID NO: 588849
uguggacuuccaggaaaca

SEQ ID NO: 894149 - RNA, 19 nt, Artificial Sequence
  Description of Artificial Sequence: Synthetic oligonucleotide
  Antisense strand to SEQ ID NO: 894148
uguuuccuggaaguccaca

SEQ ID NO: 894150 - RNA, 19 nt, Artificial Sequence
  Description of Artificial Sequence: Synthetic oligonucleotide
  Sense strand starting at position 1049 of SEQ ID NO: 588849
ucagcugugucacuuauca

SEQ ID NO: 894151 - RNA, 19 nt, Artificial Sequence
  Description of Artificial Sequence: Synthetic oligonucleotide
  Antisense strand to SEQ ID NO: 894150
ugauaagugacacagcuga

SEQ ID NO: 894152 - RNA, 19 nt, Artificial Sequence
  Description of Artificial Sequence: Synthetic oligonucleotide
  Sense strand starting at position 1053 of SEQ ID NO: 588849
cugugucacuuaucaaaua

SEQ ID NO: 894153 - RNA, 19 nt, Artificial Sequence
  Description of Artificial Sequence: Synthetic oligonucleotide
  Antisense strand to SEQ ID NO: 894152
uauuugauaagugacacag

SEQ ID NO: 894154 - RNA, 19 nt, Artificial Sequence
  Description of Artificial Sequence: Synthetic oligonucleotide
  Sense strand starting at position 1140 of SEQ ID NO: 588849
ugcaaauugcugggcacau

SEQ ID NO: 894155 - RNA, 19 nt, Artificial Sequence
  Description of Artificial Sequence: Synthetic oligonucleotide
  Antisense strand to SEQ ID NO: 894154
augugcccagcaauuugca

SEQ ID NO: 894156 - RNA, 19 nt, Artificial Sequence
  Description of Artificial Sequence: Synthetic oligonucleotide
  Sense strand starting at position 1303 of SEQ ID NO: 588849
cugagcucagccugggaaa

SEQ ID NO: 894157 - RNA, 19 nt, Artificial Sequence
  Description of Artificial Sequence: Synthetic oligonucleotide
  Antisense strand to SEQ ID NO: 894156
uuucccaggcugagcucag

SEQ ID NO: 894158 - RNA, 19 nt, Artificial Sequence
  Description of Artificial Sequence: Synthetic oligonucleotide
  Sense strand starting at position 1382 of SEQ ID NO: 588849
gcgccuauggucccaguua

SEQ ID NO: 894159 - RNA, 19 nt, Artificial Sequence
  Description of Artificial Sequence: Synthetic oligonucleotide
  Antisense strand to SEQ ID NO: 894158
uaacugggaccauaggcgc

SEQ ID NO: 894160 - RNA, 19 nt, Artificial Sequence
  Description of Artificial Sequence: Synthetic oligonucleotide
  Sense strand starting at position 2382 of SEQ ID NO: 588849
aggugucucagcggaugua

SEQ ID NO: 894161 - RNA, 19 nt, Artificial Sequence
  Description of Artificial Sequence: Synthetic oligonucleotide
  Antisense strand to SEQ ID NO: 894160
uacauccgcugagacaccu

SEQ ID NO: 894162 - RNA, 19 nt, Artificial Sequence
  Description of Artificial Sequence: Synthetic oligonucleotide
  Sense strand starting at position 2395 of SEQ ID NO: 588849
gauguacuacggugacgaa

SEQ ID NO: 894163 - RNA, 19 nt, Artificial Sequence
  Description of Artificial Sequence: Synthetic oligonucleotide
  Antisense strand to SEQ ID NO: 894162
uucgucaccguaguacauc

SEQ ID NO: 894164 - RNA, 19 nt, Artificial Sequence
  Description of Artificial Sequence: Synthetic oligonucleotide
  Sense strand starting at position 2466 of SEQ ID NO: 588849
acguguaauuucggaggaa

SEQ ID NO: 894165 - RNA, 19 nt, Artificial Sequence
  Description of Artificial Sequence: Synthetic oligonucleotide
  Antisense strand to SEQ ID NO: 894164
uuccuccgaaauuacacgu

SEQ ID NO: 894166 - RNA, 19 nt, Artificial Sequence
  Description of Artificial Sequence: Synthetic oligonucleotide
  Sense strand starting at position 2467 of SEQ ID NO: 588849
cguguaauuucggaggaau

SEQ ID NO: 894167 - RNA, 19 nt, Artificial Sequence
  Description of Artificial Sequence: Synthetic oligonucleotide
  Antisense strand to SEQ ID NO: 894166
auuccuccgaaauuacacg

SEQ ID NO: 894168 - RNA, 19 nt, Artificial Sequence
  Description of Artificial Sequence: Synthetic oligonucleotide
  Sense strand starting at position 2478 of SEQ ID NO: 588849
ggaggaauauguguauauc

SEQ ID NO: 894169 - RNA, 19 nt, Artificial Sequence
  Description of Artificial Sequence: Synthetic oligonucleotide
  Antisense strand to SEQ ID NO: 894168
gauauacacauauuccucc

SEQ ID NO: 894170 - RNA, 19 nt, Artificial Sequence
  Description of Artificial Sequence: Synthetic oligonucleotide
  Sense strand starting at position 2481 of SEQ ID NO: 588849
ggaauauguguauauccuu

SEQ ID NO: 894171 - RNA, 19 nt, Artificial Sequence
  Description of Artificial Sequence: Synthetic oligonucleotide
  Antisense strand to SEQ ID NO: 894170
aaggauauacacauauucc

SEQ ID NO: 894172 - RNA, 19 nt, Artificial Sequence
  Description of Artificial Sequence: Synthetic oligonucleotide
  Sense strand starting at position 2562 of SEQ ID NO: 588849
gaguaaaucccucgcuggu

SEQ ID NO: 894173 - RNA, 19 nt, Artificial Sequence
  Description of Artificial Sequence: Synthetic oligonucleotide
  Antisense strand to SEQ ID NO: 894172
accagcgagggauuuacuc

SEQ ID NO: 894174 - RNA, 19 nt, Artificial Sequence
  Description of Artificial Sequence: Synthetic oligonucleotide
  Sense strand starting at position 2583 of SEQ ID NO: 588849
gguggcucccgcuucuaau

SEQ ID NO: 894175 - RNA, 19 nt, Artificial Sequence
  Description of Artificial Sequence: Synthetic oligonucleotide
  Antisense strand to SEQ ID NO: 894174
auuagaagcgggagccacc

SEQ ID NO: 894176 - RNA, 19 nt, Artificial Sequence
  Description of Artificial Sequence: Synthetic oligonucleotide
  Sense strand starting at position 2676 of SEQ ID NO: 588849
gagacacccguauguacaa

SEQ ID NO: 894177 - RNA, 19 nt, Artificial Sequence
  Description of Artificial Sequence: Synthetic oligonucleotide
  Antisense strand to SEQ ID NO: 894176
uuguacauacgggugucuc

SEQ ID NO: 894178 - RNA, 19 nt, Artificial Sequence
  Description of Artificial Sequence: Synthetic oligonucleotide
  Sense strand starting at position 3071 of SEQ ID NO: 588849
guggauauccauugagacc

SEQ ID NO: 894179 - RNA, 19 nt, Artificial Sequence
  Description of Artificial Sequence: Synthetic oligonucleotide
  Antisense strand to SEQ ID NO: 894178
ggucucaauggauauccac

SEQ ID NO: 894180 - RNA, 19 nt, Artificial Sequence
  Description of Artificial Sequence: Synthetic oligonucleotide
  Sense strand starting at position 3603 of SEQ ID NO: 588849
acaauuaguaguggugacu

SEQ ID NO: 894181 - RNA, 19 nt, Artificial Sequence
  Description of Artificial Sequence: Synthetic oligonucleotide
  Antisense strand to SEQ ID NO: 894180
agucaccacuacuaauugu

SEQ ID NO: 894182 - RNA, 19 nt, Artificial Sequence
  Description of Artificial Sequence: Synthetic oligonucleotide
  Sense strand starting at position 3614 of SEQ ID NO: 588849
uggugacucaggcgauaaa

SEQ ID NO: 894183 - RNA, 19 nt, Artificial Sequence
  Description of Artificial Sequence: Synthetic oligonucleotide
  Antisense strand to SEQ ID NO: 894182
uuuaucgccugagucacca

SEQ ID NO: 894184 - RNA, 19 nt, Artificial Sequence
  Description of Artificial Sequence: Synthetic oligonucleotide
  Sense strand starting at position 3752 of SEQ ID NO: 588849
gaaggaagauucuagcaag

SEQ ID NO: 894185 - RNA, 19 nt, Artificial Sequence
  Description of Artificial Sequence: Synthetic oligonucleotide
  Antisense strand to SEQ ID NO: 894184
cuugcuagaaucuuccuuc

SEQ ID NO: 894186 - RNA, 19 nt, Artificial Sequence
  Description of Artificial Sequence: Synthetic oligonucleotide
  Sense strand starting at position 3793 of SEQ ID NO: 588849
cgugguggccguuaugcaa

SEQ ID NO: 894187 - RNA, 19 nt, Artificial Sequence
  Description of Artificial Sequence: Synthetic oligonucleotide
  Antisense strand to SEQ ID NO: 894186
uugcauaacggccaccacg

SEQ ID NO: 894188 - RNA, 19 nt, Artificial Sequence
  Description of Artificial Sequence: Synthetic oligonucleotide
  Sense strand starting at position 3797 of SEQ ID NO: 588849
guggccguuaugcaaauuu

SEQ ID NO: 894189 - RNA, 19 nt, Artificial Sequence
  Description of Artificial Sequence: Synthetic oligonucleotide
  Antisense strand to SEQ ID NO: 894188
aaauuugcauaacggccac

SEQ ID NO: 894190 - RNA, 19 nt, Artificial Sequence
  Description of Artificial Sequence: Synthetic oligonucleotide
  Sense strand starting at position 355 of SEQ ID NO: 588850
guaggcacucaauauguua

SEQ ID NO: 894191 - RNA, 19 nt, Artificial Sequence
  Description of Artificial Sequence: Synthetic oligonucleotide
  Antisense strand to SEQ ID NO: 894190
uaacauauugagugccuac

SEQ ID NO: 894192 - RNA, 19 nt, Artificial Sequence
  Description of Artificial Sequence: Synthetic oligonucleotide
  Sense strand starting at position 765 of SEQ ID NO: 588850
cccauuaucugugauaaag

SEQ ID NO: 894193 - RNA, 19 nt, Artificial Sequence
  Description of Artificial Sequence: Synthetic oligonucleotide
  Antisense strand to SEQ ID NO: 894192
cuuuaucacagauaauggg

SEQ ID NO: 894194 - RNA, 19 nt, Artificial Sequence
  Description of Artificial Sequence: Synthetic oligonucleotide
  Sense strand starting at position 827 of SEQ ID NO: 588850
acaguaggugcacaaagau

SEQ ID NO: 894195 - RNA, 19 nt, Artificial Sequence
  Description of Artificial Sequence: Synthetic oligonucleotide
  Antisense strand to SEQ ID NO: 894194
aucuuugugcaccuacugu

SEQ ID NO: 894196 - RNA, 19 nt, Artificial Sequence
  Description of Artificial Sequence: Synthetic oligonucleotide
  Sense strand starting at position 920 of SEQ ID NO: 588850
gucagaugauaucaaauau

SEQ ID NO: 894197 - RNA, 19 nt, Artificial Sequence
  Description of Artificial Sequence: Synthetic oligonucleotide
  Antisense strand to SEQ ID NO: 894196
auauuugauaucaucugac

SEQ ID NO: 894198 - RNA, 19 nt, Artificial Sequence
  Description of Artificial Sequence: Synthetic oligonucleotide
  Sense strand starting at position 966 of SEQ ID NO: 588850
aagaauaauggcuggugua

SEQ ID NO: 894199 - RNA, 19 nt, Artificial Sequence
  Description of Artificial Sequence: Synthetic oligonucleotide
  Antisense strand to SEQ ID NO: 894198
uacaccagccauuauucuu

SEQ ID NO: 894200 - RNA, 19 nt, Artificial Sequence
  Description of Artificial Sequence: Synthetic oligonucleotide
  Sense strand starting at position 967 of SEQ ID NO: 588850
agaauaauggcugguguag

SEQ ID NO: 894201 - RNA, 19 nt, Artificial Sequence
  Description of Artificial Sequence: Synthetic oligonucleotide
  Antisense strand to SEQ ID NO: 894200
cuacaccagccauuauucu

SEQ ID NO: 894202 - RNA, 19 nt, Artificial Sequence
  Description of Artificial Sequence: Synthetic oligonucleotide
  Sense strand starting at position 991 of SEQ ID NO: 588850
aggugcugagaaugaaacu

SEQ ID NO: 894203 - RNA, 19 nt, Artificial Sequence
  Description of Artificial Sequence: Synthetic oligonucleotide
  Antisense strand to SEQ ID NO: 894202
aguuucauucucagcaccu

SEQ ID NO: 894204 - RNA, 19 nt, Artificial Sequence
  Description of Artificial Sequence: Synthetic oligonucleotide
  Sense strand starting at position 1418 of SEQ ID NO: 588850
ugcauuucguaucuguaaa

SEQ ID NO: 894205 - RNA, 19 nt, Artificial Sequence
  Description of Artificial Sequence: Synthetic oligonucleotide
  Antisense strand to SEQ ID NO: 894204
uuuacagauacgaaaugca

SEQ ID NO: 894206 - RNA, 19 nt, Artificial Sequence
  Description of Artificial Sequence: Synthetic oligonucleotide
  Sense strand starting at position 1446 of SEQ ID NO: 588850
augacagccucugccuaau

SEQ ID NO: 894207 - RNA, 19 nt, Artificial Sequence
  Description of Artificial Sequence: Synthetic oligonucleotide
  Antisense strand to SEQ ID NO: 894206
auuaggcagaggcugucau

SEQ ID NO: 894208 - RNA, 19 nt, Artificial Sequence
  Description of Artificial Sequence: Synthetic oligonucleotide
  Sense strand starting at position 1458 of SEQ ID NO: 588850
gccuaauggcauugacuca

SEQ ID NO: 894209 - RNA, 19 nt, Artificial Sequence
  Description of Artificial Sequence: Synthetic oligonucleotide
  Antisense strand to SEQ ID NO: 894208
ugagucaaugccauuaggc

SEQ ID NO: 894210 - RNA, 19 nt, Artificial Sequence
  Description of Artificial Sequence: Synthetic oligonucleotide
  Sense strand starting at position 1485 of SEQ ID NO: 588850
gggcgugaugaacauuaca

SEQ ID NO: 894211 - RNA, 19 nt, Artificial Sequence
  Description of Artificial Sequence: Synthetic oligonucleotide
  Antisense strand to SEQ ID NO: 894210
uguaauguucaucacgccc

SEQ ID NO: 894212 - RNA, 19 nt, Artificial Sequence
  Description of Artificial Sequence: Synthetic oligonucleotide
  Sense strand starting at position 1498 of SEQ ID NO: 588850
auuacaugcuuauuaugga

SEQ ID NO: 894213 - RNA, 19 nt, Artificial Sequence
  Description of Artificial Sequence: Synthetic oligonucleotide
  Antisense strand to SEQ ID NO: 894212
uccauaauaagcauguaau

SEQ ID NO: 894214 - RNA, 19 nt, Artificial Sequence
  Description of Artificial Sequence: Synthetic oligonucleotide
  Sense strand starting at position 1511 of SEQ ID NO: 588850
uauggagucugcuucccaa

SEQ ID NO: 894215 - RNA, 19 nt, Artificial Sequence
  Description of Artificial Sequence: Synthetic oligonucleotide
  Antisense strand to SEQ ID NO: 894214
uugggaagcagacuccaua

SEQ ID NO: 894216 - RNA, 19 nt, Artificial Sequence
  Description of Artificial Sequence: Synthetic oligonucleotide
  Sense strand starting at position 1752 of SEQ ID NO: 588850
gugcuagagggcuacagaa

SEQ ID NO: 894217 - RNA, 19 nt, Artificial Sequence
  Description of Artificial Sequence: Synthetic oligonucleotide
  Antisense strand to SEQ ID NO: 894216
uucuguagcccucuagcac

SEQ ID NO: 894218 - RNA, 19 nt, Artificial Sequence
  Description of Artificial Sequence: Synthetic oligonucleotide
  Sense strand starting at position 1754 of SEQ ID NO: 588850
gcuagagggcuacagaauu

SEQ ID NO: 894219 - RNA, 19 nt, Artificial Sequence
  Description of Artificial Sequence: Synthetic oligonucleotide
  Antisense strand to SEQ ID NO: 894218
aauucuguagcccucuagc

SEQ ID NO: 894220 - RNA, 19 nt, Artificial Sequence
  Description of Artificial Sequence: Synthetic oligonucleotide
  Sense strand starting at position 1988 of SEQ ID NO: 588850
cuacaacuuguguauccaa

SEQ ID NO: 894221 - RNA, 19 nt, Artificial Sequence
  Description of Artificial Sequence: Synthetic oligonucleotide
  Antisense strand to SEQ ID NO: 894220
uuggauacacaaguuguag

SEQ ID NO: 894222 - RNA, 19 nt, Artificial Sequence
  Description of Artificial Sequence: Synthetic oligonucleotide
  Sense strand starting at position 2158 of SEQ ID NO: 588850
gccgcuccgccgucagaau

SEQ ID NO: 894223 - RNA, 19 nt, Artificial Sequence
  Description of Artificial Sequence: Synthetic oligonucleotide
  Antisense strand to SEQ ID NO: 894222
auucugacggcggagcggc

SEQ ID NO: 894224 - RNA, 19 nt, Artificial Sequence
  Description of Artificial Sequence: Synthetic oligonucleotide
  Sense strand starting at position 2170 of SEQ ID NO: 588850
ucagaauccucuccgcaug

SEQ ID NO: 894225 - RNA, 19 nt, Artificial Sequence
  Description of Artificial Sequence: Synthetic oligonucleotide
  Antisense strand to SEQ ID NO: 894224
caugcggagaggauucuga

SEQ ID NO: 894226 - RNA, 19 nt, Artificial Sequence
  Description of Artificial Sequence: Synthetic oligonucleotide
  Sense strand starting at position 2321 of SEQ ID NO: 588850
cuaagcauuugauggcaaa

SEQ ID NO: 894227 - RNA, 19 nt, Artificial Sequence
  Description of Artificial Sequence: Synthetic oligonucleotide
  Antisense strand to SEQ ID NO: 894226
uuugccaucaaaugcuuag

SEQ ID NO: 894228 - RNA, 19 nt, Artificial Sequence
  Description of Artificial Sequence: Synthetic oligonucleotide
  Sense strand starting at position 2324 of SEQ ID NO: 588850
agcauuugauggcaaacga

SEQ ID NO: 894229 - RNA, 19 nt, Artificial Sequence
  Description of Artificial Sequence: Synthetic oligonucleotide
  Antisense strand to SEQ ID NO: 894228
ucguuugccaucaaaugcu

SEQ ID NO: 894230 - RNA, 19 nt, Artificial Sequence
  Description of Artificial Sequence: Synthetic oligonucleotide
  Sense strand starting at position 2454 of SEQ ID NO: 588850
uaaagacgguaccaugauu

SEQ ID NO: 894231 - RNA, 19 nt, Artificial Sequence
  Description of Artificial Sequence: Synthetic oligonucleotide
  Antisense strand to SEQ ID NO: 894230
aaucaugguaccgucuuua

SEQ ID NO: 894232 - RNA, 19 nt, Artificial Sequence
  Description of Artificial Sequence: Synthetic oligonucleotide
  Sense strand starting at position 2487 of SEQ ID NO: 588850
ggcauaaauuggcucaucu

SEQ ID NO: 894233 - RNA, 19 nt, Artificial Sequence
  Description of Artificial Sequence: Synthetic oligonucleotide
  Antisense strand to SEQ ID NO: 894232
agaugagccaauuuaugcc

SEQ ID NO: 894234 - RNA, 19 nt, Artificial Sequence
  Description of Artificial Sequence: Synthetic oligonucleotide
  Sense strand starting at position 2496 of SEQ ID NO: 588850
uggcucaucuguucuccaa

SEQ ID NO: 894235 - RNA, 19 nt, Artificial Sequence
  Description of Artificial Sequence: Synthetic oligonucleotide
  Antisense strand to SEQ ID NO: 894234
uuggagaacagaugagcca

SEQ ID NO: 894236 - RNA, 19 nt, Artificial Sequence
  Description of Artificial Sequence: Synthetic oligonucleotide
  Sense strand starting at position 2838 of SEQ ID NO: 588850
uuugcaauuucugccugaa

SEQ ID NO: 894237 - RNA, 19 nt, Artificial Sequence
  Description of Artificial Sequence: Synthetic oligonucleotide
  Antisense strand to SEQ ID NO: 894236
uucaggcagaaauugcaaa

SEQ ID NO: 894238 - RNA, 19 nt, Artificial Sequence
  Description of Artificial Sequence: Synthetic oligonucleotide
  Sense strand starting at position 2879 of SEQ ID NO: 588850
uugacuuaauuaucugaug

SEQ ID NO: 894239 - RNA, 19 nt, Artificial Sequence
  Description of Artificial Sequence: Synthetic oligonucleotide
  Antisense strand to SEQ ID NO: 894238
caucagauaauuaagucaa

SEQ ID NO: 894240 - RNA, 19 nt, Artificial Sequence
  Description of Artificial Sequence: Synthetic oligonucleotide
  Sense strand starting at position 2890 of SEQ ID NO: 588850
aucugaugcccuuaugaaa

SEQ ID NO: 894241 - RNA, 19 nt, Artificial Sequence
  Description of Artificial Sequence: Synthetic oligonucleotide
  Antisense strand to SEQ ID NO: 894240
uuucauaagggcaucagau

SEQ ID NO: 894242 - RNA, 19 nt, Artificial Sequence
  Description of Artificial Sequence: Synthetic oligonucleotide
  Sense strand starting at position 2907 of SEQ ID NO: 588850
aaguguugacuuugucuaa

SEQ ID NO: 894243 - RNA, 19 nt, Artificial Sequence
  Description of Artificial Sequence: Synthetic oligonucleotide
  Antisense strand to SEQ ID NO: 894242
uuagacaaagucaacacuu

SEQ ID NO: 894244 - RNA, 19 nt, Artificial Sequence
  Description of Artificial Sequence: Synthetic oligonucleotide
  Sense strand starting at position 2910 of SEQ ID NO: 588850
uguugacuuugucuaaauc

SEQ ID NO: 894245 - RNA, 19 nt, Artificial Sequence
  Description of Artificial Sequence: Synthetic oligonucleotide
  Antisense strand to SEQ ID NO: 894244
gauuuagacaaagucaaca

SEQ ID NO: 894246 - RNA, 19 nt, Artificial Sequence
  Description of Artificial Sequence: Synthetic oligonucleotide
  Sense strand starting at position 2911 of SEQ ID NO: 588850
guugacuuugucuaaauca

SEQ ID NO: 894247 - RNA, 19 nt, Artificial Sequence
  Description of Artificial Sequence: Synthetic oligonucleotide
  Antisense strand to SEQ ID NO: 894246
ugauuuagacaaagucaac

SEQ ID NO: 894248 - RNA, 19 nt, Artificial Sequence
  Description of Artificial Sequence: Synthetic oligonucleotide
  Sense strand starting at position 3097 of SEQ ID NO: 588850
ugcuuaaagggaugcauga

SEQ ID NO: 894249 - RNA, 19 nt, Artificial Sequence
  Description of Artificial Sequence: Synthetic oligonucleotide
  Antisense strand to SEQ ID NO: 894248
ucaugcaucccuuuaagca

SEQ ID NO: 894250 - RNA, 19 nt, Artificial Sequence
  Description of Artificial Sequence: Synthetic oligonucleotide
  Sense strand starting at position 3135 of SEQ ID NO: 588850
aauuguugaucgcugucau

SEQ ID NO: 894251 - RNA, 19 nt, Artificial Sequence
  Description of Artificial Sequence: Synthetic oligonucleotide
  Antisense strand to SEQ ID NO: 894250
augacagcgaucaacaauu

SEQ ID NO: 894252 - RNA, 19 nt, Artificial Sequence
  Description of Artificial Sequence: Synthetic oligonucleotide
  Sense strand starting at position 3142 of SEQ ID NO: 588850
gaucgcugucaucauuaau

SEQ ID NO: 894253 - RNA, 19 nt, Artificial Sequence
  Description of Artificial Sequence: Synthetic oligonucleotide
  Antisense strand to SEQ ID NO: 894252
auuaaugaugacagcgauc

SEQ ID NO: 894254 - RNA, 19 nt, Artificial Sequence
  Description of Artificial Sequence: Synthetic oligonucleotide
  Sense strand starting at position 3173 of SEQ ID NO: 588850
gguccagguucucugguua

SEQ ID NO: 894255 - RNA, 19 nt, Artificial Sequence
  Description of Artificial Sequence: Synthetic oligonucleotide
  Antisense strand to SEQ ID NO: 894254
uaaccagagaaccuggacc

SEQ ID NO: 894256 - RNA, 19 nt, Artificial Sequence
  Description of Artificial Sequence: Synthetic oligonucleotide
  Sense strand starting at position 3177 of SEQ ID NO: 588850
cagguucucugguuaagaa

SEQ ID NO: 894257 - RNA, 19 nt, Artificial Sequence
  Description of Artificial Sequence: Synthetic oligonucleotide
  Antisense strand to SEQ ID NO: 894256
uucuuaaccagagaaccug

SEQ ID NO: 894258 - RNA, 19 nt, Artificial Sequence
  Description of Artificial Sequence: Synthetic oligonucleotide
  Sense strand starting at position 3257 of SEQ ID NO: 588850
aauacaggagccuaguauu

SEQ ID NO: 894259 - RNA, 19 nt, Artificial Sequence
  Description of Artificial Sequence: Synthetic oligonucleotide
  Antisense strand to SEQ ID NO: 894258
aauacuaggcuccuguauu

SEQ ID NO: 894260 - RNA, 19 nt, Artificial Sequence
  Description of Artificial Sequence: Synthetic oligonucleotide
  Sense strand starting at position 3345 of SEQ ID NO: 588850
uccuuaagacguugucuga

SEQ ID NO: 894261 - RNA, 19 nt, Artificial Sequence
  Description of Artificial Sequence: Synthetic oligonucleotide
  Antisense strand to SEQ ID NO: 894260
ucagacaacgucuuaagga

SEQ ID NO: 894262 - RNA, 19 nt, Artificial Sequence
  Description of Artificial Sequence: Synthetic oligonucleotide
  Sense strand starting at position 3348 of SEQ ID NO: 588850
uuaagacguugucugauag

SEQ ID NO: 894263 - RNA, 19 nt, Artificial Sequence
  Description of Artificial Sequence: Synthetic oligonucleotide
  Antisense strand to SEQ ID NO: 894262
cuaucagacaacgucuuaa

SEQ ID NO: 894264 - RNA, 19 nt, Artificial Sequence
  Description of Artificial Sequence: Synthetic oligonucleotide
  Sense strand starting at position 3623 of SEQ ID NO: 588850
acagauuggccaggacacu

SEQ ID NO: 894265 - RNA, 19 nt, Artificial Sequence
  Description of Artificial Sequence: Synthetic oligonucleotide
  Antisense strand to SEQ ID NO: 894264
aguguccuggccaaucugu

SEQ ID NO: 894266 - RNA, 19 nt, Artificial Sequence
  Description of Artificial Sequence: Synthetic oligonucleotide
  Sense strand starting at position 3850 of SEQ ID NO: 588850
gcuacaacacucugacaug

SEQ ID NO: 894267 - RNA, 19 nt, Artificial Sequence
  Description of Artificial Sequence: Synthetic oligonucleotide
  Antisense strand to SEQ ID NO: 894266
caugucagaguguuguagc

SEQ ID NO: 894268 - RNA, 19 nt, Artificial Sequence
  Description of Artificial Sequence: Synthetic oligonucleotide
  Sense strand starting at position 3907 of SEQ ID NO: 588850
ccaucacuugccuggacua

SEQ ID NO: 894269 - RNA, 19 nt, Artificial Sequence
  Description of Artificial Sequence: Synthetic oligonucleotide
  Antisense strand to SEQ ID NO: 894268
uaguccaggcaagugaugg

SEQ ID NO: 894270 - RNA, 19 nt, Artificial Sequence
  Description of Artificial Sequence: Synthetic oligonucleotide
  Sense strand starting at position 377 of SEQ ID NO: 588851
guaggcacucaauauguua

SEQ ID NO: 894271 - RNA, 19 nt, Artificial Sequence
  Description of Artificial Sequence: Synthetic oligonucleotide
  Antisense strand to SEQ ID NO: 894270
uaacauauugagugccuac

SEQ ID NO: 894272 - RNA, 19 nt, Artificial Sequence
  Description of Artificial Sequence: Synthetic oligonucleotide
  Sense strand starting at position 787 of SEQ ID NO: 588851
cccauuaucugugauaaag

SEQ ID NO: 894273 - RNA, 19 nt, Artificial Sequence
  Description of Artificial Sequence: Synthetic oligonucleotide
  Antisense strand to SEQ ID NO: 894272
cuuuaucacagauaauggg

SEQ ID NO: 894274 - RNA, 19 nt, Artificial Sequence
  Description of Artificial Sequence: Synthetic oligonucleotide
  Sense strand starting at position 849 of SEQ ID NO: 588851
acaguaggugcacaaagau

SEQ ID NO: 894275 - RNA, 19 nt, Artificial Sequence
  Description of Artificial Sequence: Synthetic oligonucleotide
  Antisense strand to SEQ ID NO: 894274
aucuuugugcaccuacugu

SEQ ID NO: 894276 - RNA, 19 nt, Artificial Sequence
  Description of Artificial Sequence: Synthetic oligonucleotide
  Sense strand starting at position 942 of SEQ ID NO: 588851
gucagaugauaucaaauau

SEQ ID NO: 894277 - RNA, 19 nt, Artificial Sequence
  Description of Artificial Sequence: Synthetic oligonucleotide
  Antisense strand to SEQ ID NO: 894276
auauuugauaucaucugac

SEQ ID NO: 894278 - RNA, 19 nt, Artificial Sequence
  Description of Artificial Sequence: Synthetic oligonucleotide
  Sense strand starting at position 988 of SEQ ID NO: 588851
aagaauaauggcuggugua

SEQ ID NO: 894279 - RNA, 19 nt, Artificial Sequence
  Description of Artificial Sequence: Synthetic oligonucleotide
  Antisense strand to SEQ ID NO: 894278
uacaccagccauuauucuu

SEQ ID NO: 894280 - RNA, 19 nt, Artificial Sequence
  Description of Artificial Sequence: Synthetic oligonucleotide
  Sense strand starting at position 989 of SEQ ID NO: 588851
agaauaauggcugguguag

SEQ ID NO: 894281 - RNA, 19 nt, Artificial Sequence
  Description of Artificial Sequence: Synthetic oligonucleotide
  Antisense strand to SEQ ID NO: 894280
cuacaccagccauuauucu

SEQ ID NO: 894282 - RNA, 19 nt, Artificial Sequence
  Description of Artificial Sequence: Synthetic oligonucleotide
  Sense strand starting at position 1013 of SEQ ID NO: 588851
aggugcugagaaugaaacu

SEQ ID NO: 894283 - RNA, 19 nt, Artificial Sequence
  Description of Artificial Sequence: Synthetic oligonucleotide
  Antisense strand to SEQ ID NO: 894282
aguuucauucucagcaccu

SEQ ID NO: 894284 - RNA, 19 nt, Artificial Sequence
  Description of Artificial Sequence: Synthetic oligonucleotide
  Sense strand starting at position 1440 of SEQ ID NO: 588851
ugcauuucguaucuguaaa

SEQ ID NO: 894285 - RNA, 19 nt, Artificial Sequence
  Description of Artificial Sequence: Synthetic oligonucleotide
  Antisense strand to SEQ ID NO: 894284
uuuacagauacgaaaugca

SEQ ID NO: 894286 - RNA, 19 nt, Artificial Sequence
  Description of Artificial Sequence: Synthetic oligonucleotide
  Sense strand starting at position 1468 of SEQ ID NO: 588851
augacagccucugccuaau

SEQ ID NO: 894287 - RNA, 19 nt, Artificial Sequence
  Description of Artificial Sequence: Synthetic oligonucleotide
  Antisense strand to SEQ ID NO: 894286
auuaggcagaggcugucau

SEQ ID NO: 894288 - RNA, 19 nt, Artificial Sequence
  Description of Artificial Sequence: Synthetic oligonucleotide
  Sense strand starting at position 1480 of SEQ ID NO: 588851
gccuaauggcauugacuca

SEQ ID NO: 894289 - RNA, 19 nt, Artificial Sequence
  Description of Artificial Sequence: Synthetic oligonucleotide
  Antisense strand to SEQ ID NO: 894288
ugagucaaugccauuaggc

SEQ ID NO: 894290 - RNA, 19 nt, Artificial Sequence
  Description of Artificial Sequence: Synthetic oligonucleotide
  Sense strand starting at position 1507 of SEQ ID NO: 588851
gggcgugaugaacauuaca

SEQ ID NO: 894291 - RNA, 19 nt, Artificial Sequence
  Description of Artificial Sequence: Synthetic oligonucleotide
  Antisense strand to SEQ ID NO: 894290
uguaauguucaucacgccc

SEQ ID NO: 894292 - RNA, 19 nt, Artificial Sequence
  Description of Artificial Sequence: Synthetic oligonucleotide
  Sense strand starting at position 1520 of SEQ ID NO: 588851
auuacaugcuuauuaugga

SEQ ID NO: 894293 - RNA, 19 nt, Artificial Sequence
  Description of Artificial Sequence: Synthetic oligonucleotide
  Antisense strand to SEQ ID NO: 894292
uccauaauaagcauguaau

SEQ ID NO: 894294 - RNA, 19 nt, Artificial Sequence
  Description of Artificial Sequence: Synthetic oligonucleotide
  Sense strand starting at position 1533 of SEQ ID NO: 588851
uauggagucugcuucccaa

SEQ ID NO: 894295 - RNA, 19 nt, Artificial Sequence
  Description of Artificial Sequence: Synthetic oligonucleotide
  Antisense strand to SEQ ID NO: 894294
uugggaagcagacuccaua

SEQ ID NO: 894296 - RNA, 19 nt, Artificial Sequence
  Description of Artificial Sequence: Synthetic oligonucleotide
  Sense strand starting at position 1774 of SEQ ID NO: 588851
gugcuagagggcuacagaa

SEQ ID NO: 894297 - RNA, 19 nt, Artificial Sequence
  Description of Artificial Sequence: Synthetic oligonucleotide
  Antisense strand to SEQ ID NO: 894296
uucuguagcccucuagcac

SEQ ID NO: 894298 - RNA, 19 nt, Artificial Sequence
  Description of Artificial Sequence: Synthetic oligonucleotide
  Sense strand starting at position 1776 of SEQ ID NO: 588851
gcuagagggcuacagaauu

SEQ ID NO: 894299 - RNA, 19 nt, Artificial Sequence
  Description of Artificial Sequence: Synthetic oligonucleotide
  Antisense strand to SEQ ID NO: 894298
aauucuguagcccucuagc

SEQ ID NO: 894300 - RNA, 19 nt, Artificial Sequence
  Description of Artificial Sequence: Synthetic oligonucleotide
  Sense strand starting at position 2010 of SEQ ID NO: 588851
cuacaacuuguguauccaa

SEQ ID NO: 894301 - RNA, 19 nt, Artificial Sequence
  Description of Artificial Sequence: Synthetic oligonucleotide
  Antisense strand to SEQ ID NO: 894300
uuggauacacaaguuguag

SEQ ID NO: 894302 - RNA, 19 nt, Artificial Sequence
  Description of Artificial Sequence: Synthetic oligonucleotide
  Sense strand starting at position 2180 of SEQ ID NO: 588851
gccgcuccgccgucagaau

SEQ ID NO: 894303 - RNA, 19 nt, Artificial Sequence
  Description of Artificial Sequence: Synthetic oligonucleotide
  Antisense strand to SEQ ID NO: 894302
auucugacggcggagcggc

SEQ ID NO: 894304 - RNA, 19 nt, Artificial Sequence
  Description of Artificial Sequence: Synthetic oligonucleotide
  Sense strand starting at position 2192 of SEQ ID NO: 588851
ucagaauccucuccgcaug

SEQ ID NO: 894305 - RNA, 19 nt, Artificial Sequence
  Description of Artificial Sequence: Synthetic oligonucleotide
  Antisense strand to SEQ ID NO: 894304
caugcggagaggauucuga

SEQ ID NO: 894306 - RNA, 19 nt, Artificial Sequence
  Description of Artificial Sequence: Synthetic oligonucleotide
  Sense strand starting at position 2343 of SEQ ID NO: 588851
cuaagcauuugauggcaaa

SEQ ID NO: 894307 - RNA, 19 nt, Artificial Sequence
  Description of Artificial Sequence: Synthetic oligonucleotide
  Antisense strand to SEQ ID NO: 894306
uuugccaucaaaugcuuag

SEQ ID NO: 894308 - RNA, 19 nt, Artificial Sequence
  Description of Artificial Sequence: Synthetic oligonucleotide
  Sense strand starting at position 2346 of SEQ ID NO: 588851
agcauuugauggcaaacga

SEQ ID NO: 894309 - RNA, 19 nt, Artificial Sequence
  Description of Artificial Sequence: Synthetic oligonucleotide
  Antisense strand to SEQ ID NO: 894308
ucguuugccaucaaaugcu

SEQ ID NO: 894310 - RNA, 19 nt, Artificial Sequence
  Description of Artificial Sequence: Synthetic oligonucleotide
  Sense strand starting at position 2476 of SEQ ID NO: 588851
uaaagacgguaccaugauu

SEQ ID NO: 894311 - RNA, 19 nt, Artificial Sequence
  Description of Artificial Sequence: Synthetic oligonucleotide
  Antisense strand to SEQ ID NO: 894310
aaucaugguaccgucuuua

SEQ ID NO: 894312 - RNA, 19 nt, Artificial Sequence
  Description of Artificial Sequence: Synthetic oligonucleotide
  Sense strand starting at position 2509 of SEQ ID NO: 588851
ggcauaaauuggcucaucu

SEQ ID NO: 894313 - RNA, 19 nt, Artificial Sequence
  Description of Artificial Sequence: Synthetic oligonucleotide
  Antisense strand to SEQ ID NO: 894312
agaugagccaauuuaugcc

SEQ ID NO: 894314 - RNA, 19 nt, Artificial Sequence
  Description of Artificial Sequence: Synthetic oligonucleotide
  Sense strand starting at position 2518 of SEQ ID NO: 588851
uggcucaucuguucuccaa

SEQ ID NO: 894315 - RNA, 19 nt, Artificial Sequence
  Description of Artificial Sequence: Synthetic oligonucleotide
  Antisense strand to SEQ ID NO: 894314
uuggagaacagaugagcca

SEQ ID NO: 894316 - RNA, 19 nt, Artificial Sequence
  Description of Artificial Sequence: Synthetic oligonucleotide
  Sense strand starting at position 2860 of SEQ ID NO: 588851
uuugcaauuucugccugaa

SEQ ID NO: 894317 - RNA, 19 nt, Artificial Sequence
  Description of Artificial Sequence: Synthetic oligonucleotide
  Antisense strand to SEQ ID NO: 894316
uucaggcagaaauugcaaa

SEQ ID NO: 894318 - RNA, 19 nt, Artificial Sequence
  Description of Artificial Sequence: Synthetic oligonucleotide
  Sense strand starting at position 2901 of SEQ ID NO: 588851
uugacuuaauuaucugaug

SEQ ID NO: 894319 - RNA, 19 nt, Artificial Sequence
  Description of Artificial Sequence: Synthetic oligonucleotide
  Antisense strand to SEQ ID NO: 894318
caucagauaauuaagucaa

SEQ ID NO: 894320 - RNA, 19 nt, Artificial Sequence
  Description of Artificial Sequence: Synthetic oligonucleotide
  Sense strand starting at position 2912 of SEQ ID NO: 588851
aucugaugcccuuaugaaa

SEQ ID NO: 894321 - RNA, 19 nt, Artificial Sequence
  Description of Artificial Sequence: Synthetic oligonucleotide
  Antisense strand to SEQ ID NO: 894320
uuucauaagggcaucagau

SEQ ID NO: 894322 - RNA, 19 nt, Artificial Sequence
  Description of Artificial Sequence: Synthetic oligonucleotide
  Sense strand starting at position 2929 of SEQ ID NO: 588851
aaguguugacuuugucuaa

SEQ ID NO: 894323 - RNA, 19 nt, Artificial Sequence
  Description of Artificial Sequence: Synthetic oligonucleotide
  Antisense strand to SEQ ID NO: 894322
uuagacaaagucaacacuu

SEQ ID NO: 894324 - RNA, 19 nt, Artificial Sequence
  Description of Artificial Sequence: Synthetic oligonucleotide
  Sense strand starting at position 2932 of SEQ ID NO: 588851
uguugacuuugucuaaauc

SEQ ID NO: 894325 - RNA, 19 nt, Artificial Sequence
  Description of Artificial Sequence: Synthetic oligonucleotide
  Antisense strand to SEQ ID NO: 894324
gauuuagacaaagucaaca

SEQ ID NO: 894326 - RNA, 19 nt, Artificial Sequence
  Description of Artificial Sequence: Synthetic oligonucleotide
  Sense strand starting at position 2933 of SEQ ID NO: 588851
guugacuuugucuaaauca

SEQ ID NO: 894327 - RNA, 19 nt, Artificial Sequence
  Description of Artificial Sequence: Synthetic oligonucleotide
  Antisense strand to SEQ ID NO: 894326
ugauuuagacaaagucaac

SEQ ID NO: 894328 - RNA, 19 nt, Artificial Sequence
  Description of Artificial Sequence: Synthetic oligonucleotide
  Sense strand starting at position 3119 of SEQ ID NO: 588851
ugcuuaaagggaugcauga

SEQ ID NO: 894329 - RNA, 19 nt, Artificial Sequence
  Description of Artificial Sequence: Synthetic oligonucleotide
  Antisense strand to SEQ ID NO: 894328
ucaugcaucccuuuaagca

SEQ ID NO: 894330 - RNA, 19 nt, Artificial Sequence
  Description of Artificial Sequence: Synthetic oligonucleotide
  Sense strand starting at position 3157 of SEQ ID NO: 588851
aauuguugaucgcugucau

SEQ ID NO: 894331 - RNA, 19 nt, Artificial Sequence
  Description of Artificial Sequence: Synthetic oligonucleotide
  Antisense strand to SEQ ID NO: 894330
augacagcgaucaacaauu

SEQ ID NO: 894332 - RNA, 19 nt, Artificial Sequence
  Description of Artificial Sequence: Synthetic oligonucleotide
  Sense strand starting at position 3164 of SEQ ID NO: 588851
gaucgcugucaucauuaau

SEQ ID NO: 894333 - RNA, 19 nt, Artificial Sequence
  Description of Artificial Sequence: Synthetic oligonucleotide
  Antisense strand to SEQ ID NO: 894332
auuaaugaugacagcgauc

SEQ ID NO: 894334 - RNA, 19 nt, Artificial Sequence
  Description of Artificial Sequence: Synthetic oligonucleotide
  Sense strand starting at position 3195 of SEQ ID NO: 588851
gguccagguucucugguua

SEQ ID NO: 894335 - RNA, 19 nt, Artificial Sequence
  Description of Artificial Sequence: Synthetic oligonucleotide
  Antisense strand to SEQ ID NO: 894334
uaaccagagaaccuggacc

SEQ ID NO: 894336 - RNA, 19 nt, Artificial Sequence
  Description of Artificial Sequence: Synthetic oligonucleotide
  Sense strand starting at position 3199 of SEQ ID NO: 588851
cagguucucugguuaagaa

SEQ ID NO: 894337 - RNA, 19 nt, Artificial Sequence
  Description of Artificial Sequence: Synthetic oligonucleotide
  Antisense strand to SEQ ID NO: 894336
uucuuaaccagagaaccug

SEQ ID NO: 894338 - RNA, 19 nt, Artificial Sequence
  Description of Artificial Sequence: Synthetic oligonucleotide
  Sense strand starting at position 3279 of SEQ ID NO: 588851
aauacaggagccuaguauu

SEQ ID NO: 894339 - RNA, 19 nt, Artificial Sequence
  Description of Artificial Sequence: Synthetic oligonucleotide
  Antisense strand to SEQ ID NO: 894338
aauacuaggcuccuguauu

SEQ ID NO: 894340 - RNA, 19 nt, Artificial Sequence
  Description of Artificial Sequence: Synthetic oligonucleotide
  Sense strand starting at position 3367 of SEQ ID NO: 588851
uccuuaagacguugucuga

SEQ ID NO: 894341 - RNA, 19 nt, Artificial Sequence
  Description of Artificial Sequence: Synthetic oligonucleotide
  Antisense strand to SEQ ID NO: 894340
ucagacaacgucuuaagga

SEQ ID NO: 894342 - RNA, 19 nt, Artificial Sequence
  Description of Artificial Sequence: Synthetic oligonucleotide
  Sense strand starting at position 3370 of SEQ ID NO: 588851
uuaagacguugucugauag

SEQ ID NO: 894343 - RNA, 19 nt, Artificial Sequence
  Description of Artificial Sequence: Synthetic oligonucleotide
  Antisense strand to SEQ ID NO: 894342
cuaucagacaacgucuuaa

SEQ ID NO: 894344 - RNA, 19 nt, Artificial Sequence
  Description of Artificial Sequence: Synthetic oligonucleotide
  Sense strand starting at position 3645 of SEQ ID NO: 588851
acagauuggccaggacacu

SEQ ID NO: 894345 - RNA, 19 nt, Artificial Sequence
  Description of Artificial Sequence: Synthetic oligonucleotide
  Antisense strand to SEQ ID NO: 894344
aguguccuggccaaucugu

SEQ ID NO: 894346 - RNA, 19 nt, Artificial Sequence
  Description of Artificial Sequence: Synthetic oligonucleotide
  Sense strand starting at position 3872 of SEQ ID NO: 588851
gcuacaacacucugacaug

SEQ ID NO: 894347 - RNA, 19 nt, Artificial Sequence
  Description of Artificial Sequence: Synthetic oligonucleotide
  Antisense strand to SEQ ID NO: 894346
caugucagaguguuguagc

SEQ ID NO: 894348 - RNA, 19 nt, Artificial Sequence
  Description of Artificial Sequence: Synthetic oligonucleotide
  Sense strand starting at position 3929 of SEQ ID NO: 588851
ccaucacuugccuggacua

SEQ ID NO: 894349 - RNA, 19 nt, Artificial Sequence
  Description of Artificial Sequence: Synthetic oligonucleotide
  Antisense strand to SEQ ID NO: 894348
uaguccaggcaagugaugg

SEQ ID NO: 894350 - RNA, 19 nt, Artificial Sequence
  Description of Artificial Sequence: Synthetic oligonucleotide
  Sense strand starting at position 19 of SEQ ID NO: 588852
gaggacuccuggccgagau

SEQ ID NO: 894351 - RNA, 19 nt, Artificial Sequence
  Description of Artificial Sequence: Synthetic oligonucleotide
  Antisense strand to SEQ ID NO: 894350
aucucggccaggaguccuc

SEQ ID NO: 894352 - RNA, 19 nt, Artificial Sequence
  Description of Artificial Sequence: Synthetic oligonucleotide
  Sense strand starting at position 42 of SEQ ID NO: 588852
gaaggaugauugggacaug

SEQ ID NO: 894353 - RNA, 19 nt, Artificial Sequence
  Description of Artificial Sequence: Synthetic oligonucleotide
  Antisense strand to SEQ ID NO: 894352
caugucccaaucauccuuc

SEQ ID NO: 894354 - RNA, 19 nt, Artificial Sequence
  Description of Artificial Sequence: Synthetic oligonucleotide
  Sense strand starting at position 468 of SEQ ID NO: 588852
uggcguccuccuugacaaa

SEQ ID NO: 894355 - RNA, 19 nt, Artificial Sequence
  Description of Artificial Sequence: Synthetic oligonucleotide
  Antisense strand to SEQ ID NO: 894354
uuugucaaggaggacgcca

SEQ ID NO: 894356 - RNA, 19 nt, Artificial Sequence
  Description of Artificial Sequence: Synthetic oligonucleotide
  Sense strand starting at position 632 of SEQ ID NO: 588852
ggcagccucauccguuaaa

SEQ ID NO: 894357 - RNA, 19 nt, Artificial Sequence
  Description of Artificial Sequence: Synthetic oligonucleotide
  Antisense strand to SEQ ID NO: 894356
uuuaacggaugaggcugcc

SEQ ID NO: 894358 - RNA, 19 nt, Artificial Sequence
  Description of Artificial Sequence: Synthetic oligonucleotide
  Sense strand starting at position 678 of SEQ ID NO: 588852
ccagcuuaaucacugguca

SEQ ID NO: 894359 - RNA, 19 nt, Artificial Sequence
  Description of Artificial Sequence: Synthetic oligonucleotide
  Antisense strand to SEQ ID NO: 894358
ugaccagugauuaagcugg

SEQ ID NO: 894360 - RNA, 19 nt, Artificial Sequence
  Description of Artificial Sequence: Synthetic oligonucleotide
  Sense strand starting at position 851 of SEQ ID NO: 588852
cccugcuauuggccagaga

SEQ ID NO: 894361 - RNA, 19 nt, Artificial Sequence
  Description of Artificial Sequence: Synthetic oligonucleotide
  Antisense strand to SEQ ID NO: 894360
ucucuggccaauagcaggg

SEQ ID NO: 894362 - RNA, 19 nt, Artificial Sequence
  Description of Artificial Sequence: Synthetic oligonucleotide
  Sense strand starting at position 852 of SEQ ID NO: 588852
ccugcuauuggccagagau

SEQ ID NO: 894363 - RNA, 19 nt, Artificial Sequence
  Description of Artificial Sequence: Synthetic oligonucleotide
  Antisense strand to SEQ ID NO: 894362
aucucuggccaauagcagg

SEQ ID NO: 894364 - RNA, 19 nt, Artificial Sequence
  Description of Artificial Sequence: Synthetic oligonucleotide
  Sense strand starting at position 854 of SEQ ID NO: 588852
ugcuauuggccagagauga

SEQ ID NO: 894365 - RNA, 19 nt, Artificial Sequence
  Description of Artificial Sequence: Synthetic oligonucleotide
  Antisense strand to SEQ ID NO: 894364
ucaucucuggccaauagca

SEQ ID NO: 894366 - RNA, 19 nt, Artificial Sequence
  Description of Artificial Sequence: Synthetic oligonucleotide
  Sense strand starting at position 1140 of SEQ ID NO: 588852
aaaggaugcuccgcagaga

SEQ ID NO: 894367 - RNA, 19 nt, Artificial Sequence
  Description of Artificial Sequence: Synthetic oligonucleotide
  Antisense strand to SEQ ID NO: 894366
ucucugcggagcauccuuu

SEQ ID NO: 894368 - RNA, 19 nt, Artificial Sequence
  Description of Artificial Sequence: Synthetic oligonucleotide
  Sense strand starting at position 1965 of SEQ ID NO: 588852
gcgauuaccucaucgccuu

SEQ ID NO: 894369 - RNA, 19 nt, Artificial Sequence
  Description of Artificial Sequence: Synthetic oligonucleotide
  Antisense strand to SEQ ID NO: 894368
aaggcgaugagguaaucgc

SEQ ID NO: 894370 - RNA, 19 nt, Artificial Sequence
  Description of Artificial Sequence: Synthetic oligonucleotide
  Sense strand starting at position 2267 of SEQ ID NO: 588852
ggcagagacuuugaauuaa

SEQ ID NO: 894371 - RNA, 19 nt, Artificial Sequence
  Description of Artificial Sequence: Synthetic oligonucleotide
  Antisense strand to SEQ ID NO: 894370
uuaauucaaagucucugcc

SEQ ID NO: 894372 - RNA, 19 nt, Artificial Sequence
  Description of Artificial Sequence: Synthetic oligonucleotide
  Sense strand starting at position 2309 of SEQ ID NO: 588852
ccguauaugugcuggacca

SEQ ID NO: 894373 - RNA, 19 nt, Artificial Sequence
  Description of Artificial Sequence: Synthetic oligonucleotide
  Antisense strand to SEQ ID NO: 894372
ugguccagcacauauacgg

SEQ ID NO: 894374 - RNA, 19 nt, Artificial Sequence
  Description of Artificial Sequence: Synthetic oligonucleotide
  Sense strand starting at position 2310 of SEQ ID NO: 588852
cguauaugugcuggaccaa

SEQ ID NO: 894375 - RNA, 19 nt, Artificial Sequence
  Description of Artificial Sequence: Synthetic oligonucleotide
  Antisense strand to SEQ ID NO: 894374
uugguccagcacauauacg

SEQ ID NO: 894376 - RNA, 19 nt, Artificial Sequence
  Description of Artificial Sequence: Synthetic oligonucleotide
  Sense strand starting at position 2311 of SEQ ID NO: 588852
guauaugugcuggaccaaa

SEQ ID NO: 894377 - RNA, 19 nt, Artificial Sequence
  Description of Artificial Sequence: Synthetic oligonucleotide
  Antisense strand to SEQ ID NO: 894376
uuugguccagcacauauac

SEQ ID NO: 894378 - RNA, 19 nt, Artificial Sequence
  Description of Artificial Sequence: Synthetic oligonucleotide
  Sense strand starting at position 2369 of SEQ ID NO: 588852
ucucaucccugguuuggaa

SEQ ID NO: 894379 - RNA, 19 nt, Artificial Sequence
  Description of Artificial Sequence: Synthetic oligonucleotide
  Antisense strand to SEQ ID NO: 894378
uuccaaaccagggaugaga

SEQ ID NO: 894380 - RNA, 19 nt, Artificial Sequence
  Description of Artificial Sequence: Synthetic oligonucleotide
  Sense strand starting at position 2408 of SEQ ID NO: 588852
cgaggauguucacugacaa

SEQ ID NO: 894381 - RNA, 19 nt, Artificial Sequence
  Description of Artificial Sequence: Synthetic oligonucleotide
  Antisense strand to SEQ ID NO: 894380
uugucagugaacauccucg

SEQ ID NO: 894382 - RNA, 19 nt, Artificial Sequence
  Description of Artificial Sequence: Synthetic oligonucleotide
  Sense strand starting at position 2522 of SEQ ID NO: 588852
gcucuuucccugggaucua

SEQ ID NO: 894383 - RNA, 19 nt, Artificial Sequence
  Description of Artificial Sequence: Synthetic oligonucleotide
  Antisense strand to SEQ ID NO: 894382
uagaucccagggaaagagc

SEQ ID NO: 894384 - RNA, 19 nt, Artificial Sequence
  Description of Artificial Sequence: Synthetic oligonucleotide
  Sense strand starting at position 2538 of SEQ ID NO: 588852
cuacgacucacuuguggaa

SEQ ID NO: 894385 - RNA, 19 nt, Artificial Sequence
  Description of Artificial Sequence: Synthetic oligonucleotide
  Antisense strand to SEQ ID NO: 894384
uuccacaagugagucguag

SEQ ID NO: 894386 - RNA, 19 nt, Artificial Sequence
  Description of Artificial Sequence: Synthetic oligonucleotide
  Sense strand starting at position 2597 of SEQ ID NO: 588852
acagaacucuucugagcuu

SEQ ID NO: 894387 - RNA, 19 nt, Artificial Sequence
  Description of Artificial Sequence: Synthetic oligonucleotide
  Antisense strand to SEQ ID NO: 894386
aagcucagaagaguucugu

SEQ ID NO: 894388 - RNA, 19 nt, Artificial Sequence
  Description of Artificial Sequence: Synthetic oligonucleotide
  Sense strand starting at position 2630 of SEQ ID NO: 588852
cauguaaguugccaggcau

SEQ ID NO: 894389 - RNA, 19 nt, Artificial Sequence
  Description of Artificial Sequence: Synthetic oligonucleotide
  Antisense strand to SEQ ID NO: 894388
augccuggcaacuuacaug

SEQ ID NO: 894390 - RNA, 19 nt, Artificial Sequence
  Description of Artificial Sequence: Synthetic oligonucleotide
  Sense strand starting at position 2649 of SEQ ID NO: 588852
gaaguaagcgcucaauaag

SEQ ID NO: 894391 - RNA, 19 nt, Artificial Sequence
  Description of Artificial Sequence: Synthetic oligonucleotide
  Antisense strand to SEQ ID NO: 894390
cuuauugagcgcuuacuuc

SEQ ID NO: 894392 - RNA, 19 nt, Artificial Sequence
  Description of Artificial Sequence: Synthetic oligonucleotide
  Sense strand starting at position 2660 of SEQ ID NO: 588852
ucaauaagugcacgcuauu

SEQ ID NO: 894393 - RNA, 19 nt, Artificial Sequence
  Description of Artificial Sequence: Synthetic oligonucleotide
  Antisense strand to SEQ ID NO: 894392
aauagcgugcacuuauuga

SEQ ID NO: 894394 - RNA, 19 nt, Artificial Sequence
  Description of Artificial Sequence: Synthetic oligonucleotide
  Sense strand starting at position 2663 of SEQ ID NO: 588852
auaagugcacgcuauuauu

SEQ ID NO: 894395 - RNA, 19 nt, Artificial Sequence
  Description of Artificial Sequence: Synthetic oligonucleotide
  Antisense strand to SEQ ID NO: 894394
aauaauagcgugcacuuau

SEQ ID NO: 894396 - RNA, 19 nt, Artificial Sequence
  Description of Artificial Sequence: Synthetic oligonucleotide
  Sense strand starting at position 2686 of SEQ ID NO: 588852
agcuuccugucuuagaaac

SEQ ID NO: 894397 - RNA, 19 nt, Artificial Sequence
  Description of Artificial Sequence: Synthetic oligonucleotide
  Antisense strand to SEQ ID NO: 894396
guuucuaagacaggaagcu

SEQ ID NO: 894398 - RNA, 19 nt, Artificial Sequence
  Description of Artificial Sequence: Synthetic oligonucleotide
  Sense strand starting at position 3197 of SEQ ID NO: 588852
gggcaugcagccuggaauu

SEQ ID NO: 894399 - RNA, 19 nt, Artificial Sequence
  Description of Artificial Sequence: Synthetic oligonucleotide
  Antisense strand to SEQ ID NO: 894398
aauuccaggcugcaugccc

SEQ ID NO: 894400 - RNA, 19 nt, Artificial Sequence
  Description of Artificial Sequence: Synthetic oligonucleotide
  Sense strand starting at position 3271 of SEQ ID NO: 588852
guuugagaacucugaaguu

SEQ ID NO: 894401 - RNA, 19 nt, Artificial Sequence
  Description of Artificial Sequence: Synthetic oligonucleotide
  Antisense strand to SEQ ID NO: 894400
aacuucagaguucucaaac

SEQ ID NO: 894402 - RNA, 19 nt, Artificial Sequence
  Description of Artificial Sequence: Synthetic oligonucleotide
  Sense strand starting at position 3280 of SEQ ID NO: 588852
cucugaaguucuggaagcu

SEQ ID NO: 894403 - RNA, 19 nt, Artificial Sequence
  Description of Artificial Sequence: Synthetic oligonucleotide
  Antisense strand to SEQ ID NO: 894402
agcuuccagaacuucagag

SEQ ID NO: 894404 - RNA, 19 nt, Artificial Sequence
  Description of Artificial Sequence: Synthetic oligonucleotide
  Sense strand starting at position 3309 of SEQ ID NO: 588852
agaugaguaucucaaggua

SEQ ID NO: 894405 - RNA, 19 nt, Artificial Sequence
  Description of Artificial Sequence: Synthetic oligonucleotide
  Antisense strand to SEQ ID NO: 894404
uaccuugagauacucaucu

SEQ ID NO: 894406 - RNA, 19 nt, Artificial Sequence
  Description of Artificial Sequence: Synthetic oligonucleotide
  Sense strand starting at position 3312 of SEQ ID NO: 588852
ugaguaucucaagguagga

SEQ ID NO: 894407 - RNA, 19 nt, Artificial Sequence
  Description of Artificial Sequence: Synthetic oligonucleotide
  Antisense strand to SEQ ID NO: 894406
uccuaccuugagauacuca

SEQ ID NO: 894408 - RNA, 19 nt, Artificial Sequence
  Description of Artificial Sequence: Synthetic oligonucleotide
  Sense strand starting at position 3398 of SEQ ID NO: 588852
uggcaauaucucggcucaa

SEQ ID NO: 894409 - RNA, 19 nt, Artificial Sequence
  Description of Artificial Sequence: Synthetic oligonucleotide
  Antisense strand to SEQ ID NO: 894408
uugagccgagauauugcca

SEQ ID NO: 894410 - RNA, 19 nt, Artificial Sequence
  Description of Artificial Sequence: Synthetic oligonucleotide
  Sense strand starting at position 3399 of SEQ ID NO: 588852
ggcaauaucucggcucaau

SEQ ID NO: 894411 - RNA, 19 nt, Artificial Sequence
  Description of Artificial Sequence: Synthetic oligonucleotide
  Antisense strand to SEQ ID NO: 894410
auugagccgagauauugcc

SEQ ID NO: 894412 - RNA, 19 nt, Artificial Sequence
  Description of Artificial Sequence: Synthetic oligonucleotide
  Sense strand starting at position 3402 of SEQ ID NO: 588852
aauaucucggcucaaugua

SEQ ID NO: 894413 - RNA, 19 nt, Artificial Sequence
  Description of Artificial Sequence: Synthetic oligonucleotide
  Antisense strand to SEQ ID NO: 894412
uacauugagccgagauauu

SEQ ID NO: 894414 - RNA, 19 nt, Artificial Sequence
  Description of Artificial Sequence: Synthetic oligonucleotide
  Sense strand starting at position 3676 of SEQ ID NO: 588852
aguggaguugagugaucuu

SEQ ID NO: 894415 - RNA, 19 nt, Artificial Sequence
  Description of Artificial Sequence: Synthetic oligonucleotide
  Antisense strand to SEQ ID NO: 894414
aagaucacucaacuccacu

SEQ ID NO: 894416 - RNA, 19 nt, Artificial Sequence
  Description of Artificial Sequence: Synthetic oligonucleotide
  Sense strand starting at position 3873 of SEQ ID NO: 588852
aagugaucugcccgcauua

SEQ ID NO: 894417 - RNA, 19 nt, Artificial Sequence
  Description of Artificial Sequence: Synthetic oligonucleotide
  Antisense strand to SEQ ID NO: 894416
uaaugcgggcagaucacuu

SEQ ID NO: 894418 - RNA, 19 nt, Artificial Sequence
  Description of Artificial Sequence: Synthetic oligonucleotide
  Sense strand starting at position 3875 of SEQ ID NO: 588852
gugaucugcccgcauuaca

SEQ ID NO: 894419 - RNA, 19 nt, Artificial Sequence
  Description of Artificial Sequence: Synthetic oligonucleotide
  Antisense strand to SEQ ID NO: 894418
uguaaugcgggcagaucac

SEQ ID NO: 894420 - RNA, 19 nt, Artificial Sequence
  Description of Artificial Sequence: Synthetic oligonucleotide
  Sense strand starting at position 41 of SEQ ID NO: 588853
gaggacuccuggccgagau

SEQ ID NO: 894421 - RNA, 19 nt, Artificial Sequence
  Description of Artificial Sequence: Synthetic oligonucleotide
  Antisense strand to SEQ ID NO: 894420
aucucggccaggaguccuc

SEQ ID NO: 894422 - RNA, 19 nt, Artificial Sequence
  Description of Artificial Sequence: Synthetic oligonucleotide
  Sense strand starting at position 64 of SEQ ID NO: 588853
gaaggaugauugggacaug

SEQ ID NO: 894423 - RNA, 19 nt, Artificial Sequence
  Description of Artificial Sequence: Synthetic oligonucleotide
  Antisense strand to SEQ ID NO: 894422
caugucccaaucauccuuc

SEQ ID NO: 894424 - RNA, 19 nt, Artificial Sequence
  Description of Artificial Sequence: Synthetic oligonucleotide
  Sense strand starting at position 490 of SEQ ID NO: 588853
uggcguccuccuugacaaa

SEQ ID NO: 894425 - RNA, 19 nt, Artificial Sequence
  Description of Artificial Sequence: Synthetic oligonucleotide
  Antisense strand to SEQ ID NO: 894424
uuugucaaggaggacgcca

SEQ ID NO: 894426 - RNA, 19 nt, Artificial Sequence
  Description of Artificial Sequence: Synthetic oligonucleotide
  Sense strand starting at position 654 of SEQ ID NO: 588853
ggcagccucauccguuaaa

SEQ ID NO: 894427 - RNA, 19 nt, Artificial Sequence
  Description of Artificial Sequence: Synthetic oligonucleotide
  Antisense strand to SEQ ID NO: 894426
uuuaacggaugaggcugcc

SEQ ID NO: 894428 - RNA, 19 nt, Artificial Sequence
  Description of Artificial Sequence: Synthetic oligonucleotide
  Sense strand starting at position 700 of SEQ ID NO: 588853
ccagcuuaaucacugguca

SEQ ID NO: 894429 - RNA, 19 nt, Artificial Sequence
  Description of Artificial Sequence: Synthetic oligonucleotide
  Antisense strand to SEQ ID NO: 894428
ugaccagugauuaagcugg

SEQ ID NO: 894430 - RNA, 19 nt, Artificial Sequence
  Description of Artificial Sequence: Synthetic oligonucleotide
  Sense strand starting at position 873 of SEQ ID NO: 588853
cccugcuauuggccagaga

SEQ ID NO: 894431 - RNA, 19 nt, Artificial Sequence
  Description of Artificial Sequence: Synthetic oligonucleotide
  Antisense strand to SEQ ID NO: 894430
ucucuggccaauagcaggg

SEQ ID NO: 894432 - RNA, 19 nt, Artificial Sequence
  Description of Artificial Sequence: Synthetic oligonucleotide
  Sense strand starting at position 874 of SEQ ID NO: 588853
ccugcuauuggccagagau

SEQ ID NO: 894433 - RNA, 19 nt, Artificial Sequence
  Description of Artificial Sequence: Synthetic oligonucleotide
  Antisense strand to SEQ ID NO: 894432
aucucuggccaauagcagg

SEQ ID NO: 894434 - RNA, 19 nt, Artificial Sequence
  Description of Artificial Sequence: Synthetic oligonucleotide
  Sense strand starting at position 876 of SEQ ID NO: 588853
ugcuauuggccagagauga

SEQ ID NO: 894435 - RNA, 19 nt, Artificial Sequence
  Description of Artificial Sequence: Synthetic oligonucleotide
  Antisense strand to SEQ ID NO: 894434
ucaucucuggccaauagca

SEQ ID NO: 894436 - RNA, 19 nt, Artificial Sequence
  Description of Artificial Sequence: Synthetic oligonucleotide
  Sense strand starting at position 1162 of SEQ ID NO: 588853
aaaggaugcuccgcagaga

SEQ ID NO: 894437 - RNA, 19 nt, Artificial Sequence
  Description of Artificial Sequence: Synthetic oligonucleotide
  Antisense strand to SEQ ID NO: 894436
ucucugcggagcauccuuu

SEQ ID NO: 894438 - RNA, 19 nt, Artificial Sequence
  Description of Artificial Sequence: Synthetic oligonucleotide
  Sense strand starting at position 1987 of SEQ ID NO: 588853
gcgauuaccucaucgccuu

SEQ ID NO: 894439 - RNA, 19 nt, Artificial Sequence
  Description of Artificial Sequence: Synthetic oligonucleotide
  Antisense strand to SEQ ID NO: 894438
aaggcgaugagguaaucgc

SEQ ID NO: 894440 - RNA, 19 nt, Artificial Sequence
  Description of Artificial Sequence: Synthetic oligonucleotide
  Sense strand starting at position 2289 of SEQ ID NO: 588853
ggcagagacuuugaauuaa

SEQ ID NO: 894441 - RNA, 19 nt, Artificial Sequence
  Description of Artificial Sequence: Synthetic oligonucleotide
  Antisense strand to SEQ ID NO: 894440
uuaauucaaagucucugcc

SEQ ID NO: 894442 - RNA, 19 nt, Artificial Sequence
  Description of Artificial Sequence: Synthetic oligonucleotide
  Sense strand starting at position 2331 of SEQ ID NO: 588853
ccguauaugugcuggacca

SEQ ID NO: 894443 - RNA, 19 nt, Artificial Sequence
  Description of Artificial Sequence: Synthetic oligonucleotide
  Antisense strand to SEQ ID NO: 894442
ugguccagcacauauacgg

SEQ ID NO: 894444 - RNA, 19 nt, Artificial Sequence
  Description of Artificial Sequence: Synthetic oligonucleotide
  Sense strand starting at position 2332 of SEQ ID NO: 588853
cguauaugugcuggaccaa

SEQ ID NO: 894445 - RNA, 19 nt, Artificial Sequence
  Description of Artificial Sequence: Synthetic oligonucleotide
  Antisense strand to SEQ ID NO: 894444
uugguccagcacauauacg

SEQ ID NO: 894446 - RNA, 19 nt, Artificial Sequence
  Description of Artificial Sequence: Synthetic oligonucleotide
  Sense strand starting at position 2333 of SEQ ID NO: 588853
guauaugugcuggaccaaa

SEQ ID NO: 894447 - RNA, 19 nt, Artificial Sequence
  Description of Artificial Sequence: Synthetic oligonucleotide
  Antisense strand to SEQ ID NO: 894446
uuugguccagcacauauac

SEQ ID NO: 894448 - RNA, 19 nt, Artificial Sequence
  Description of Artificial Sequence: Synthetic oligonucleotide
  Sense strand starting at position 2391 of SEQ ID NO: 588853
ucucaucccugguuuggaa

SEQ ID NO: 894449 - RNA, 19 nt, Artificial Sequence
  Description of Artificial Sequence: Synthetic oligonucleotide
  Antisense strand to SEQ ID NO: 894448
uuccaaaccagggaugaga

SEQ ID NO: 894450 - RNA, 19 nt, Artificial Sequence
  Description of Artificial Sequence: Synthetic oligonucleotide
  Sense strand starting at position 2430 of SEQ ID NO: 588853
cgaggauguucacugacaa

SEQ ID NO: 894451 - RNA, 19 nt, Artificial Sequence
  Description of Artificial Sequence: Synthetic oligonucleotide
  Antisense strand to SEQ ID NO: 894450
uugucagugaacauccucg

SEQ ID NO: 894452 - RNA, 19 nt, Artificial Sequence
  Description of Artificial Sequence: Synthetic oligonucleotide
  Sense strand starting at position 2544 of SEQ ID NO: 588853
gcucuuucccugggaucua

SEQ ID NO: 894453 - RNA, 19 nt, Artificial Sequence
  Description of Artificial Sequence: Synthetic oligonucleotide
  Antisense strand to SEQ ID NO: 894452
uagaucccagggaaagagc

SEQ ID NO: 894454 - RNA, 19 nt, Artificial Sequence
  Description of Artificial Sequence: Synthetic oligonucleotide
  Sense strand starting at position 2560 of SEQ ID NO: 588853
cuacgacucacuuguggaa

SEQ ID NO: 894455 - RNA, 19 nt, Artificial Sequence
  Description of Artificial Sequence: Synthetic oligonucleotide
  Antisense strand to SEQ ID NO: 894454
uuccacaagugagucguag

SEQ ID NO: 894456 - RNA, 19 nt, Artificial Sequence
  Description of Artificial Sequence: Synthetic oligonucleotide
  Sense strand starting at position 2619 of SEQ ID NO: 588853
acagaacucuucugagcuu

SEQ ID NO: 894457 - RNA, 19 nt, Artificial Sequence
  Description of Artificial Sequence: Synthetic oligonucleotide
  Antisense strand to SEQ ID NO: 894456
aagcucagaagaguucugu

SEQ ID NO: 894458 - RNA, 19 nt, Artificial Sequence
  Description of Artificial Sequence: Synthetic oligonucleotide
  Sense strand starting at position 2652 of SEQ ID NO: 588853
cauguaaguugccaggcau

SEQ ID NO: 894459 - RNA, 19 nt, Artificial Sequence
  Description of Artificial Sequence: Synthetic oligonucleotide
  Antisense strand to SEQ ID NO: 894458
augccuggcaacuuacaug

SEQ ID NO: 894460 - RNA, 19 nt, Artificial Sequence
  Description of Artificial Sequence: Synthetic oligonucleotide
  Sense strand starting at position 2671 of SEQ ID NO: 588853
gaaguaagcgcucaauaag

SEQ ID NO: 894461 - RNA, 19 nt, Artificial Sequence
  Description of Artificial Sequence: Synthetic oligonucleotide
  Antisense strand to SEQ ID NO: 894460
cuuauugagcgcuuacuuc

SEQ ID NO: 894462 - RNA, 19 nt, Artificial Sequence
  Description of Artificial Sequence: Synthetic oligonucleotide
  Sense strand starting at position 2682 of SEQ ID NO: 588853
ucaauaagugcacgcuauu

SEQ ID NO: 894463 - RNA, 19 nt, Artificial Sequence
  Description of Artificial Sequence: Synthetic oligonucleotide
  Antisense strand to SEQ ID NO: 894462
aauagcgugcacuuauuga

SEQ ID NO: 894464 - RNA, 19 nt, Artificial Sequence
  Description of Artificial Sequence: Synthetic oligonucleotide
  Sense strand starting at position 2685 of SEQ ID NO: 588853
auaagugcacgcuauuauu

SEQ ID NO: 894465 - RNA, 19 nt, Artificial Sequence
  Description of Artificial Sequence: Synthetic oligonucleotide
  Antisense strand to SEQ ID NO: 894464
aauaauagcgugcacuuau

SEQ ID NO: 894466 - RNA, 19 nt, Artificial Sequence
  Description of Artificial Sequence: Synthetic oligonucleotide
  Sense strand starting at position 2708 of SEQ ID NO: 588853
agcuuccugucuuagaaac

SEQ ID NO: 894467 - RNA, 19 nt, Artificial Sequence
  Description of Artificial Sequence: Synthetic oligonucleotide
  Antisense strand to SEQ ID NO: 894466
guuucuaagacaggaagcu

SEQ ID NO: 894468 - RNA, 19 nt, Artificial Sequence
  Description of Artificial Sequence: Synthetic oligonucleotide
  Sense strand starting at position 3219 of SEQ ID NO: 588853
gggcaugcagccuggaauu

SEQ ID NO: 894469 - RNA, 19 nt, Artificial Sequence
  Description of Artificial Sequence: Synthetic oligonucleotide
  Antisense strand to SEQ ID NO: 894468
aauuccaggcugcaugccc

SEQ ID NO: 894470 - RNA, 19 nt, Artificial Sequence
  Description of Artificial Sequence: Synthetic oligonucleotide
  Sense strand starting at position 3293 of SEQ ID NO: 588853
guuugagaacucugaaguu

SEQ ID NO: 894471 - RNA, 19 nt, Artificial Sequence
  Description of Artificial Sequence: Synthetic oligonucleotide
  Antisense strand to SEQ ID NO: 894470
aacuucagaguucucaaac

SEQ ID NO: 894472 - RNA, 19 nt, Artificial Sequence
  Description of Artificial Sequence: Synthetic oligonucleotide
  Sense strand starting at position 3302 of SEQ ID NO: 588853
cucugaaguucuggaagcu

SEQ ID NO: 894473 - RNA, 19 nt, Artificial Sequence
  Description of Artificial Sequence: Synthetic oligonucleotide
  Antisense strand to SEQ ID NO: 894472
agcuuccagaacuucagag

SEQ ID NO: 894474 - RNA, 19 nt, Artificial Sequence
  Description of Artificial Sequence: Synthetic oligonucleotide
  Sense strand starting at position 3331 of SEQ ID NO: 588853
agaugaguaucucaaggua

SEQ ID NO: 894475 - RNA, 19 nt, Artificial Sequence
  Description of Artificial Sequence: Synthetic oligonucleotide
  Antisense strand to SEQ ID NO: 894474
uaccuugagauacucaucu

SEQ ID NO: 894476 - RNA, 19 nt, Artificial Sequence
  Description of Artificial Sequence: Synthetic oligonucleotide
  Sense strand starting at position 3334 of SEQ ID NO: 588853
ugaguaucucaagguagga

SEQ ID NO: 894477 - RNA, 19 nt, Artificial Sequence
  Description of Artificial Sequence: Synthetic oligonucleotide
  Antisense strand to SEQ ID NO: 894476
uccuaccuugagauacuca

SEQ ID NO: 894478 - RNA, 19 nt, Artificial Sequence
  Description of Artificial Sequence: Synthetic oligonucleotide
  Sense strand starting at position 3420 of SEQ ID NO: 588853
uggcaauaucucggcucaa

SEQ ID NO: 894479 - RNA, 19 nt, Artificial Sequence
  Description of Artificial Sequence: Synthetic oligonucleotide
  Antisense strand to SEQ ID NO: 894478
uugagccgagauauugcca

SEQ ID NO: 894480 - RNA, 19 nt, Artificial Sequence
  Description of Artificial Sequence: Synthetic oligonucleotide
  Sense strand starting at position 3421 of SEQ ID NO: 588853
ggcaauaucucggcucaau

SEQ ID NO: 894481 - RNA, 19 nt, Artificial Sequence
  Description of Artificial Sequence: Synthetic oligonucleotide
  Antisense strand to SEQ ID NO: 894480
auugagccgagauauugcc

SEQ ID NO: 894482 - RNA, 19 nt, Artificial Sequence
  Description of Artificial Sequence: Synthetic oligonucleotide
  Sense strand starting at position 3424 of SEQ ID NO: 588853
aauaucucggcucaaugua

SEQ ID NO: 894483 - RNA, 19 nt, Artificial Sequence
  Description of Artificial Sequence: Synthetic oligonucleotide
  Antisense strand to SEQ ID NO: 894482
uacauugagccgagauauu

SEQ ID NO: 894484 - RNA, 19 nt, Artificial Sequence
  Description of Artificial Sequence: Synthetic oligonucleotide
  Sense strand starting at position 3698 of SEQ ID NO: 588853
aguggaguugagugaucuu

SEQ ID NO: 894485 - RNA, 19 nt, Artificial Sequence
  Description of Artificial Sequence: Synthetic oligonucleotide
  Antisense strand to SEQ ID NO: 894484
aagaucacucaacuccacu

SEQ ID NO: 894486 - RNA, 19 nt, Artificial Sequence
  Description of Artificial Sequence: Synthetic oligonucleotide
  Sense strand starting at position 3895 of SEQ ID NO: 588853
aagugaucugcccgcauua

SEQ ID NO: 894487 - RNA, 19 nt, Artificial Sequence
  Description of Artificial Sequence: Synthetic oligonucleotide
  Antisense strand to SEQ ID NO: 894486
uaaugcgggcagaucacuu

SEQ ID NO: 894488 - RNA, 19 nt, Artificial Sequence
  Description of Artificial Sequence: Synthetic oligonucleotide
  Sense strand starting at position 3897 of SEQ ID NO: 588853
gugaucugcccgcauuaca

SEQ ID NO: 894489 - RNA, 19 nt, Artificial Sequence
  Description of Artificial Sequence: Synthetic oligonucleotide
  Antisense strand to SEQ ID NO: 894488
uguaaugcgggcagaucac

SEQ ID NO: 894490 - RNA, 19 nt, Artificial Sequence
  Description of Artificial Sequence: Synthetic oligonucleotide
  Sense strand starting at position 356 of SEQ ID NO: 588854
ggaaaugugaccuaguggu

SEQ ID NO: 894491 - RNA, 19 nt, Artificial Sequence
  Description of Artificial Sequence: Synthetic oligonucleotide
  Antisense strand to SEQ ID NO: 894490
accacuaggucacauuucc

SEQ ID NO: 894492 - RNA, 19 nt, Artificial Sequence
  Description of Artificial Sequence: Synthetic oligonucleotide
  Sense strand starting at position 372 of SEQ ID NO: 588854
gguuuagagcuugggcuua

SEQ ID NO: 894493 - RNA, 19 nt, Artificial Sequence
  Description of Artificial Sequence: Synthetic oligonucleotide
  Antisense strand to SEQ ID NO: 894492
uaagcccaagcucuaaacc

SEQ ID NO: 894494 - RNA, 19 nt, Artificial Sequence
  Description of Artificial Sequence: Synthetic oligonucleotide
  Sense strand starting at position 529 of SEQ ID NO: 588854
aguguugagcuagacaaca

SEQ ID NO: 894495 - RNA, 19 nt, Artificial Sequence
  Description of Artificial Sequence: Synthetic oligonucleotide
  Antisense strand to SEQ ID NO: 894494
uguugucuagcucaacacu

SEQ ID NO: 894496 - RNA, 19 nt, Artificial Sequence
  Description of Artificial Sequence: Synthetic oligonucleotide
  Sense strand starting at position 563 of SEQ ID NO: 588854
cugguugucagcuggugau

SEQ ID NO: 894497 - RNA, 19 nt, Artificial Sequence
  Description of Artificial Sequence: Synthetic oligonucleotide
  Antisense strand to SEQ ID NO: 894496
aucaccagcugacaaccag

SEQ ID NO: 894498 - RNA, 19 nt, Artificial Sequence
  Description of Artificial Sequence: Synthetic oligonucleotide
  Sense strand starting at position 577 of SEQ ID NO: 588854
gugaucaugccugguggga

SEQ ID NO: 894499 - RNA, 19 nt, Artificial Sequence
  Description of Artificial Sequence: Synthetic oligonucleotide
  Antisense strand to SEQ ID NO: 894498
ucccaccaggcaugaucac

SEQ ID NO: 894500 - RNA, 19 nt, Artificial Sequence
  Description of Artificial Sequence: Synthetic oligonucleotide
  Sense strand starting at position 592 of SEQ ID NO: 588854
gggacccucgccugacaau

SEQ ID NO: 894501 - RNA, 19 nt, Artificial Sequence
  Description of Artificial Sequence: Synthetic oligonucleotide
  Antisense strand to SEQ ID NO: 894500
auugucaggcgaggguccc

SEQ ID NO: 894502 - RNA, 19 nt, Artificial Sequence
  Description of Artificial Sequence: Synthetic oligonucleotide
  Sense strand starting at position 593 of SEQ ID NO: 588854
ggacccucgccugacaauu

SEQ ID NO: 894503 - RNA, 19 nt, Artificial Sequence
  Description of Artificial Sequence: Synthetic oligonucleotide
  Antisense strand to SEQ ID NO: 894502
aauugucaggcgagggucc

SEQ ID NO: 894504 - RNA, 19 nt, Artificial Sequence
  Description of Artificial Sequence: Synthetic oligonucleotide
  Sense strand starting at position 604 of SEQ ID NO: 588854
ugacaauuccagugugggu

SEQ ID NO: 894505 - RNA, 19 nt, Artificial Sequence
  Description of Artificial Sequence: Synthetic oligonucleotide
  Antisense strand to SEQ ID NO: 894504
acccacacuggaauuguca

SEQ ID NO: 894506 - RNA, 19 nt, Artificial Sequence
  Description of Artificial Sequence: Synthetic oligonucleotide
  Sense strand starting at position 1009 of SEQ ID NO: 588854
acuggcauuucccaaaugu

SEQ ID NO: 894507 - RNA, 19 nt, Artificial Sequence
  Description of Artificial Sequence: Synthetic oligonucleotide
  Antisense strand to SEQ ID NO: 894506
acauuugggaaaugccagu

SEQ ID NO: 894508 - RNA, 19 nt, Artificial Sequence
  Description of Artificial Sequence: Synthetic oligonucleotide
  Sense strand starting at position 1175 of SEQ ID NO: 588854
ggacuucuggaaggaaugu

SEQ ID NO: 894509 - RNA, 19 nt, Artificial Sequence
  Description of Artificial Sequence: Synthetic oligonucleotide
  Antisense strand to SEQ ID NO: 894508
acauuccuuccagaagucc

SEQ ID NO: 894510 - RNA, 19 nt, Artificial Sequence
  Description of Artificial Sequence: Synthetic oligonucleotide
  Sense strand starting at position 1247 of SEQ ID NO: 588854
ggcucaaucuggucugcua

SEQ ID NO: 894511 - RNA, 19 nt, Artificial Sequence
  Description of Artificial Sequence: Synthetic oligonucleotide
  Antisense strand to SEQ ID NO: 894510
uagcagaccagauugagcc

SEQ ID NO: 894512 - RNA, 19 nt, Artificial Sequence
  Description of Artificial Sequence: Synthetic oligonucleotide
  Sense strand starting at position 1423 of SEQ ID NO: 588854
uucucaagguuucucaaga

SEQ ID NO: 894513 - RNA, 19 nt, Artificial Sequence
  Description of Artificial Sequence: Synthetic oligonucleotide
  Antisense strand to SEQ ID NO: 894512
ucuugagaaaccuugagaa

SEQ ID NO: 894514 - RNA, 19 nt, Artificial Sequence
  Description of Artificial Sequence: Synthetic oligonucleotide
  Sense strand starting at position 1480 of SEQ ID NO: 588854
ugugcugcccagguguuaa

SEQ ID NO: 894515 - RNA, 19 nt, Artificial Sequence
  Description of Artificial Sequence: Synthetic oligonucleotide
  Antisense strand to SEQ ID NO: 894514
uuaacaccugggcagcaca

SEQ ID NO: 894516 - RNA, 19 nt, Artificial Sequence
  Description of Artificial Sequence: Synthetic oligonucleotide
  Sense strand starting at position 1508 of SEQ ID NO: 588854
ccaggaagcuggguuuaaa

SEQ ID NO: 894517 - RNA, 19 nt, Artificial Sequence
  Description of Artificial Sequence: Synthetic oligonucleotide
  Antisense strand to SEQ ID NO: 894516
uuuaaacccagcuuccugg

SEQ ID NO: 894518 - RNA, 19 nt, Artificial Sequence
  Description of Artificial Sequence: Synthetic oligonucleotide
  Sense strand starting at position 1540 of SEQ ID NO: 588854
gcucacuggcugugucaaa

SEQ ID NO: 894519 - RNA, 19 nt, Artificial Sequence
  Description of Artificial Sequence: Synthetic oligonucleotide
  Antisense strand to SEQ ID NO: 894518
uuugacacagccagugagc

SEQ ID NO: 894520 - RNA, 19 nt, Artificial Sequence
  Description of Artificial Sequence: Synthetic oligonucleotide
  Sense strand starting at position 1624 of SEQ ID NO: 588854
ggcuguuguguagaguaga

SEQ ID NO: 894521 - RNA, 19 nt, Artificial Sequence
  Description of Artificial Sequence: Synthetic oligonucleotide
  Antisense strand to SEQ ID NO: 894520
ucuacucuacacaacagcc

SEQ ID NO: 894522 - RNA, 19 nt, Artificial Sequence
  Description of Artificial Sequence: Synthetic oligonucleotide
  Sense strand starting at position 1627 of SEQ ID NO: 588854
uguuguguagaguagauaa

SEQ ID NO: 894523 - RNA, 19 nt, Artificial Sequence
  Description of Artificial Sequence: Synthetic oligonucleotide
  Antisense strand to SEQ ID NO: 894522
uuaucuacucuacacaaca

SEQ ID NO: 894524 - RNA, 19 nt, Artificial Sequence
  Description of Artificial Sequence: Synthetic oligonucleotide
  Sense strand starting at position 2473 of SEQ ID NO: 588854
gaguucuacuaaucguaaa

SEQ ID NO: 894525 - RNA, 19 nt, Artificial Sequence
  Description of Artificial Sequence: Synthetic oligonucleotide
  Antisense strand to SEQ ID NO: 894524
uuuacgauuaguagaacuc

SEQ ID NO: 894526 - RNA, 19 nt, Artificial Sequence
  Description of Artificial Sequence: Synthetic oligonucleotide
  Sense strand starting at position 2545 of SEQ ID NO: 588854
acagguauguuauucuuga

SEQ ID NO: 894527 - RNA, 19 nt, Artificial Sequence
  Description of Artificial Sequence: Synthetic oligonucleotide
  Antisense strand to SEQ ID NO: 894526
ucaagaauaacauaccugu

SEQ ID NO: 894528 - RNA, 19 nt, Artificial Sequence
  Description of Artificial Sequence: Synthetic oligonucleotide
  Sense strand starting at position 2546 of SEQ ID NO: 588854
cagguauguuauucuugaa

SEQ ID NO: 894529 - RNA, 19 nt, Artificial Sequence
  Description of Artificial Sequence: Synthetic oligonucleotide
  Antisense strand to SEQ ID NO: 894528
uucaagaauaacauaccug

SEQ ID NO: 894530 - RNA, 19 nt, Artificial Sequence
  Description of Artificial Sequence: Synthetic oligonucleotide
  Sense strand starting at position 2601 of SEQ ID NO: 588854
acguccauuuaucagauga

SEQ ID NO: 894531 - RNA, 19 nt, Artificial Sequence
  Description of Artificial Sequence: Synthetic oligonucleotide
  Antisense strand to SEQ ID NO: 894530
ucaucugauaaauggacgu

SEQ ID NO: 894532 - RNA, 19 nt, Artificial Sequence
  Description of Artificial Sequence: Synthetic oligonucleotide
  Sense strand starting at position 3228 of SEQ ID NO: 588854
acuggugugguugagacaa

SEQ ID NO: 894533 - RNA, 19 nt, Artificial Sequence
  Description of Artificial Sequence: Synthetic oligonucleotide
  Antisense strand to SEQ ID NO: 894532
uugucucaaccacaccagu

SEQ ID NO: 894534 - RNA, 19 nt, Artificial Sequence
  Description of Artificial Sequence: Synthetic oligonucleotide
  Sense strand starting at position 3236 of SEQ ID NO: 588854
gguugagacaaagguucua

SEQ ID NO: 894535 - RNA, 19 nt, Artificial Sequence
  Description of Artificial Sequence: Synthetic oligonucleotide
  Antisense strand to SEQ ID NO: 894534
uagaaccuuugucucaacc

SEQ ID NO: 894536 - RNA, 19 nt, Artificial Sequence
  Description of Artificial Sequence: Synthetic oligonucleotide
  Sense strand starting at position 3241 of SEQ ID NO: 588854
agacaaagguucuaaggau

SEQ ID NO: 894537 - RNA, 19 nt, Artificial Sequence
  Description of Artificial Sequence: Synthetic oligonucleotide
  Antisense strand to SEQ ID NO: 894536
auccuuagaaccuuugucu

SEQ ID NO: 894538 - RNA, 19 nt, Artificial Sequence
  Description of Artificial Sequence: Synthetic oligonucleotide
  Sense strand starting at position 3272 of SEQ ID NO: 588854
gacuccuuuggcugggauu

SEQ ID NO: 894539 - RNA, 19 nt, Artificial Sequence
  Description of Artificial Sequence: Synthetic oligonucleotide
  Antisense strand to SEQ ID NO: 894538
aaucccagccaaaggaguc

SEQ ID NO: 894540 - RNA, 19 nt, Artificial Sequence
  Description of Artificial Sequence: Synthetic oligonucleotide
  Sense strand starting at position 3274 of SEQ ID NO: 588854
cuccuuuggcugggauuga

SEQ ID NO: 894541 - RNA, 19 nt, Artificial Sequence
  Description of Artificial Sequence: Synthetic oligonucleotide
  Antisense strand to SEQ ID NO: 894540
ucaaucccagccaaaggag

SEQ ID NO: 894542 - RNA, 19 nt, Artificial Sequence
  Description of Artificial Sequence: Synthetic oligonucleotide
  Sense strand starting at position 3312 of SEQ ID NO: 588854
aaggcauggcccuaggauu

SEQ ID NO: 894543 - RNA, 19 nt, Artificial Sequence
  Description of Artificial Sequence: Synthetic oligonucleotide
  Antisense strand to SEQ ID NO: 894542
aauccuagggccaugccuu

SEQ ID NO: 894544 - RNA, 19 nt, Artificial Sequence
  Description of Artificial Sequence: Synthetic oligonucleotide
  Sense strand starting at position 3340 of SEQ ID NO: 588854
gugagucuaaugugguaca

SEQ ID NO: 894545 - RNA, 19 nt, Artificial Sequence
  Description of Artificial Sequence: Synthetic oligonucleotide
  Antisense strand to SEQ ID NO: 894544
uguaccacauuagacucac

SEQ ID NO: 894546 - RNA, 19 nt, Artificial Sequence
  Description of Artificial Sequence: Synthetic oligonucleotide
  Sense strand starting at position 3345 of SEQ ID NO: 588854
ucuaaugugguacauaagu

SEQ ID NO: 894547 - RNA, 19 nt, Artificial Sequence
  Description of Artificial Sequence: Synthetic oligonucleotide
  Antisense strand to SEQ ID NO: 894546
acuuauguaccacauuaga

SEQ ID NO: 894548 - RNA, 19 nt, Artificial Sequence
  Description of Artificial Sequence: Synthetic oligonucleotide
  Sense strand starting at position 3383 of SEQ ID NO: 588854
gcagauuccugcucaaauc

SEQ ID NO: 894549 - RNA, 19 nt, Artificial Sequence
  Description of Artificial Sequence: Synthetic oligonucleotide
  Antisense strand to SEQ ID NO: 894548
gauuugagcaggaaucugc

SEQ ID NO: 894550 - RNA, 19 nt, Artificial Sequence
  Description of Artificial Sequence: Synthetic oligonucleotide
  Sense strand starting at position 3401 of SEQ ID NO: 588854
cccaguucuguguaaccuu

SEQ ID NO: 894551 - RNA, 19 nt, Artificial Sequence
  Description of Artificial Sequence: Synthetic oligonucleotide
  Antisense strand to SEQ ID NO: 894550
aagguuacacagaacuggg

SEQ ID NO: 894552 - RNA, 19 nt, Artificial Sequence
  Description of Artificial Sequence: Synthetic oligonucleotide
  Sense strand starting at position 3409 of SEQ ID NO: 588854
uguguaaccuuggcugagu

SEQ ID NO: 894553 - RNA, 19 nt, Artificial Sequence
  Description of Artificial Sequence: Synthetic oligonucleotide
  Antisense strand to SEQ ID NO: 894552
acucagccaagguuacaca

SEQ ID NO: 894554 - RNA, 19 nt, Artificial Sequence
  Description of Artificial Sequence: Synthetic oligonucleotide
  Sense strand starting at position 3737 of SEQ ID NO: 588854
agccuuaaugauugaaucu

SEQ ID NO: 894555 - RNA, 19 nt, Artificial Sequence
  Description of Artificial Sequence: Synthetic oligonucleotide
  Antisense strand to SEQ ID NO: 894554
agauucaaucauuaaggcu

SEQ ID NO: 894556 - RNA, 19 nt, Artificial Sequence
  Description of Artificial Sequence: Synthetic oligonucleotide
  Sense strand starting at position 3746 of SEQ ID NO: 588854
gauugaaucuucuauggag

SEQ ID NO: 894557 - RNA, 19 nt, Artificial Sequence
  Description of Artificial Sequence: Synthetic oligonucleotide
  Antisense strand to SEQ ID NO: 894556
cuccauagaagauucaauc

SEQ ID NO: 894558 - RNA, 19 nt, Artificial Sequence
  Description of Artificial Sequence: Synthetic oligonucleotide
  Sense strand starting at position 3748 of SEQ ID NO: 588854
uugaaucuucuauggaguu

SEQ ID NO: 894559 - RNA, 19 nt, Artificial Sequence
  Description of Artificial Sequence: Synthetic oligonucleotide
  Antisense strand to SEQ ID NO: 894558
aacuccauagaagauucaa

SEQ ID NO: 894560 - RNA, 19 nt, Artificial Sequence
  Description of Artificial Sequence: Synthetic oligonucleotide
  Sense strand starting at position 3814 of SEQ ID NO: 588854
gggagcuauuguccuauca

SEQ ID NO: 894561 - RNA, 19 nt, Artificial Sequence
  Description of Artificial Sequence: Synthetic oligonucleotide
  Antisense strand to SEQ ID NO: 894560
ugauaggacaauagcuccc

SEQ ID NO: 894562 - RNA, 19 nt, Artificial Sequence
  Description of Artificial Sequence: Synthetic oligonucleotide
  Sense strand starting at position 3910 of SEQ ID NO: 588854
ggagguauuguccagcaga

SEQ ID NO: 894563 - RNA, 19 nt, Artificial Sequence
  Description of Artificial Sequence: Synthetic oligonucleotide
  Antisense strand to SEQ ID NO: 894562
ucugcuggacaauaccucc

SEQ ID NO: 894564 - RNA, 19 nt, Artificial Sequence
  Description of Artificial Sequence: Synthetic oligonucleotide
  Sense strand starting at position 3913 of SEQ ID NO: 588854
gguauuguccagcagaacu

SEQ ID NO: 894565 - RNA, 19 nt, Artificial Sequence
  Description of Artificial Sequence: Synthetic oligonucleotide
  Antisense strand to SEQ ID NO: 894564
aguucugcuggacaauacc

SEQ ID NO: 894566 - RNA, 19 nt, Artificial Sequence
  Description of Artificial Sequence: Synthetic oligonucleotide
  Sense strand starting at position 3967 of SEQ ID NO: 588854
gggucuagugacuggguuu

SEQ ID NO: 894567 - RNA, 19 nt, Artificial Sequence
  Description of Artificial Sequence: Synthetic oligonucleotide
  Antisense strand to SEQ ID NO: 894566
aaacccagucacuagaccc

SEQ ID NO: 894568 - RNA, 19 nt, Artificial Sequence
  Description of Artificial Sequence: Synthetic oligonucleotide
  Sense strand starting at position 3968 of SEQ ID NO: 588854
ggucuagugacuggguuua

SEQ ID NO: 894569 - RNA, 19 nt, Artificial Sequence
  Description of Artificial Sequence: Synthetic oligonucleotide
  Antisense strand to SEQ ID NO: 894568
uaaacccagucacuagacc

SEQ ID NO: 894570 - RNA, 19 nt, Artificial Sequence
  Description of Artificial Sequence: Synthetic oligonucleotide
  Sense strand starting at position 80 of SEQ ID NO: 588855
uugccuuggucuccugaga

SEQ ID NO: 894571 - RNA, 19 nt, Artificial Sequence
  Description of Artificial Sequence: Synthetic oligonucleotide
  Antisense strand to SEQ ID NO: 894570
ucucaggagaccaaggcaa

SEQ ID NO: 894572 - RNA, 19 nt, Artificial Sequence
  Description of Artificial Sequence: Synthetic oligonucleotide
  Sense strand starting at position 85 of SEQ ID NO: 588855
uuggucuccugagaaacgu

SEQ ID NO: 894573 - RNA, 19 nt, Artificial Sequence
  Description of Artificial Sequence: Synthetic oligonucleotide
  Antisense strand to SEQ ID NO: 894572
acguuucucaggagaccaa

SEQ ID NO: 894574 - RNA, 19 nt, Artificial Sequence
  Description of Artificial Sequence: Synthetic oligonucleotide
  Sense strand starting at position 94 of SEQ ID NO: 588855
ugagaaacgugucggcaaa

SEQ ID NO: 894575 - RNA, 19 nt, Artificial Sequence
  Description of Artificial Sequence: Synthetic oligonucleotide
  Antisense strand to SEQ ID NO: 894574
uuugccgacacguuucuca

SEQ ID NO: 894576 - RNA, 19 nt, Artificial Sequence
  Description of Artificial Sequence: Synthetic oligonucleotide
  Sense strand starting at position 95 of SEQ ID NO: 588855
gagaaacgugucggcaaau

SEQ ID NO: 894577 - RNA, 19 nt, Artificial Sequence
  Description of Artificial Sequence: Synthetic oligonucleotide
  Antisense strand to SEQ ID NO: 894576
auuugccgacacguuucuc

SEQ ID NO: 894578 - RNA, 19 nt, Artificial Sequence
  Description of Artificial Sequence: Synthetic oligonucleotide
  Sense strand starting at position 96 of SEQ ID NO: 588855
agaaacgugucggcaaaug

SEQ ID NO: 894579 - RNA, 19 nt, Artificial Sequence
  Description of Artificial Sequence: Synthetic oligonucleotide
  Antisense strand to SEQ ID NO: 894578
cauuugccgacacguuucu

SEQ ID NO: 894580 - RNA, 19 nt, Artificial Sequence
  Description of Artificial Sequence: Synthetic oligonucleotide
  Sense strand starting at position 220 of SEQ ID NO: 588855
ccagacguuuggaggagau

SEQ ID NO: 894581 - RNA, 19 nt, Artificial Sequence
  Description of Artificial Sequence: Synthetic oligonucleotide
  Antisense strand to SEQ ID NO: 894580
aucuccuccaaacgucugg

SEQ ID NO: 894582 - RNA, 19 nt, Artificial Sequence
  Description of Artificial Sequence: Synthetic oligonucleotide
  Sense strand starting at position 282 of SEQ ID NO: 588855
gggauugggcccugcucaa

SEQ ID NO: 894583 - RNA, 19 nt, Artificial Sequence
  Description of Artificial Sequence: Synthetic oligonucleotide
  Antisense strand to SEQ ID NO: 894582
uugagcagggcccaauccc

SEQ ID NO: 894584 - RNA, 19 nt, Artificial Sequence
  Description of Artificial Sequence: Synthetic oligonucleotide
  Sense strand starting at position 294 of SEQ ID NO: 588855
ugcucaauagcccguguga

SEQ ID NO: 894585 - RNA, 19 nt, Artificial Sequence
  Description of Artificial Sequence: Synthetic oligonucleotide
  Antisense strand to SEQ ID NO: 894584
ucacacgggcuauugagca

SEQ ID NO: 894586 - RNA, 19 nt, Artificial Sequence
  Description of Artificial Sequence: Synthetic oligonucleotide
  Sense strand starting at position 303 of SEQ ID NO: 588855
gcccgugugaccucaagca

SEQ ID NO: 894587 - RNA, 19 nt, Artificial Sequence
  Description of Artificial Sequence: Synthetic oligonucleotide
  Antisense strand to SEQ ID NO: 894586
ugcuugaggucacacgggc

SEQ ID NO: 894588 - RNA, 19 nt, Artificial Sequence
  Description of Artificial Sequence: Synthetic oligonucleotide
  Sense strand starting at position 336 of SEQ ID NO: 588855
agcguugccaucugggaaa

SEQ ID NO: 894589 - RNA, 19 nt, Artificial Sequence
  Description of Artificial Sequence: Synthetic oligonucleotide
  Antisense strand to SEQ ID NO: 894588
uuucccagauggcaacgcu

SEQ ID NO: 894590 - RNA, 19 nt, Artificial Sequence
  Description of Artificial Sequence: Synthetic oligonucleotide
  Sense strand starting at position 373 of SEQ ID NO: 588855
agcauugccaucugggaaa

SEQ ID NO: 894591 - RNA, 19 nt, Artificial Sequence
  Description of Artificial Sequence: Synthetic oligonucleotide
  Antisense strand to SEQ ID NO: 894590
uuucccagauggcaaugcu

SEQ ID NO: 894592 - RNA, 19 nt, Artificial Sequence
  Description of Artificial Sequence: Synthetic oligonucleotide
  Sense strand starting at position 537 of SEQ ID NO: 588855
cguggagccugauucuagu

SEQ ID NO: 894593 - RNA, 19 nt, Artificial Sequence
  Description of Artificial Sequence: Synthetic oligonucleotide
  Antisense strand to SEQ ID NO: 894592
acuagaaucaggcuccacg

SEQ ID NO: 894594 - RNA, 19 nt, Artificial Sequence
  Description of Artificial Sequence: Synthetic oligonucleotide
  Sense strand starting at position 543 of SEQ ID NO: 588855
gccugauucuaguaccucu

SEQ ID NO: 894595 - RNA, 19 nt, Artificial Sequence
  Description of Artificial Sequence: Synthetic oligonucleotide
  Antisense strand to SEQ ID NO: 894594
agagguacuagaaucaggc

SEQ ID NO: 894596 - RNA, 19 nt, Artificial Sequence
  Description of Artificial Sequence: Synthetic oligonucleotide
  Sense strand starting at position 595 of SEQ ID NO: 588855
ccucacugcuguugggaau

SEQ ID NO: 894597 - RNA, 19 nt, Artificial Sequence
  Description of Artificial Sequence: Synthetic oligonucleotide
  Antisense strand to SEQ ID NO: 894596
auucccaacagcagugagg

SEQ ID NO: 894598 - RNA, 19 nt, Artificial Sequence
  Description of Artificial Sequence: Synthetic oligonucleotide
  Sense strand starting at position 601 of SEQ ID NO: 588855
ugcuguugggaaugugaga

SEQ ID NO: 894599 - RNA, 19 nt, Artificial Sequence
  Description of Artificial Sequence: Synthetic oligonucleotide
  Antisense strand to SEQ ID NO: 894598
ucucacauucccaacagca

SEQ ID NO: 894600 - RNA, 19 nt, Artificial Sequence
  Description of Artificial Sequence: Synthetic oligonucleotide
  Sense strand starting at position 1057 of SEQ ID NO: 588855
agagacgucugcagagaga

SEQ ID NO: 894601 - RNA, 19 nt, Artificial Sequence
  Description of Artificial Sequence: Synthetic oligonucleotide
  Antisense strand to SEQ ID NO: 894600
ucucucugcagacgucucu

SEQ ID NO: 894602 - RNA, 19 nt, Artificial Sequence
  Description of Artificial Sequence: Synthetic oligonucleotide
  Sense strand starting at position 1070 of SEQ ID NO: 588855
gagagacagugauggacaa

SEQ ID NO: 894603 - RNA, 19 nt, Artificial Sequence
  Description of Artificial Sequence: Synthetic oligonucleotide
  Antisense strand to SEQ ID NO: 894602
uuguccaucacugucucuc

SEQ ID NO: 894604 - RNA, 19 nt, Artificial Sequence
  Description of Artificial Sequence: Synthetic oligonucleotide
  Sense strand starting at position 1538 of SEQ ID NO: 588855
auuuaauugugccuggagu

SEQ ID NO: 894605 - RNA, 19 nt, Artificial Sequence
  Description of Artificial Sequence: Synthetic oligonucleotide
  Antisense strand to SEQ ID NO: 894604
acuccaggcacaauuaaau

SEQ ID NO: 894606 - RNA, 19 nt, Artificial Sequence
  Description of Artificial Sequence: Synthetic oligonucleotide
  Sense strand starting at position 1734 of SEQ ID NO: 588855
augagacagugaugaagaa

SEQ ID NO: 894607 - RNA, 19 nt, Artificial Sequence
  Description of Artificial Sequence: Synthetic oligonucleotide
  Antisense strand to SEQ ID NO: 894606
uucuucaucacugucucau

SEQ ID NO: 894608 - RNA, 19 nt, Artificial Sequence
  Description of Artificial Sequence: Synthetic oligonucleotide
  Sense strand starting at position 1850 of SEQ ID NO: 588855
cucugucaucuuggcaaau

SEQ ID NO: 894609 - RNA, 19 nt, Artificial Sequence
  Description of Artificial Sequence: Synthetic oligonucleotide
  Antisense strand to SEQ ID NO: 894608
auuugccaagaugacagag

SEQ ID NO: 894610 - RNA, 19 nt, Artificial Sequence
  Description of Artificial Sequence: Synthetic oligonucleotide
  Sense strand starting at position 1851 of SEQ ID NO: 588855
ucugucaucuuggcaaauu

SEQ ID NO: 894611 - RNA, 19 nt, Artificial Sequence
  Description of Artificial Sequence: Synthetic oligonucleotide
  Antisense strand to SEQ ID NO: 894610
aauuugccaagaugacaga

SEQ ID NO: 894612 - RNA, 19 nt, Artificial Sequence
  Description of Artificial Sequence: Synthetic oligonucleotide
  Sense strand starting at position 1852 of SEQ ID NO: 588855
cugucaucuuggcaaauug

SEQ ID NO: 894613 - RNA, 19 nt, Artificial Sequence
  Description of Artificial Sequence: Synthetic oligonucleotide
  Antisense strand to SEQ ID NO: 894612
caauuugccaagaugacag

SEQ ID NO: 894614 - RNA, 19 nt, Artificial Sequence
  Description of Artificial Sequence: Synthetic oligonucleotide
  Sense strand starting at position 1963 of SEQ ID NO: 588855
acucgcuuccucuguguau

SEQ ID NO: 894615 - RNA, 19 nt, Artificial Sequence
  Description of Artificial Sequence: Synthetic oligonucleotide
  Antisense strand to SEQ ID NO: 894614
auacacagaggaagcgagu

SEQ ID NO: 894616 - RNA, 19 nt, Artificial Sequence
  Description of Artificial Sequence: Synthetic oligonucleotide
  Sense strand starting at position 1965 of SEQ ID NO: 588855
ucgcuuccucuguguauuu

SEQ ID NO: 894617 - RNA, 19 nt, Artificial Sequence
  Description of Artificial Sequence: Synthetic oligonucleotide
  Antisense strand to SEQ ID NO: 894616
aaauacacagaggaagcga

SEQ ID NO: 894618 - RNA, 19 nt, Artificial Sequence
  Description of Artificial Sequence: Synthetic oligonucleotide
  Sense strand starting at position 2448 of SEQ ID NO: 588855
ggguucagccaugggugua

SEQ ID NO: 894619 - RNA, 19 nt, Artificial Sequence
  Description of Artificial Sequence: Synthetic oligonucleotide
  Antisense strand to SEQ ID NO: 894618
uacacccauggcugaaccc

SEQ ID NO: 894620 - RNA, 19 nt, Artificial Sequence
  Description of Artificial Sequence: Synthetic oligonucleotide
  Sense strand starting at position 2478 of SEQ ID NO: 588855
agaaucggugccuaccaaa

SEQ ID NO: 894621 - RNA, 19 nt, Artificial Sequence
  Description of Artificial Sequence: Synthetic oligonucleotide
  Antisense strand to SEQ ID NO: 894620
uuugguaggcaccgauucu

SEQ ID NO: 894622 - RNA, 19 nt, Artificial Sequence
  Description of Artificial Sequence: Synthetic oligonucleotide
  Sense strand starting at position 2518 of SEQ ID NO: 588855
cuaucagggagaugucauc

SEQ ID NO: 894623 - RNA, 19 nt, Artificial Sequence
  Description of Artificial Sequence: Synthetic oligonucleotide
  Antisense strand to SEQ ID NO: 894622
gaugacaucucccugauag

SEQ ID NO: 894624 - RNA, 19 nt, Artificial Sequence
  Description of Artificial Sequence: Synthetic oligonucleotide
  Sense strand starting at position 2524 of SEQ ID NO: 588855
gggagaugucaucaugugu

SEQ ID NO: 894625 - RNA, 19 nt, Artificial Sequence
  Description of Artificial Sequence: Synthetic oligonucleotide
  Antisense strand to SEQ ID NO: 894624
acacaugaugacaucuccc

SEQ ID NO: 894626 - RNA, 19 nt, Artificial Sequence
  Description of Artificial Sequence: Synthetic oligonucleotide
  Sense strand starting at position 2533 of SEQ ID NO: 588855
caucauguguuccacugua

SEQ ID NO: 894627 - RNA, 19 nt, Artificial Sequence
  Description of Artificial Sequence: Synthetic oligonucleotide
  Antisense strand to SEQ ID NO: 894626
uacaguggaacacaugaug

SEQ ID NO: 894628 - RNA, 19 nt, Artificial Sequence
  Description of Artificial Sequence: Synthetic oligonucleotide
  Sense strand starting at position 2867 of SEQ ID NO: 588855
ucaccugauuucuagaaug

SEQ ID NO: 894629 - RNA, 19 nt, Artificial Sequence
  Description of Artificial Sequence: Synthetic oligonucleotide
  Antisense strand to SEQ ID NO: 894628
cauucuagaaaucagguga

SEQ ID NO: 894630 - RNA, 19 nt, Artificial Sequence
  Description of Artificial Sequence: Synthetic oligonucleotide
  Sense strand starting at position 3447 of SEQ ID NO: 588855
ugcagugugacuuggguua

SEQ ID NO: 894631 - RNA, 19 nt, Artificial Sequence
  Description of Artificial Sequence: Synthetic oligonucleotide
  Antisense strand to SEQ ID NO: 894630
uaacccaagucacacugca

SEQ ID NO: 894632 - RNA, 19 nt, Artificial Sequence
  Description of Artificial Sequence: Synthetic oligonucleotide
  Sense strand starting at position 3503 of SEQ ID NO: 588855
cccgacuugcugugugauc

SEQ ID NO: 894633 - RNA, 19 nt, Artificial Sequence
  Description of Artificial Sequence: Synthetic oligonucleotide
  Antisense strand to SEQ ID NO: 894632
gaucacacagcaagucggg

SEQ ID NO: 894634 - RNA, 19 nt, Artificial Sequence
  Description of Artificial Sequence: Synthetic oligonucleotide
  Sense strand starting at position 3510 of SEQ ID NO: 588855
ugcugugugaucucgcaca

SEQ ID NO: 894635 - RNA, 19 nt, Artificial Sequence
  Description of Artificial Sequence: Synthetic oligonucleotide
  Antisense strand to SEQ ID NO: 894634
ugugcgagaucacacagca

SEQ ID NO: 894636 - RNA, 19 nt, Artificial Sequence
  Description of Artificial Sequence: Synthetic oligonucleotide
  Sense strand starting at position 3515 of SEQ ID NO: 588855
ugugaucucgcacaagaca

SEQ ID NO: 894637 - RNA, 19 nt, Artificial Sequence
  Description of Artificial Sequence: Synthetic oligonucleotide
  Antisense strand to SEQ ID NO: 894636
ugucuugugcgagaucaca

SEQ ID NO: 894638 - RNA, 19 nt, Artificial Sequence
  Description of Artificial Sequence: Synthetic oligonucleotide
  Sense strand starting at position 3668 of SEQ ID NO: 588855
ggcugugguugcugagaga

SEQ ID NO: 894639 - RNA, 19 nt, Artificial Sequence
  Description of Artificial Sequence: Synthetic oligonucleotide
  Antisense strand to SEQ ID NO: 894638
ucucucagcaaccacagcc

SEQ ID NO: 894640 - RNA, 19 nt, Artificial Sequence
  Description of Artificial Sequence: Synthetic oligonucleotide
  Sense strand starting at position 3784 of SEQ ID NO: 588855
gcuguguugcugcggcaga

SEQ ID NO: 894641 - RNA, 19 nt, Artificial Sequence
  Description of Artificial Sequence: Synthetic oligonucleotide
  Antisense strand to SEQ ID NO: 894640
ucugccgcagcaacacagc

SEQ ID NO: 894642 - RNA, 19 nt, Artificial Sequence
  Description of Artificial Sequence: Synthetic oligonucleotide
  Sense strand starting at position 117 of SEQ ID NO: 588856
aaacgcagugcugagauau

SEQ ID NO: 894643 - RNA, 19 nt, Artificial Sequence
  Description of Artificial Sequence: Synthetic oligonucleotide
  Antisense strand to SEQ ID NO: 894642
auaucucagcacugcguuu

SEQ ID NO: 894644 - RNA, 19 nt, Artificial Sequence
  Description of Artificial Sequence: Synthetic oligonucleotide
  Sense strand starting at position 123 of SEQ ID NO: 588856
agugcugagauaugcuaua

SEQ ID NO: 894645 - RNA, 19 nt, Artificial Sequence
  Description of Artificial Sequence: Synthetic oligonucleotide
  Antisense strand to SEQ ID NO: 894644
uauagcauaucucagcacu

SEQ ID NO: 894646 - RNA, 19 nt, Artificial Sequence
  Description of Artificial Sequence: Synthetic oligonucleotide
  Sense strand starting at position 186 of SEQ ID NO: 588856
gaaguccugccacagaauu

SEQ ID NO: 894647 - RNA, 19 nt, Artificial Sequence
  Description of Artificial Sequence: Synthetic oligonucleotide
  Antisense strand to SEQ ID NO: 894646
aauucuguggcaggacuuc

SEQ ID NO: 894648 - RNA, 19 nt, Artificial Sequence
  Description of Artificial Sequence: Synthetic oligonucleotide
  Sense strand starting at position 197 of SEQ ID NO: 588856
acagaauuccugggcagca

SEQ ID NO: 894649 - RNA, 19 nt, Artificial Sequence
  Description of Artificial Sequence: Synthetic oligonucleotide
  Antisense strand to SEQ ID NO: 894648
ugcugcccaggaauucugu

SEQ ID NO: 894650 - RNA, 19 nt, Artificial Sequence
  Description of Artificial Sequence: Synthetic oligonucleotide
  Sense strand starting at position 243 of SEQ ID NO: 588856
gaacuugcaguauaaaguu

SEQ ID NO: 894651 - RNA, 19 nt, Artificial Sequence
  Description of Artificial Sequence: Synthetic oligonucleotide
  Antisense strand to SEQ ID NO: 894650
aacuuuauacugcaaguuc

SEQ ID NO: 894652 - RNA, 19 nt, Artificial Sequence
  Description of Artificial Sequence: Synthetic oligonucleotide
  Sense strand starting at position 307 of SEQ ID NO: 588856
cauaaacaugucuggcaga

SEQ ID NO: 894653 - RNA, 19 nt, Artificial Sequence
  Description of Artificial Sequence: Synthetic oligonucleotide
  Antisense strand to SEQ ID NO: 894652
ucugccagacauguuuaug

SEQ ID NO: 894654 - RNA, 19 nt, Artificial Sequence
  Description of Artificial Sequence: Synthetic oligonucleotide
  Sense strand starting at position 458 of SEQ ID NO: 588856
gugugaugaagaugaugca

SEQ ID NO: 894655 - RNA, 19 nt, Artificial Sequence
  Description of Artificial Sequence: Synthetic oligonucleotide
  Antisense strand to SEQ ID NO: 894654
ugcaucaucuucaucacac

SEQ ID NO: 894656 - RNA, 19 nt, Artificial Sequence
  Description of Artificial Sequence: Synthetic oligonucleotide
  Sense strand starting at position 499 of SEQ ID NO: 588856
acgggaauuacaugcugca

SEQ ID NO: 894657 - RNA, 19 nt, Artificial Sequence
  Description of Artificial Sequence: Synthetic oligonucleotide
  Antisense strand to SEQ ID NO: 894656
ugcagcauguaauucccgu

SEQ ID NO: 894658 - RNA, 19 nt, Artificial Sequence
  Description of Artificial Sequence: Synthetic oligonucleotide
  Sense strand starting at position 628 of SEQ ID NO: 588856
ccgagaaauuaugagaaag

SEQ ID NO: 894659 - RNA, 19 nt, Artificial Sequence
  Description of Artificial Sequence: Synthetic oligonucleotide
  Antisense strand to SEQ ID NO: 894658
cuuucucauaauuucucgg

SEQ ID NO: 894660 - RNA, 19 nt, Artificial Sequence
  Description of Artificial Sequence: Synthetic oligonucleotide
  Sense strand starting at position 630 of SEQ ID NO: 588856
gagaaauuaugagaaagcu

SEQ ID NO: 894661 - RNA, 19 nt, Artificial Sequence
  Description of Artificial Sequence: Synthetic oligonucleotide
  Antisense strand to SEQ ID NO: 894660
agcuuucucauaauuucuc

SEQ ID NO: 894662 - RNA, 19 nt, Artificial Sequence
  Description of Artificial Sequence: Synthetic oligonucleotide
  Sense strand starting at position 639 of SEQ ID NO: 588856
ugagaaagcucguuaauua

SEQ ID NO: 894663 - RNA, 19 nt, Artificial Sequence
  Description of Artificial Sequence: Synthetic oligonucleotide
  Antisense strand to SEQ ID NO: 894662
uaauuaacgagcuuucuca

SEQ ID NO: 894664 - RNA, 19 nt, Artificial Sequence
  Description of Artificial Sequence: Synthetic oligonucleotide
  Sense strand starting at position 640 of SEQ ID NO: 588856
gagaaagcucguuaauuaa

SEQ ID NO: 894665 - RNA, 19 nt, Artificial Sequence
  Description of Artificial Sequence: Synthetic oligonucleotide
  Antisense strand to SEQ ID NO: 894664
uuaauuaacgagcuuucuc

SEQ ID NO: 894666 - RNA, 19 nt, Artificial Sequence
  Description of Artificial Sequence: Synthetic oligonucleotide
  Sense strand starting at position 650 of SEQ ID NO: 588856
guuaauuaaggcuaaccua

SEQ ID NO: 894667 - RNA, 19 nt, Artificial Sequence
  Description of Artificial Sequence: Synthetic oligonucleotide
  Antisense strand to SEQ ID NO: 894666
uagguuagccuuaauuaac

SEQ ID NO: 894668 - RNA, 19 nt, Artificial Sequence
  Description of Artificial Sequence: Synthetic oligonucleotide
  Sense strand starting at position 699 of SEQ ID NO: 588856
aacauuucgcgguaaguca

SEQ ID NO: 894669 - RNA, 19 nt, Artificial Sequence
  Description of Artificial Sequence: Synthetic oligonucleotide
  Antisense strand to SEQ ID NO: 894668
ugacuuaccgcgaaauguu

SEQ ID NO: 894670 - RNA, 19 nt, Artificial Sequence
  Description of Artificial Sequence: Synthetic oligonucleotide
  Sense strand starting at position 799 of SEQ ID NO: 588856
uaggucacagcguaaguau

SEQ ID NO: 894671 - RNA, 19 nt, Artificial Sequence
  Description of Artificial Sequence: Synthetic oligonucleotide
  Antisense strand to SEQ ID NO: 894670
auacuuacgcugugaccua

SEQ ID NO: 894672 - RNA, 19 nt, Artificial Sequence
  Description of Artificial Sequence: Synthetic oligonucleotide
  Sense strand starting at position 841 of SEQ ID NO: 588856
auucuuugaguccaaugau

SEQ ID NO: 894673 - RNA, 19 nt, Artificial Sequence
  Description of Artificial Sequence: Synthetic oligonucleotide
  Antisense strand to SEQ ID NO: 894672
aucauuggacucaaagaau

SEQ ID NO: 894674 - RNA, 19 nt, Artificial Sequence
  Description of Artificial Sequence: Synthetic oligonucleotide
  Sense strand starting at position 1071 of SEQ ID NO: 588856
gaccgaguucuccagguaa

SEQ ID NO: 894675 - RNA, 19 nt, Artificial Sequence
  Description of Artificial Sequence: Synthetic oligonucleotide
  Antisense strand to SEQ ID NO: 894674
uuaccuggagaacucgguc

SEQ ID NO: 894676 - RNA, 19 nt, Artificial Sequence
  Description of Artificial Sequence: Synthetic oligonucleotide
  Sense strand starting at position 2250 of SEQ ID NO: 588856
ccuucuaucugggcuaaug

SEQ ID NO: 894677 - RNA, 19 nt, Artificial Sequence
  Description of Artificial Sequence: Synthetic oligonucleotide
  Antisense strand to SEQ ID NO: 894676
cauuagcccagauagaagg

SEQ ID NO: 894678 - RNA, 19 nt, Artificial Sequence
  Description of Artificial Sequence: Synthetic oligonucleotide
  Sense strand starting at position 2252 of SEQ ID NO: 588856
uucuaucugggcuaaugaa

SEQ ID NO: 894679 - RNA, 19 nt, Artificial Sequence
  Description of Artificial Sequence: Synthetic oligonucleotide
  Antisense strand to SEQ ID NO: 894678
uucauuagcccagauagaa

SEQ ID NO: 894680 - RNA, 19 nt, Artificial Sequence
  Description of Artificial Sequence: Synthetic oligonucleotide
  Sense strand starting at position 2267 of SEQ ID NO: 588856
ugaauaagucauugcuccu

SEQ ID NO: 894681 - RNA, 19 nt, Artificial Sequence
  Description of Artificial Sequence: Synthetic oligonucleotide
  Antisense strand to SEQ ID NO: 894680
aggagcaaugacuuauuca

SEQ ID NO: 894682 - RNA, 19 nt, Artificial Sequence
  Description of Artificial Sequence: Synthetic oligonucleotide
  Sense strand starting at position 2273 of SEQ ID NO: 588856
agucauugcuccuucuaug

SEQ ID NO: 894683 - RNA, 19 nt, Artificial Sequence
  Description of Artificial Sequence: Synthetic oligonucleotide
  Antisense strand to SEQ ID NO: 894682
cauagaaggagcaaugacu

SEQ ID NO: 894684 - RNA, 19 nt, Artificial Sequence
  Description of Artificial Sequence: Synthetic oligonucleotide
  Sense strand starting at position 2489 of SEQ ID NO: 588856
ucaauccucugguuacaga

SEQ ID NO: 894685 - RNA, 19 nt, Artificial Sequence
  Description of Artificial Sequence: Synthetic oligonucleotide
  Antisense strand to SEQ ID NO: 894684
ucuguaaccagaggauuga

SEQ ID NO: 894686 - RNA, 19 nt, Artificial Sequence
  Description of Artificial Sequence: Synthetic oligonucleotide
  Sense strand starting at position 2595 of SEQ ID NO: 588856
gcaugauacuaaguuauau

SEQ ID NO: 894687 - RNA, 19 nt, Artificial Sequence
  Description of Artificial Sequence: Synthetic oligonucleotide
  Antisense strand to SEQ ID NO: 894686
auauaacuuaguaucaugc

SEQ ID NO: 894688 - RNA, 19 nt, Artificial Sequence
  Description of Artificial Sequence: Synthetic oligonucleotide
  Sense strand starting at position 2637 of SEQ ID NO: 588856
ggagguauggcuggcuaaa

SEQ ID NO: 894689 - RNA, 19 nt, Artificial Sequence
  Description of Artificial Sequence: Synthetic oligonucleotide
  Antisense strand to SEQ ID NO: 894688
uuuagccagccauaccucc

SEQ ID NO: 894690 - RNA, 19 nt, Artificial Sequence
  Description of Artificial Sequence: Synthetic oligonucleotide
  Sense strand starting at position 2639 of SEQ ID NO: 588856
agguauggcuggcuaaagu

SEQ ID NO: 894691 - RNA, 19 nt, Artificial Sequence
  Description of Artificial Sequence: Synthetic oligonucleotide
  Antisense strand to SEQ ID NO: 894690
acuuuagccagccauaccu

SEQ ID NO: 894692 - RNA, 19 nt, Artificial Sequence
  Description of Artificial Sequence: Synthetic oligonucleotide
  Sense strand starting at position 2785 of SEQ ID NO: 588856
ggaccaaagugauaagaag

SEQ ID NO: 894693 - RNA, 19 nt, Artificial Sequence
  Description of Artificial Sequence: Synthetic oligonucleotide
  Antisense strand to SEQ ID NO: 894692
cuucuuaucacuuuggucc

SEQ ID NO: 894694 - RNA, 19 nt, Artificial Sequence
  Description of Artificial Sequence: Synthetic oligonucleotide
  Sense strand starting at position 3002 of SEQ ID NO: 588856
cagucaugguccuucuuga

SEQ ID NO: 894695 - RNA, 19 nt, Artificial Sequence
  Description of Artificial Sequence: Synthetic oligonucleotide
  Antisense strand to SEQ ID NO: 894694
ucaagaaggaccaugacug

SEQ ID NO: 894696 - RNA, 19 nt, Artificial Sequence
  Description of Artificial Sequence: Synthetic oligonucleotide
  Sense strand starting at position 3124 of SEQ ID NO: 588856
aggagcuauucuccagugu

SEQ ID NO: 894697 - RNA, 19 nt, Artificial Sequence
  Description of Artificial Sequence: Synthetic oligonucleotide
  Antisense strand to SEQ ID NO: 894696
acacuggagaauagcuccu

SEQ ID NO: 894698 - RNA, 19 nt, Artificial Sequence
  Description of Artificial Sequence: Synthetic oligonucleotide
  Sense strand starting at position 3125 of SEQ ID NO: 588856
ggagcuauucuccagugug

SEQ ID NO: 894699 - RNA, 19 nt, Artificial Sequence
  Description of Artificial Sequence: Synthetic oligonucleotide
  Antisense strand to SEQ ID NO: 894698
cacacuggagaauagcucc

SEQ ID NO: 894700 - RNA, 19 nt, Artificial Sequence
  Description of Artificial Sequence: Synthetic oligonucleotide
  Sense strand starting at position 3278 of SEQ ID NO: 588856
agcaauaugagauguauga

SEQ ID NO: 894701 - RNA, 19 nt, Artificial Sequence
  Description of Artificial Sequence: Synthetic oligonucleotide
  Antisense strand to SEQ ID NO: 894700
ucauacaucucauauugcu

SEQ ID NO: 894702 - RNA, 19 nt, Artificial Sequence
  Description of Artificial Sequence: Synthetic oligonucleotide
  Sense strand starting at position 3287 of SEQ ID NO: 588856
agauguaugagaugccgca

SEQ ID NO: 894703 - RNA, 19 nt, Artificial Sequence
  Description of Artificial Sequence: Synthetic oligonucleotide
  Antisense strand to SEQ ID NO: 894702
ugcggcaucucauacaucu

SEQ ID NO: 894704 - RNA, 19 nt, Artificial Sequence
  Description of Artificial Sequence: Synthetic oligonucleotide
  Sense strand starting at position 3325 of SEQ ID NO: 588856
cgcaauauucuagaaagcu

SEQ ID NO: 894705 - RNA, 19 nt, Artificial Sequence
  Description of Artificial Sequence: Synthetic oligonucleotide
  Antisense strand to SEQ ID NO: 894704
agcuuucuagaauauugcg

SEQ ID NO: 894706 - RNA, 19 nt, Artificial Sequence
  Description of Artificial Sequence: Synthetic oligonucleotide
  Sense strand starting at position 3414 of SEQ ID NO: 588856
uguagcaucagugagaaac

SEQ ID NO: 894707 - RNA, 19 nt, Artificial Sequence
  Description of Artificial Sequence: Synthetic oligonucleotide
  Antisense strand to SEQ ID NO: 894706
guuucucacugaugcuaca

SEQ ID NO: 894708 - RNA, 19 nt, Artificial Sequence
  Description of Artificial Sequence: Synthetic oligonucleotide
  Sense strand starting at position 3599 of SEQ ID NO: 588856
aagacagggcuuuguugaa

SEQ ID NO: 894709 - RNA, 19 nt, Artificial Sequence
  Description of Artificial Sequence: Synthetic oligonucleotide
  Antisense strand to SEQ ID NO: 894708
uucaacaaagcccugucuu

SEQ ID NO: 894710 - RNA, 19 nt, Artificial Sequence
  Description of Artificial Sequence: Synthetic oligonucleotide
  Sense strand starting at position 3634 of SEQ ID NO: 588856
gcaauugaucuacaaagug

SEQ ID NO: 894711 - RNA, 19 nt, Artificial Sequence
  Description of Artificial Sequence: Synthetic oligonucleotide
  Antisense strand to SEQ ID NO: 894710
cacuuuguagaucaauugc

SEQ ID NO: 894712 - RNA, 19 nt, Artificial Sequence
  Description of Artificial Sequence: Synthetic oligonucleotide
  Sense strand starting at position 3674 of SEQ ID NO: 588856
agcucugcucucuaacagu

SEQ ID NO: 894713 - RNA, 19 nt, Artificial Sequence
  Description of Artificial Sequence: Synthetic oligonucleotide
  Antisense strand to SEQ ID NO: 894712
acuguuagagagcagagcu

SEQ ID NO: 894714 - RNA, 19 nt, Artificial Sequence
  Description of Artificial Sequence: Synthetic oligonucleotide
  Sense strand starting at position 3687 of SEQ ID NO: 588856
aacagugaaaggugugaaa

SEQ ID NO: 894715 - RNA, 19 nt, Artificial Sequence
  Description of Artificial Sequence: Synthetic oligonucleotide
  Antisense strand to SEQ ID NO: 894714
uuucacaccuuucacuguu

SEQ ID NO: 894716 - RNA, 19 nt, Artificial Sequence
  Description of Artificial Sequence: Synthetic oligonucleotide
  Sense strand starting at position 3689 of SEQ ID NO: 588856
cagugaaaggugugaaaug

SEQ ID NO: 894717 - RNA, 19 nt, Artificial Sequence
  Description of Artificial Sequence: Synthetic oligonucleotide
  Antisense strand to SEQ ID NO: 894716
cauuucacaccuuucacug

SEQ ID NO: 894718 - RNA, 19 nt, Artificial Sequence
  Description of Artificial Sequence: Synthetic oligonucleotide
  Sense strand starting at position 3714 of SEQ ID NO: 588856
ugaauugccuccuuggaac

SEQ ID NO: 894719 - RNA, 19 nt, Artificial Sequence
  Description of Artificial Sequence: Synthetic oligonucleotide
  Antisense strand to SEQ ID NO: 894718
guuccaaggaggcaauuca

SEQ ID NO: 894720 - RNA, 19 nt, Artificial Sequence
  Description of Artificial Sequence: Synthetic oligonucleotide
  Sense strand starting at position 3897 of SEQ ID NO: 588856
gauuuagucgcccaggcau

SEQ ID NO: 894721 - RNA, 19 nt, Artificial Sequence
  Description of Artificial Sequence: Synthetic oligonucleotide
  Antisense strand to SEQ ID NO: 894720
augccugggcgacuaaauc

SEQ ID NO: 894722 - RNA, 19 nt, Artificial Sequence
  Description of Artificial Sequence: Synthetic oligonucleotide
  Sense strand starting at position 109 of SEQ ID NO: 588857
cgaggcugcucccgggaaa

SEQ ID NO: 894723 - RNA, 19 nt, Artificial Sequence
  Description of Artificial Sequence: Synthetic oligonucleotide
  Antisense strand to SEQ ID NO: 894722
uuucccgggagcagccucg

SEQ ID NO: 894724 - RNA, 19 nt, Artificial Sequence
  Description of Artificial Sequence: Synthetic oligonucleotide
  Sense strand starting at position 361 of SEQ ID NO: 588857
agaucagguucuucccaga

SEQ ID NO: 894725 - RNA, 19 nt, Artificial Sequence
  Description of Artificial Sequence: Synthetic oligonucleotide
  Antisense strand to SEQ ID NO: 894724
ucugggaagaaccugaucu

SEQ ID NO: 894726 - RNA, 19 nt, Artificial Sequence
  Description of Artificial Sequence: Synthetic oligonucleotide
  Sense strand starting at position 364 of SEQ ID NO: 588857
ucagguucuucccagaugu

SEQ ID NO: 894727 - RNA, 19 nt, Artificial Sequence
  Description of Artificial Sequence: Synthetic oligonucleotide
  Antisense strand to SEQ ID NO: 894726
acaucugggaagaaccuga

SEQ ID NO: 894728 - RNA, 19 nt, Artificial Sequence
  Description of Artificial Sequence: Synthetic oligonucleotide
  Sense strand starting at position 368 of SEQ ID NO: 588857
guucuucccagauguggga

SEQ ID NO: 894729 - RNA, 19 nt, Artificial Sequence
  Description of Artificial Sequence: Synthetic oligonucleotide
  Antisense strand to SEQ ID NO: 894728
ucccacaucugggaagaac

SEQ ID NO: 894730 - RNA, 19 nt, Artificial Sequence
  Description of Artificial Sequence: Synthetic oligonucleotide
  Sense strand starting at position 372 of SEQ ID NO: 588857
uucccagaugugggagaua

SEQ ID NO: 894731 - RNA, 19 nt, Artificial Sequence
  Description of Artificial Sequence: Synthetic oligonucleotide
  Antisense strand to SEQ ID NO: 894730
uaucucccacaucugggaa

SEQ ID NO: 894732 - RNA, 19 nt, Artificial Sequence
  Description of Artificial Sequence: Synthetic oligonucleotide
  Sense strand starting at position 385 of SEQ ID NO: 588857
gagauagugugguugccau

SEQ ID NO: 894733 - RNA, 19 nt, Artificial Sequence
  Description of Artificial Sequence: Synthetic oligonucleotide
  Antisense strand to SEQ ID NO: 894732
auggcaaccacacuaucuc

SEQ ID NO: 894734 - RNA, 19 nt, Artificial Sequence
  Description of Artificial Sequence: Synthetic oligonucleotide
  Sense strand starting at position 526 of SEQ ID NO: 588857
agugaauucucgcugggau

SEQ ID NO: 894735 - RNA, 19 nt, Artificial Sequence
  Description of Artificial Sequence: Synthetic oligonucleotide
  Antisense strand to SEQ ID NO: 894734
aucccagcgagaauucacu

SEQ ID NO: 894736 - RNA, 19 nt, Artificial Sequence
  Description of Artificial Sequence: Synthetic oligonucleotide
  Sense strand starting at position 527 of SEQ ID NO: 588857
gugaauucucgcugggaug

SEQ ID NO: 894737 - RNA, 19 nt, Artificial Sequence
  Description of Artificial Sequence: Synthetic oligonucleotide
  Antisense strand to SEQ ID NO: 894736
caucccagcgagaauucac

SEQ ID NO: 894738 - RNA, 19 nt, Artificial Sequence
  Description of Artificial Sequence: Synthetic oligonucleotide
  Sense strand starting at position 529 of SEQ ID NO: 588857
gaauucucgcugggaugcu

SEQ ID NO: 894739 - RNA, 19 nt, Artificial Sequence
  Description of Artificial Sequence: Synthetic oligonucleotide
  Antisense strand to SEQ ID NO: 894738
agcaucccagcgagaauuc

SEQ ID NO: 894740 - RNA, 19 nt, Artificial Sequence
  Description of Artificial Sequence: Synthetic oligonucleotide
  Sense strand starting at position 545 of SEQ ID NO: 588857
gcuaauccucagcgggaca

SEQ ID NO: 894741 - RNA, 19 nt, Artificial Sequence
  Description of Artificial Sequence: Synthetic oligonucleotide
  Antisense strand to SEQ ID NO: 894740
ugucccgcugaggauuagc

SEQ ID NO: 894742 - RNA, 19 nt, Artificial Sequence
  Description of Artificial Sequence: Synthetic oligonucleotide
  Sense strand starting at position 769 of SEQ ID NO: 588857
ucccauaaccacgguguua

SEQ ID NO: 894743 - RNA, 19 nt, Artificial Sequence
  Description of Artificial Sequence: Synthetic oligonucleotide
  Antisense strand to SEQ ID NO: 894742
uaacaccgugguuauggga

SEQ ID NO: 894744 - RNA, 19 nt, Artificial Sequence
  Description of Artificial Sequence: Synthetic oligonucleotide
  Sense strand starting at position 926 of SEQ ID NO: 588857
acagaauccucgcaucugu

SEQ ID NO: 894745 - RNA, 19 nt, Artificial Sequence
  Description of Artificial Sequence: Synthetic oligonucleotide
  Antisense strand to SEQ ID NO: 894744
acagaugcgaggauucugu

SEQ ID NO: 894746 - RNA, 19 nt, Artificial Sequence
  Description of Artificial Sequence: Synthetic oligonucleotide
  Sense strand starting at position 1059 of SEQ ID NO: 588857
uaggucuucccaugauguu

SEQ ID NO: 894747 - RNA, 19 nt, Artificial Sequence
  Description of Artificial Sequence: Synthetic oligonucleotide
  Antisense strand to SEQ ID NO: 894746
aacaucaugggaagaccua

SEQ ID NO: 894748 - RNA, 19 nt, Artificial Sequence
  Description of Artificial Sequence: Synthetic oligonucleotide
  Sense strand starting at position 1072 of SEQ ID NO: 588857
gauguugaguugccuguua

SEQ ID NO: 894749 - RNA, 19 nt, Artificial Sequence
  Description of Artificial Sequence: Synthetic oligonucleotide
  Antisense strand to SEQ ID NO: 894748
uaacaggcaacucaacauc

SEQ ID NO: 894750 - RNA, 19 nt, Artificial Sequence
  Description of Artificial Sequence: Synthetic oligonucleotide
  Sense strand starting at position 1074 of SEQ ID NO: 588857
uguugaguugccuguuacu

SEQ ID NO: 894751 - RNA, 19 nt, Artificial Sequence
  Description of Artificial Sequence: Synthetic oligonucleotide
  Antisense strand to SEQ ID NO: 894750
aguaacaggcaacucaaca

SEQ ID NO: 894752 - RNA, 19 nt, Artificial Sequence
  Description of Artificial Sequence: Synthetic oligonucleotide
  Sense strand starting at position 1251 of SEQ ID NO: 588857
ugacuauccaaacguguga

SEQ ID NO: 894753 - RNA, 19 nt, Artificial Sequence
  Description of Artificial Sequence: Synthetic oligonucleotide
  Antisense strand to SEQ ID NO: 894752
ucacacguuuggauaguca

SEQ ID NO: 894754 - RNA, 19 nt, Artificial Sequence
  Description of Artificial Sequence: Synthetic oligonucleotide
  Sense strand starting at position 1255 of SEQ ID NO: 588857
uauccaaacgugugaaaug

SEQ ID NO: 894755 - RNA, 19 nt, Artificial Sequence
  Description of Artificial Sequence: Synthetic oligonucleotide
  Antisense strand to SEQ ID NO: 894754
cauuucacacguuuggaua

SEQ ID NO: 894756 - RNA, 19 nt, Artificial Sequence
  Description of Artificial Sequence: Synthetic oligonucleotide
  Sense strand starting at position 1266 of SEQ ID NO: 588857
gugaaauggccaugaggga

SEQ ID NO: 894757 - RNA, 19 nt, Artificial Sequence
  Description of Artificial Sequence: Synthetic oligonucleotide
  Antisense strand to SEQ ID NO: 894756
ucccucauggccauuucac

SEQ ID NO: 894758 - RNA, 19 nt, Artificial Sequence
  Description of Artificial Sequence: Synthetic oligonucleotide
  Sense strand starting at position 1401 of SEQ ID NO: 588857
gccagucacugcuggacaa

SEQ ID NO: 894759 - RNA, 19 nt, Artificial Sequence
  Description of Artificial Sequence: Synthetic oligonucleotide
  Antisense strand to SEQ ID NO: 894758
uuguccagcagugacuggc

SEQ ID NO: 894760 - RNA, 19 nt, Artificial Sequence
  Description of Artificial Sequence: Synthetic oligonucleotide
  Sense strand starting at position 2339 of SEQ ID NO: 588857
gaacacaugugcucuuaga

SEQ ID NO: 894761 - RNA, 19 nt, Artificial Sequence
  Description of Artificial Sequence: Synthetic oligonucleotide
  Antisense strand to SEQ ID NO: 894760
ucuaagagcacauguguuc

SEQ ID NO: 894762 - RNA, 19 nt, Artificial Sequence
  Description of Artificial Sequence: Synthetic oligonucleotide
  Sense strand starting at position 2363 of SEQ ID NO: 588857
gcagguacacgccauaauu

SEQ ID NO: 894763 - RNA, 19 nt, Artificial Sequence
  Description of Artificial Sequence: Synthetic oligonucleotide
  Antisense strand to SEQ ID NO: 894762
aauuauggcguguaccugc

SEQ ID NO: 894764 - RNA, 19 nt, Artificial Sequence
  Description of Artificial Sequence: Synthetic oligonucleotide
  Sense strand starting at position 2446 of SEQ ID NO: 588857
ccuacaaggugaugaaauu

SEQ ID NO: 894765 - RNA, 19 nt, Artificial Sequence
  Description of Artificial Sequence: Synthetic oligonucleotide
  Antisense strand to SEQ ID NO: 894764
aauuucaucaccuuguagg

SEQ ID NO: 894766 - RNA, 19 nt, Artificial Sequence
  Description of Artificial Sequence: Synthetic oligonucleotide
  Sense strand starting at position 2831 of SEQ ID NO: 588857
ucccaaagucacuaaguga

SEQ ID NO: 894767 - RNA, 19 nt, Artificial Sequence
  Description of Artificial Sequence: Synthetic oligonucleotide
  Antisense strand to SEQ ID NO: 894766
ucacuuagugacuuuggga

SEQ ID NO: 894768 - RNA, 19 nt, Artificial Sequence
  Description of Artificial Sequence: Synthetic oligonucleotide
  Sense strand starting at position 2838 of SEQ ID NO: 588857
gucacuaagugacugagua

SEQ ID NO: 894769 - RNA, 19 nt, Artificial Sequence
  Description of Artificial Sequence: Synthetic oligonucleotide
  Antisense strand to SEQ ID NO: 894768
uacucagucacuuagugac

SEQ ID NO: 894770 - RNA, 19 nt, Artificial Sequence
  Description of Artificial Sequence: Synthetic oligonucleotide
  Sense strand starting at position 2842 of SEQ ID NO: 588857
cuaagugacugaguaguca

SEQ ID NO: 894771 - RNA, 19 nt, Artificial Sequence
  Description of Artificial Sequence: Synthetic oligonucleotide
  Antisense strand to SEQ ID NO: 894770
ugacuacucagucacuuag

SEQ ID NO: 894772 - RNA, 19 nt, Artificial Sequence
  Description of Artificial Sequence: Synthetic oligonucleotide
  Sense strand starting at position 2846 of SEQ ID NO: 588857
gugacugaguagucaccaa

SEQ ID NO: 894773 - RNA, 19 nt, Artificial Sequence
  Description of Artificial Sequence: Synthetic oligonucleotide
  Antisense strand to SEQ ID NO: 894772
uuggugacuacucagucac

SEQ ID NO: 894774 - RNA, 19 nt, Artificial Sequence
  Description of Artificial Sequence: Synthetic oligonucleotide
  Sense strand starting at position 2850 of SEQ ID NO: 588857
cugaguagucaccaauaug

SEQ ID NO: 894775 - RNA, 19 nt, Artificial Sequence
  Description of Artificial Sequence: Synthetic oligonucleotide
  Antisense strand to SEQ ID NO: 894774
cauauuggugacuacucag

SEQ ID NO: 894776 - RNA, 19 nt, Artificial Sequence
  Description of Artificial Sequence: Synthetic oligonucleotide
  Sense strand starting at position 3014 of SEQ ID NO: 588857
uggguuuccucccguuacu

SEQ ID NO: 894777 - RNA, 19 nt, Artificial Sequence
  Description of Artificial Sequence: Synthetic oligonucleotide
  Antisense strand to SEQ ID NO: 894776
aguaacgggaggaaaccca

SEQ ID NO: 894778 - RNA, 19 nt, Artificial Sequence
  Description of Artificial Sequence: Synthetic oligonucleotide
  Sense strand starting at position 3295 of SEQ ID NO: 588857
ggagcacagaugugugaua

SEQ ID NO: 894779 - RNA, 19 nt, Artificial Sequence
  Description of Artificial Sequence: Synthetic oligonucleotide
  Antisense strand to SEQ ID NO: 894778
uaucacacaucugugcucc

SEQ ID NO: 894780 - RNA, 19 nt, Artificial Sequence
  Description of Artificial Sequence: Synthetic oligonucleotide
  Sense strand starting at position 3296 of SEQ ID NO: 588857
gagcacagaugugugauaa

SEQ ID NO: 894781 - RNA, 19 nt, Artificial Sequence
  Description of Artificial Sequence: Synthetic oligonucleotide
  Antisense strand to SEQ ID NO: 894780
uuaucacacaucugugcuc

SEQ ID NO: 894782 - RNA, 19 nt, Artificial Sequence
  Description of Artificial Sequence: Synthetic oligonucleotide
  Sense strand starting at position 3297 of SEQ ID NO: 588857
agcacagaugugugauaac

SEQ ID NO: 894783 - RNA, 19 nt, Artificial Sequence
  Description of Artificial Sequence: Synthetic oligonucleotide
  Antisense strand to SEQ ID NO: 894782
guuaucacacaucugugcu

SEQ ID NO: 894784 - RNA, 19 nt, Artificial Sequence
  Description of Artificial Sequence: Synthetic oligonucleotide
  Sense strand starting at position 3300 of SEQ ID NO: 588857
acagaugugugauaaccuu

SEQ ID NO: 894785 - RNA, 19 nt, Artificial Sequence
  Description of Artificial Sequence: Synthetic oligonucleotide
  Antisense strand to SEQ ID NO: 894784
aagguuaucacacaucugu

SEQ ID NO: 894786 - RNA, 19 nt, Artificial Sequence
  Description of Artificial Sequence: Synthetic oligonucleotide
  Sense strand starting at position 3306 of SEQ ID NO: 588857
gugugauaaccuugaaacc

SEQ ID NO: 894787 - RNA, 19 nt, Artificial Sequence
  Description of Artificial Sequence: Synthetic oligonucleotide
  Antisense strand to SEQ ID NO: 894786
gguuucaagguuaucacac

SEQ ID NO: 894788 - RNA, 19 nt, Artificial Sequence
  Description of Artificial Sequence: Synthetic oligonucleotide
  Sense strand starting at position 3432 of SEQ ID NO: 588857
gcugucuaccucuagguuu

SEQ ID NO: 894789 - RNA, 19 nt, Artificial Sequence
  Description of Artificial Sequence: Synthetic oligonucleotide
  Antisense strand to SEQ ID NO: 894788
aaaccuagagguagacagc

SEQ ID NO: 894790 - RNA, 19 nt, Artificial Sequence
  Description of Artificial Sequence: Synthetic oligonucleotide
  Sense strand starting at position 3843 of SEQ ID NO: 588857
cccaguuucugucaccuau

SEQ ID NO: 894791 - RNA, 19 nt, Artificial Sequence
  Description of Artificial Sequence: Synthetic oligonucleotide
  Antisense strand to SEQ ID NO: 894790
auaggugacagaaacuggg

SEQ ID NO: 894792 - RNA, 19 nt, Artificial Sequence
  Description of Artificial Sequence: Synthetic oligonucleotide
  Sense strand starting at position 3958 of SEQ ID NO: 588857
agucaauggcucuaacauu

SEQ ID NO: 894793 - RNA, 19 nt, Artificial Sequence
  Description of Artificial Sequence: Synthetic oligonucleotide
  Antisense strand to SEQ ID NO: 894792
aauguuagagccauugacu

SEQ ID NO: 894794 - RNA, 19 nt, Artificial Sequence
  Description of Artificial Sequence: Synthetic oligonucleotide
  Sense strand starting at position 3975 of SEQ ID NO: 588857
uuaaaucaccugggagcuu

SEQ ID NO: 894795 - RNA, 19 nt, Artificial Sequence
  Description of Artificial Sequence: Synthetic oligonucleotide
  Antisense strand to SEQ ID NO: 894794
aagcucccaggugauuuaa

SEQ ID NO: 894796 - RNA, 19 nt, Artificial Sequence
  Description of Artificial Sequence: Synthetic oligonucleotide
  Sense strand starting at position 211 of SEQ ID NO: 588858
agggcagccgcgagagauu

SEQ ID NO: 894797 - RNA, 19 nt, Artificial Sequence
  Description of Artificial Sequence: Synthetic oligonucleotide
  Antisense strand to SEQ ID NO: 894796
aaucucucgcggcugcccu

SEQ ID NO: 894798 - RNA, 19 nt, Artificial Sequence
  Description of Artificial Sequence: Synthetic oligonucleotide
  Sense strand starting at position 220 of SEQ ID NO: 588858
gcgagagauuuacauauac

SEQ ID NO: 894799 - RNA, 19 nt, Artificial Sequence
  Description of Artificial Sequence: Synthetic oligonucleotide
  Antisense strand to SEQ ID NO: 894798
guauauguaaaucucucgc

SEQ ID NO: 894800 - RNA, 19 nt, Artificial Sequence
  Description of Artificial Sequence: Synthetic oligonucleotide
  Sense strand starting at position 258 of SEQ ID NO: 588858
cggaucugccaccaagaaa

SEQ ID NO: 894801 - RNA, 19 nt, Artificial Sequence
  Description of Artificial Sequence: Synthetic oligonucleotide
  Antisense strand to SEQ ID NO: 894800
uuucuugguggcagauccg

SEQ ID NO: 894802 - RNA, 19 nt, Artificial Sequence
  Description of Artificial Sequence: Synthetic oligonucleotide
  Sense strand starting at position 269 of SEQ ID NO: 588858
ccaagaaagcuguguaaua

SEQ ID NO: 894803 - RNA, 19 nt, Artificial Sequence
  Description of Artificial Sequence: Synthetic oligonucleotide
  Antisense strand to SEQ ID NO: 894802
uauuacacagcuuucuugg

SEQ ID NO: 894804 - RNA, 19 nt, Artificial Sequence
  Description of Artificial Sequence: Synthetic oligonucleotide
  Sense strand starting at position 270 of SEQ ID NO: 588858
caagaaagcuguguaauau

SEQ ID NO: 894805 - RNA, 19 nt, Artificial Sequence
  Description of Artificial Sequence: Synthetic oligonucleotide
  Antisense strand to SEQ ID NO: 894804
auauuacacagcuuucuug

SEQ ID NO: 894806 - RNA, 19 nt, Artificial Sequence
  Description of Artificial Sequence: Synthetic oligonucleotide
  Sense strand starting at position 271 of SEQ ID NO: 588858
aagaaagcuguguaauauu

SEQ ID NO: 894807 - RNA, 19 nt, Artificial Sequence
  Description of Artificial Sequence: Synthetic oligonucleotide
  Antisense strand to SEQ ID NO: 894806
aauauuacacagcuuucuu

SEQ ID NO: 894808 - RNA, 19 nt, Artificial Sequence
  Description of Artificial Sequence: Synthetic oligonucleotide
  Sense strand starting at position 374 of SEQ ID NO: 588858
agucaaagcucuucgaagu

SEQ ID NO: 894809 - RNA, 19 nt, Artificial Sequence
  Description of Artificial Sequence: Synthetic oligonucleotide
  Antisense strand to SEQ ID NO: 894808
acuucgaagagcuuugacu

SEQ ID NO: 894810 - RNA, 19 nt, Artificial Sequence
  Description of Artificial Sequence: Synthetic oligonucleotide
  Sense strand starting at position 375 of SEQ ID NO: 588858
gucaaagcucuucgaaguc

SEQ ID NO: 894811 - RNA, 19 nt, Artificial Sequence
  Description of Artificial Sequence: Synthetic oligonucleotide
  Antisense strand to SEQ ID NO: 894810
gacuucgaagagcuuugac

SEQ ID NO: 894812 - RNA, 19 nt, Artificial Sequence
  Description of Artificial Sequence: Synthetic oligonucleotide
  Sense strand starting at position 1402 of SEQ ID NO: 588858
agcugaaguacuuguuuag

SEQ ID NO: 894813 - RNA, 19 nt, Artificial Sequence
  Description of Artificial Sequence: Synthetic oligonucleotide
  Antisense strand to SEQ ID NO: 894812
cuaaacaaguacuucagcu

SEQ ID NO: 894814 - RNA, 19 nt, Artificial Sequence
  Description of Artificial Sequence: Synthetic oligonucleotide
  Sense strand starting at position 1405 of SEQ ID NO: 588858
ugaaguacuuguuuagcca

SEQ ID NO: 894815 - RNA, 19 nt, Artificial Sequence
  Description of Artificial Sequence: Synthetic oligonucleotide
  Antisense strand to SEQ ID NO: 894814
uggcuaaacaaguacuuca

SEQ ID NO: 894816 - RNA, 19 nt, Artificial Sequence
  Description of Artificial Sequence: Synthetic oligonucleotide
  Sense strand starting at position 2417 of SEQ ID NO: 588858
cguuguucacuccagggau

SEQ ID NO: 894817 - RNA, 19 nt, Artificial Sequence
  Description of Artificial Sequence: Synthetic oligonucleotide
  Antisense strand to SEQ ID NO: 894816
aucccuggagugaacaacg

SEQ ID NO: 894818 - RNA, 19 nt, Artificial Sequence
  Description of Artificial Sequence: Synthetic oligonucleotide
  Sense strand starting at position 2471 of SEQ ID NO: 588858
cacggaaccugucuaguuu

SEQ ID NO: 894819 - RNA, 19 nt, Artificial Sequence
  Description of Artificial Sequence: Synthetic oligonucleotide
  Antisense strand to SEQ ID NO: 894818
aaacuagacagguuccgug

SEQ ID NO: 894820 - RNA, 19 nt, Artificial Sequence
  Description of Artificial Sequence: Synthetic oligonucleotide
  Sense strand starting at position 2472 of SEQ ID NO: 588858
acggaaccugucuaguuua

SEQ ID NO: 894821 - RNA, 19 nt, Artificial Sequence
  Description of Artificial Sequence: Synthetic oligonucleotide
  Antisense strand to SEQ ID NO: 894820
uaaacuagacagguuccgu

SEQ ID NO: 894822 - RNA, 19 nt, Artificial Sequence
  Description of Artificial Sequence: Synthetic oligonucleotide
  Sense strand starting at position 2475 of SEQ ID NO: 588858
gaaccugucuaguuuacag

SEQ ID NO: 894823 - RNA, 19 nt, Artificial Sequence
  Description of Artificial Sequence: Synthetic oligonucleotide
  Antisense strand to SEQ ID NO: 894822
cuguaaacuagacagguuc

SEQ ID NO: 894824 - RNA, 19 nt, Artificial Sequence
  Description of Artificial Sequence: Synthetic oligonucleotide
  Sense strand starting at position 2593 of SEQ ID NO: 588858
caggucuucggaggaaucu

SEQ ID NO: 894825 - RNA, 19 nt, Artificial Sequence
  Description of Artificial Sequence: Synthetic oligonucleotide
  Antisense strand to SEQ ID NO: 894824
agauuccuccgaagaccug

SEQ ID NO: 894826 - RNA, 19 nt, Artificial Sequence
  Description of Artificial Sequence: Synthetic oligonucleotide
  Sense strand starting at position 2594 of SEQ ID NO: 588858
aggucuucggaggaaucuu

SEQ ID NO: 894827 - RNA, 19 nt, Artificial Sequence
  Description of Artificial Sequence: Synthetic oligonucleotide
  Antisense strand to SEQ ID NO: 894826
aagauuccuccgaagaccu

SEQ ID NO: 894828 - RNA, 19 nt, Artificial Sequence
  Description of Artificial Sequence: Synthetic oligonucleotide
  Sense strand starting at position 2604 of SEQ ID NO: 588858
aggaaucuuuaugcuaaug

SEQ ID NO: 894829 - RNA, 19 nt, Artificial Sequence
  Description of Artificial Sequence: Synthetic oligonucleotide
  Antisense strand to SEQ ID NO: 894828
cauuagcauaaagauuccu

SEQ ID NO: 894830 - RNA, 19 nt, Artificial Sequence
  Description of Artificial Sequence: Synthetic oligonucleotide
  Sense strand starting at position 2626 of SEQ ID NO: 588858
guauuagcaguccagauga

SEQ ID NO: 894831 - RNA, 19 nt, Artificial Sequence
  Description of Artificial Sequence: Synthetic oligonucleotide
  Antisense strand to SEQ ID NO: 894830
ucaucuggacugcuaauac

SEQ ID NO: 894832 - RNA, 19 nt, Artificial Sequence
  Description of Artificial Sequence: Synthetic oligonucleotide
  Sense strand starting at position 2643 of SEQ ID NO: 588858
gacggauguggucgggaua

SEQ ID NO: 894833 - RNA, 19 nt, Artificial Sequence
  Description of Artificial Sequence: Synthetic oligonucleotide
  Antisense strand to SEQ ID NO: 894832
uaucccgaccacauccguc

SEQ ID NO: 894834 - RNA, 19 nt, Artificial Sequence
  Description of Artificial Sequence: Synthetic oligonucleotide
  Sense strand starting at position 2713 of SEQ ID NO: 588858
cggaauguuugcuuaccuu

SEQ ID NO: 894835 - RNA, 19 nt, Artificial Sequence
  Description of Artificial Sequence: Synthetic oligonucleotide
  Antisense strand to SEQ ID NO: 894834
aagguaagcaaacauuccg

SEQ ID NO: 894836 - RNA, 19 nt, Artificial Sequence
  Description of Artificial Sequence: Synthetic oligonucleotide
  Sense strand starting at position 2740 of SEQ ID NO: 588858
ugaggaagucgaggcuuua

SEQ ID NO: 894837 - RNA, 19 nt, Artificial Sequence
  Description of Artificial Sequence: Synthetic oligonucleotide
  Antisense strand to SEQ ID NO: 894836
uaaagccucgacuuccuca

SEQ ID NO: 894838 - RNA, 19 nt, Artificial Sequence
  Description of Artificial Sequence: Synthetic oligonucleotide
  Sense strand starting at position 2784 of SEQ ID NO: 588858
gagcaaguugugggaacau

SEQ ID NO: 894839 - RNA, 19 nt, Artificial Sequence
  Description of Artificial Sequence: Synthetic oligonucleotide
  Antisense strand to SEQ ID NO: 894838
auguucccacaacuugcuc

SEQ ID NO: 894840 - RNA, 19 nt, Artificial Sequence
  Description of Artificial Sequence: Synthetic oligonucleotide
  Sense strand starting at position 2832 of SEQ ID NO: 588858
ggauccauuuaauacagga

SEQ ID NO: 894841 - RNA, 19 nt, Artificial Sequence
  Description of Artificial Sequence: Synthetic oligonucleotide
  Antisense strand to SEQ ID NO: 894840
uccuguauuaaauggaucc

SEQ ID NO: 894842 - RNA, 19 nt, Artificial Sequence
  Description of Artificial Sequence: Synthetic oligonucleotide
  Sense strand starting at position 3256 of SEQ ID NO: 588858
aagagucucuucuuugcga

SEQ ID NO: 894843 - RNA, 19 nt, Artificial Sequence
  Description of Artificial Sequence: Synthetic oligonucleotide
  Antisense strand to SEQ ID NO: 894842
ucgcaaagaagagacucuu

SEQ ID NO: 894844 - RNA, 19 nt, Artificial Sequence
  Description of Artificial Sequence: Synthetic oligonucleotide
  Sense strand starting at position 3257 of SEQ ID NO: 588858
agagucucuucuuugcgau

SEQ ID NO: 894845 - RNA, 19 nt, Artificial Sequence
  Description of Artificial Sequence: Synthetic oligonucleotide
  Antisense strand to SEQ ID NO: 894844
aucgcaaagaagagacucu

SEQ ID NO: 894846 - RNA, 19 nt, Artificial Sequence
  Description of Artificial Sequence: Synthetic oligonucleotide
  Sense strand starting at position 3259 of SEQ ID NO: 588858
agucucuucuuugcgauuu

SEQ ID NO: 894847 - RNA, 19 nt, Artificial Sequence
  Description of Artificial Sequence: Synthetic oligonucleotide
  Antisense strand to SEQ ID NO: 894846
aaaucgcaaagaagagacu

SEQ ID NO: 894848 - RNA, 19 nt, Artificial Sequence
  Description of Artificial Sequence: Synthetic oligonucleotide
  Sense strand starting at position 3330 of SEQ ID NO: 588858
gccugauuuggucagugua

SEQ ID NO: 894849 - RNA, 19 nt, Artificial Sequence
  Description of Artificial Sequence: Synthetic oligonucleotide
  Antisense strand to SEQ ID NO: 894848
uacacugaccaaaucaggc

SEQ ID NO: 894850 - RNA, 19 nt, Artificial Sequence
  Description of Artificial Sequence: Synthetic oligonucleotide
  Sense strand starting at position 3333 of SEQ ID NO: 588858
ugauuuggucaguguaacu

SEQ ID NO: 894851 - RNA, 19 nt, Artificial Sequence
  Description of Artificial Sequence: Synthetic oligonucleotide
  Antisense strand to SEQ ID NO: 894850
aguuacacugaccaaauca

SEQ ID NO: 894852 - RNA, 19 nt, Artificial Sequence
  Description of Artificial Sequence: Synthetic oligonucleotide
  Sense strand starting at position 3399 of SEQ ID NO: 588858
gggaaaugcugccuaaaga

SEQ ID NO: 894853 - RNA, 19 nt, Artificial Sequence
  Description of Artificial Sequence: Synthetic oligonucleotide
  Antisense strand to SEQ ID NO: 894852
ucuuuaggcagcauuuccc

SEQ ID NO: 894854 - RNA, 19 nt, Artificial Sequence
  Description of Artificial Sequence: Synthetic oligonucleotide
  Sense strand starting at position 3400 of SEQ ID NO: 588858
ggaaaugcugccuaaagau

SEQ ID NO: 894855 - RNA, 19 nt, Artificial Sequence
  Description of Artificial Sequence: Synthetic oligonucleotide
  Antisense strand to SEQ ID NO: 894854
aucuuuaggcagcauuucc

SEQ ID NO: 894856 - RNA, 19 nt, Artificial Sequence
  Description of Artificial Sequence: Synthetic oligonucleotide
  Sense strand starting at position 3406 of SEQ ID NO: 588858
gcugccuaaagaugaagua

SEQ ID NO: 894857 - RNA, 19 nt, Artificial Sequence
  Description of Artificial Sequence: Synthetic oligonucleotide
  Antisense strand to SEQ ID NO: 894856
uacuucaucuuuaggcagc

SEQ ID NO: 894858 - RNA, 19 nt, Artificial Sequence
  Description of Artificial Sequence: Synthetic oligonucleotide
  Sense strand starting at position 3448 of SEQ ID NO: 588858
cuuugaauuugccugggca

SEQ ID NO: 894859 - RNA, 19 nt, Artificial Sequence
  Description of Artificial Sequence: Synthetic oligonucleotide
  Antisense strand to SEQ ID NO: 894858
ugcccaggcaaauucaaag

SEQ ID NO: 894860 - RNA, 19 nt, Artificial Sequence
  Description of Artificial Sequence: Synthetic oligonucleotide
  Sense strand starting at position 3500 of SEQ ID NO: 588858
gcaccugagagcugagaaa

SEQ ID NO: 894861 - RNA, 19 nt, Artificial Sequence
  Description of Artificial Sequence: Synthetic oligonucleotide
  Antisense strand to SEQ ID NO: 894860
uuucucagcucucaggugc

SEQ ID NO: 894862 - RNA, 19 nt, Artificial Sequence
  Description of Artificial Sequence: Synthetic oligonucleotide
  Sense strand starting at position 3518 of SEQ ID NO: 588858
auucucuaagaauguugau

SEQ ID NO: 894863 - RNA, 19 nt, Artificial Sequence
  Description of Artificial Sequence: Synthetic oligonucleotide
  Antisense strand to SEQ ID NO: 894862
aucaacauucuuagagaau

SEQ ID NO: 894864 - RNA, 19 nt, Artificial Sequence
  Description of Artificial Sequence: Synthetic oligonucleotide
  Sense strand starting at position 3521 of SEQ ID NO: 588858
cucuaagaauguugauuua

SEQ ID NO: 894865 - RNA, 19 nt, Artificial Sequence
  Description of Artificial Sequence: Synthetic oligonucleotide
  Antisense strand to SEQ ID NO: 894864
uaaaucaacauucuuagag

SEQ ID NO: 894866 - RNA, 19 nt, Artificial Sequence
  Description of Artificial Sequence: Synthetic oligonucleotide
  Sense strand starting at position 3616 of SEQ ID NO: 588858
ucccauauccuguaguaac

SEQ ID NO: 894867 - RNA, 19 nt, Artificial Sequence
  Description of Artificial Sequence: Synthetic oligonucleotide
  Antisense strand to SEQ ID NO: 894866
guuacuacaggauauggga

SEQ ID NO: 894868 - RNA, 19 nt, Artificial Sequence
  Description of Artificial Sequence: Synthetic oligonucleotide
  Sense strand starting at position 3626 of SEQ ID NO: 588858
uguaguaacagugggaacu

SEQ ID NO: 894869 - RNA, 19 nt, Artificial Sequence
  Description of Artificial Sequence: Synthetic oligonucleotide
  Antisense strand to SEQ ID NO: 894868
aguucccacuguuacuaca

SEQ ID NO: 894870 - RNA, 19 nt, Artificial Sequence
  Description of Artificial Sequence: Synthetic oligonucleotide
  Sense strand starting at position 3701 of SEQ ID NO: 588858
gcuggaaguagaggucaaa

SEQ ID NO: 894871 - RNA, 19 nt, Artificial Sequence
  Description of Artificial Sequence: Synthetic oligonucleotide
  Antisense strand to SEQ ID NO: 894870
uuugaccucuacuuccagc

SEQ ID NO: 894872 - RNA, 19 nt, Artificial Sequence
  Description of Artificial Sequence: Synthetic oligonucleotide
  Sense strand starting at position 3753 of SEQ ID NO: 588858
aggccugagagcuguuacu

SEQ ID NO: 894873 - RNA, 19 nt, Artificial Sequence
  Description of Artificial Sequence: Synthetic oligonucleotide
  Antisense strand to SEQ ID NO: 894872
aguaacagcucucaggccu

SEQ ID NO: 894874 - RNA, 19 nt, Artificial Sequence
  Description of Artificial Sequence: Synthetic oligonucleotide
  Sense strand starting at position 3879 of SEQ ID NO: 588858
agccauacacagugguaaa

SEQ ID NO: 894875 - RNA, 19 nt, Artificial Sequence
  Description of Artificial Sequence: Synthetic oligonucleotide
  Antisense strand to SEQ ID NO: 894874
uuuaccacuguguauggcu

SEQ ID NO: 894876 - RNA, 19 nt, Artificial Sequence
  Description of Artificial Sequence: Synthetic oligonucleotide
  Sense strand starting at position 191 of SEQ ID NO: 588860
ccuaaauguucuguggcau

SEQ ID NO: 894877 - RNA, 19 nt, Artificial Sequence
  Description of Artificial Sequence: Synthetic oligonucleotide
  Antisense strand to SEQ ID NO: 894876
augccacagaacauuuagg

SEQ ID NO: 894878 - RNA, 19 nt, Artificial Sequence
  Description of Artificial Sequence: Synthetic oligonucleotide
  Sense strand starting at position 220 of SEQ ID NO: 588860
acguccucucuuuggagaa

SEQ ID NO: 894879 - RNA, 19 nt, Artificial Sequence
  Description of Artificial Sequence: Synthetic oligonucleotide
  Antisense strand to SEQ ID NO: 894878
uucuccaaagagaggacgu

SEQ ID NO: 894880 - RNA, 19 nt, Artificial Sequence
  Description of Artificial Sequence: Synthetic oligonucleotide
  Sense strand starting at position 338 of SEQ ID NO: 588860
ugggcuuguagcuaggaaa

SEQ ID NO: 894881 - RNA, 19 nt, Artificial Sequence
  Description of Artificial Sequence: Synthetic oligonucleotide
  Antisense strand to SEQ ID NO: 894880
uuuccuagcuacaagccca

SEQ ID NO: 894882 - RNA, 19 nt, Artificial Sequence
  Description of Artificial Sequence: Synthetic oligonucleotide
  Sense strand starting at position 448 of SEQ ID NO: 588860
ugggaaguccagugcucua

SEQ ID NO: 894883 - RNA, 19 nt, Artificial Sequence
  Description of Artificial Sequence: Synthetic oligonucleotide
  Antisense strand to SEQ ID NO: 894882
uagagcacuggacuuccca

SEQ ID NO: 894884 - RNA, 19 nt, Artificial Sequence
  Description of Artificial Sequence: Synthetic oligonucleotide
  Sense strand starting at position 451 of SEQ ID NO: 588860
gaaguccagugcucuauuu

SEQ ID NO: 894885 - RNA, 19 nt, Artificial Sequence
  Description of Artificial Sequence: Synthetic oligonucleotide
  Antisense strand to SEQ ID NO: 894884
aaauagagcacuggacuuc

SEQ ID NO: 894886 - RNA, 19 nt, Artificial Sequence
  Description of Artificial Sequence: Synthetic oligonucleotide
  Sense strand starting at position 453 of SEQ ID NO: 588860
aguccagugcucuauuucu

SEQ ID NO: 894887 - RNA, 19 nt, Artificial Sequence
  Description of Artificial Sequence: Synthetic oligonucleotide
  Antisense strand to SEQ ID NO: 894886
agaaauagagcacuggacu

SEQ ID NO: 894888 - RNA, 19 nt, Artificial Sequence
  Description of Artificial Sequence: Synthetic oligonucleotide
  Sense strand starting at position 458 of SEQ ID NO: 588860
agugcucuauuucuuaagu

SEQ ID NO: 894889 - RNA, 19 nt, Artificial Sequence
  Description of Artificial Sequence: Synthetic oligonucleotide
  Antisense strand to SEQ ID NO: 894888
acuuaagaaauagagcacu

SEQ ID NO: 894890 - RNA, 19 nt, Artificial Sequence
  Description of Artificial Sequence: Synthetic oligonucleotide
  Sense strand starting at position 459 of SEQ ID NO: 588860
gugcucuauuucuuaagua

SEQ ID NO: 894891 - RNA, 19 nt, Artificial Sequence
  Description of Artificial Sequence: Synthetic oligonucleotide
  Antisense strand to SEQ ID NO: 894890
uacuuaagaaauagagcac

SEQ ID NO: 894892 - RNA, 19 nt, Artificial Sequence
  Description of Artificial Sequence: Synthetic oligonucleotide
  Sense strand starting at position 827 of SEQ ID NO: 588860
aagauaacugucugucuug

SEQ ID NO: 894893 - RNA, 19 nt, Artificial Sequence
  Description of Artificial Sequence: Synthetic oligonucleotide
  Antisense strand to SEQ ID NO: 894892
caagacagacaguuaucuu

SEQ ID NO: 894894 - RNA, 19 nt, Artificial Sequence
  Description of Artificial Sequence: Synthetic oligonucleotide
  Sense strand starting at position 828 of SEQ ID NO: 588860
agauaacugucugucuugu

SEQ ID NO: 894895 - RNA, 19 nt, Artificial Sequence
  Description of Artificial Sequence: Synthetic oligonucleotide
  Antisense strand to SEQ ID NO: 894894
acaagacagacaguuaucu

SEQ ID NO: 894896 - RNA, 19 nt, Artificial Sequence
  Description of Artificial Sequence: Synthetic oligonucleotide
  Sense strand starting at position 900 of SEQ ID NO: 588860
uggaauacugucugggcaa

SEQ ID NO: 894897 - RNA, 19 nt, Artificial Sequence
  Description of Artificial Sequence: Synthetic oligonucleotide
  Antisense strand to SEQ ID NO: 894896
uugcccagacaguauucca

SEQ ID NO: 894898 - RNA, 19 nt, Artificial Sequence
  Description of Artificial Sequence: Synthetic oligonucleotide
  Sense strand starting at position 919 of SEQ ID NO: 588860
aauugugccugggcagaua

SEQ ID NO: 894899 - RNA, 19 nt, Artificial Sequence
  Description of Artificial Sequence: Synthetic oligonucleotide
  Antisense strand to SEQ ID NO: 894898
uaucugcccaggcacaauu

SEQ ID NO: 894900 - RNA, 19 nt, Artificial Sequence
  Description of Artificial Sequence: Synthetic oligonucleotide
  Sense strand starting at position 944 of SEQ ID NO: 588860
agacauguuuaauaggaag

SEQ ID NO: 894901 - RNA, 19 nt, Artificial Sequence
  Description of Artificial Sequence: Synthetic oligonucleotide
  Antisense strand to SEQ ID NO: 894900
cuuccuauuaaacaugucu

SEQ ID NO: 894902 - RNA, 19 nt, Artificial Sequence
  Description of Artificial Sequence: Synthetic oligonucleotide
  Sense strand starting at position 996 of SEQ ID NO: 588860
gcaagagucccucagcucu

SEQ ID NO: 894903 - RNA, 19 nt, Artificial Sequence
  Description of Artificial Sequence: Synthetic oligonucleotide
  Antisense strand to SEQ ID NO: 894902
agagcugagggacucuugc

SEQ ID NO: 894904 - RNA, 19 nt, Artificial Sequence
  Description of Artificial Sequence: Synthetic oligonucleotide
  Sense strand starting at position 1021 of SEQ ID NO: 588860
accaaucaccuguggcuua

SEQ ID NO: 894905 - RNA, 19 nt, Artificial Sequence
  Description of Artificial Sequence: Synthetic oligonucleotide
  Antisense strand to SEQ ID NO: 894904
uaagccacaggugauuggu

SEQ ID NO: 894906 - RNA, 19 nt, Artificial Sequence
  Description of Artificial Sequence: Synthetic oligonucleotide
  Sense strand starting at position 1228 of SEQ ID NO: 588860
agaugaugguauccgagau

SEQ ID NO: 894907 - RNA, 19 nt, Artificial Sequence
  Description of Artificial Sequence: Synthetic oligonucleotide
  Antisense strand to SEQ ID NO: 894906
aucucggauaccaucaucu

SEQ ID NO: 894908 - RNA, 19 nt, Artificial Sequence
  Description of Artificial Sequence: Synthetic oligonucleotide
  Sense strand starting at position 1229 of SEQ ID NO: 588860
gaugaugguauccgagauc

SEQ ID NO: 894909 - RNA, 19 nt, Artificial Sequence
  Description of Artificial Sequence: Synthetic oligonucleotide
  Antisense strand to SEQ ID NO: 894908
gaucucggauaccaucauc

SEQ ID NO: 894910 - RNA, 19 nt, Artificial Sequence
  Description of Artificial Sequence: Synthetic oligonucleotide
  Sense strand starting at position 1232 of SEQ ID NO: 588860
gaugguauccgagaucuca

SEQ ID NO: 894911 - RNA, 19 nt, Artificial Sequence
  Description of Artificial Sequence: Synthetic oligonucleotide
  Antisense strand to SEQ ID NO: 894910
ugagaucucggauaccauc

SEQ ID NO: 894912 - RNA, 19 nt, Artificial Sequence
  Description of Artificial Sequence: Synthetic oligonucleotide
  Sense strand starting at position 1268 of SEQ ID NO: 588860
gugacaaucgcacaugaca

SEQ ID NO: 894913 - RNA, 19 nt, Artificial Sequence
  Description of Artificial Sequence: Synthetic oligonucleotide
  Antisense strand to SEQ ID NO: 894912
ugucaugugcgauugucac

SEQ ID NO: 894914 - RNA, 19 nt, Artificial Sequence
  Description of Artificial Sequence: Synthetic oligonucleotide
  Sense strand starting at position 1745 of SEQ ID NO: 588860
cuaucucuucgcgcuggaa

SEQ ID NO: 894915 - RNA, 19 nt, Artificial Sequence
  Description of Artificial Sequence: Synthetic oligonucleotide
  Antisense strand to SEQ ID NO: 894914
uuccagcgcgaagagauag

SEQ ID NO: 894916 - RNA, 19 nt, Artificial Sequence
  Description of Artificial Sequence: Synthetic oligonucleotide
  Sense strand starting at position 2269 of SEQ ID NO: 588860
ccuucugggacucaacgau

SEQ ID NO: 894917 - RNA, 19 nt, Artificial Sequence
  Description of Artificial Sequence: Synthetic oligonucleotide
  Antisense strand to SEQ ID NO: 894916
aucguugagucccagaagg

SEQ ID NO: 894918 - RNA, 19 nt, Artificial Sequence
  Description of Artificial Sequence: Synthetic oligonucleotide
  Sense strand starting at position 2273 of SEQ ID NO: 588860
cugggacucaacgauuguu

SEQ ID NO: 894919 - RNA, 19 nt, Artificial Sequence
  Description of Artificial Sequence: Synthetic oligonucleotide
  Antisense strand to SEQ ID NO: 894918
aacaaucguugagucccag

SEQ ID NO: 894920 - RNA, 19 nt, Artificial Sequence
  Description of Artificial Sequence: Synthetic oligonucleotide
  Sense strand starting at position 2276 of SEQ ID NO: 588860
ggacucaacgauuguuaag

SEQ ID NO: 894921 - RNA, 19 nt, Artificial Sequence
  Description of Artificial Sequence: Synthetic oligonucleotide
  Antisense strand to SEQ ID NO: 894920
cuuaacaaucguugagucc

SEQ ID NO: 894922 - RNA, 19 nt, Artificial Sequence
  Description of Artificial Sequence: Synthetic oligonucleotide
  Sense strand starting at position 2298 of SEQ ID NO: 588860
cgccuuuaccaggacugaa

SEQ ID NO: 894923 - RNA, 19 nt, Artificial Sequence
  Description of Artificial Sequence: Synthetic oligonucleotide
  Antisense strand to SEQ ID NO: 894922
uucaguccugguaaaggcg

SEQ ID NO: 894924 - RNA, 19 nt, Artificial Sequence
  Description of Artificial Sequence: Synthetic oligonucleotide
  Sense strand starting at position 2378 of SEQ ID NO: 588860
ugagcagugucuuuaagag

SEQ ID NO: 894925 - RNA, 19 nt, Artificial Sequence
  Description of Artificial Sequence: Synthetic oligonucleotide
  Antisense strand to SEQ ID NO: 894924
cucuuaaagacacugcuca

SEQ ID NO: 894926 - RNA, 19 nt, Artificial Sequence
  Description of Artificial Sequence: Synthetic oligonucleotide
  Sense strand starting at position 2384 of SEQ ID NO: 588860
gugucuuuaagagcucgca

SEQ ID NO: 894927 - RNA, 19 nt, Artificial Sequence
  Description of Artificial Sequence: Synthetic oligonucleotide
  Antisense strand to SEQ ID NO: 894926
ugcgagcucuuaaagacac

SEQ ID NO: 894928 - RNA, 19 nt, Artificial Sequence
  Description of Artificial Sequence: Synthetic oligonucleotide
  Sense strand starting at position 2387 of SEQ ID NO: 588860
ucuuuaagagcucgcagaa

SEQ ID NO: 894929 - RNA, 19 nt, Artificial Sequence
  Description of Artificial Sequence: Synthetic oligonucleotide
  Antisense strand to SEQ ID NO: 894928
uucugcgagcucuuaaaga

SEQ ID NO: 894930 - RNA, 19 nt, Artificial Sequence
  Description of Artificial Sequence: Synthetic oligonucleotide
  Sense strand starting at position 2537 of SEQ ID NO: 588860
agcugaggguuaucagcaa

SEQ ID NO: 894931 - RNA, 19 nt, Artificial Sequence
  Description of Artificial Sequence: Synthetic oligonucleotide
  Antisense strand to SEQ ID NO: 894930
uugcugauaacccucagcu

SEQ ID NO: 894932 - RNA, 19 nt, Artificial Sequence
  Description of Artificial Sequence: Synthetic oligonucleotide
  Sense strand starting at position 2655 of SEQ ID NO: 588860
agggaaggucugugucagu

SEQ ID NO: 894933 - RNA, 19 nt, Artificial Sequence
  Description of Artificial Sequence: Synthetic oligonucleotide
  Antisense strand to SEQ ID NO: 894932
acugacacagaccuucccu

SEQ ID NO: 894934 - RNA, 19 nt, Artificial Sequence
  Description of Artificial Sequence: Synthetic oligonucleotide
  Sense strand starting at position 2660 of SEQ ID NO: 588860
aggucugugucaguggaga

SEQ ID NO: 894935 - RNA, 19 nt, Artificial Sequence
  Description of Artificial Sequence: Synthetic oligonucleotide
  Antisense strand to SEQ ID NO: 894934
ucuccacugacacagaccu

SEQ ID NO: 894936 - RNA, 19 nt, Artificial Sequence
  Description of Artificial Sequence: Synthetic oligonucleotide
  Sense strand starting at position 2662 of SEQ ID NO: 588860
gucugugucaguggagaug

SEQ ID NO: 894937 - RNA, 19 nt, Artificial Sequence
  Description of Artificial Sequence: Synthetic oligonucleotide
  Antisense strand to SEQ ID NO: 894936
caucuccacugacacagac

SEQ ID NO: 894938 - RNA, 19 nt, Artificial Sequence
  Description of Artificial Sequence: Synthetic oligonucleotide
  Sense strand starting at position 2695 of SEQ ID NO: 588860
gcuuaacaacucuggaaau

SEQ ID NO: 894939 - RNA, 19 nt, Artificial Sequence
  Description of Artificial Sequence: Synthetic oligonucleotide
  Antisense strand to SEQ ID NO: 894938
auuuccagaguuguuaagc

SEQ ID NO: 894940 - RNA, 19 nt, Artificial Sequence
  Description of Artificial Sequence: Synthetic oligonucleotide
  Sense strand starting at position 2789 of SEQ ID NO: 588860
uggcuaacauccuuugcau

SEQ ID NO: 894941 - RNA, 19 nt, Artificial Sequence
  Description of Artificial Sequence: Synthetic oligonucleotide
  Antisense strand to SEQ ID NO: 894940
augcaaaggauguuagcca

SEQ ID NO: 894942 - RNA, 19 nt, Artificial Sequence
  Description of Artificial Sequence: Synthetic oligonucleotide
  Sense strand starting at position 3013 of SEQ ID NO: 588860
gaugaaaucucacagggag

SEQ ID NO: 894943 - RNA, 19 nt, Artificial Sequence
  Description of Artificial Sequence: Synthetic oligonucleotide
  Antisense strand to SEQ ID NO: 894942
cucccugugagauuucauc

SEQ ID NO: 894944 - RNA, 19 nt, Artificial Sequence
  Description of Artificial Sequence: Synthetic oligonucleotide
  Sense strand starting at position 3148 of SEQ ID NO: 588860
uugugcagugauuaagaaa

SEQ ID NO: 894945 - RNA, 19 nt, Artificial Sequence
  Description of Artificial Sequence: Synthetic oligonucleotide
  Antisense strand to SEQ ID NO: 894944
uuucuuaaucacugcacaa

SEQ ID NO: 894946 - RNA, 19 nt, Artificial Sequence
  Description of Artificial Sequence: Synthetic oligonucleotide
  Sense strand starting at position 3162 of SEQ ID NO: 588860
agaaauaaacucuggagcu

SEQ ID NO: 894947 - RNA, 19 nt, Artificial Sequence
  Description of Artificial Sequence: Synthetic oligonucleotide
  Antisense strand to SEQ ID NO: 894946
agcuccagaguuuauuucu

SEQ ID NO: 894948 - RNA, 19 nt, Artificial Sequence
  Description of Artificial Sequence: Synthetic oligonucleotide
  Sense strand starting at position 3215 of SEQ ID NO: 588860
cuacuaguugucugaucuu

SEQ ID NO: 894949 - RNA, 19 nt, Artificial Sequence
  Description of Artificial Sequence: Synthetic oligonucleotide
  Antisense strand to SEQ ID NO: 894948
aagaucagacaacuaguag

SEQ ID NO: 894950 - RNA, 19 nt, Artificial Sequence
  Description of Artificial Sequence: Synthetic oligonucleotide
  Sense strand starting at position 3225 of SEQ ID NO: 588860
ucugaucuugggcaguuua

SEQ ID NO: 894951 - RNA, 19 nt, Artificial Sequence
  Description of Artificial Sequence: Synthetic oligonucleotide
  Antisense strand to SEQ ID NO: 894950
uaaacugcccaagaucaga

SEQ ID NO: 894952 - RNA, 19 nt, Artificial Sequence
  Description of Artificial Sequence: Synthetic oligonucleotide
  Sense strand starting at position 3366 of SEQ ID NO: 588860
gccucacauggugagaauu

SEQ ID NO: 894953 - RNA, 19 nt, Artificial Sequence
  Description of Artificial Sequence: Synthetic oligonucleotide
  Antisense strand to SEQ ID NO: 894952
aauucucaccaugugaggc

SEQ ID NO: 894954 - RNA, 19 nt, Artificial Sequence
  Description of Artificial Sequence: Synthetic oligonucleotide
  Sense strand starting at position 3528 of SEQ ID NO: 588860
aacacuugaguccagguau

SEQ ID NO: 894955 - RNA, 19 nt, Artificial Sequence
  Description of Artificial Sequence: Synthetic oligonucleotide
  Antisense strand to SEQ ID NO: 894954
auaccuggacucaaguguu

SEQ ID NO: 894956 - RNA, 19 nt, Artificial Sequence
  Description of Artificial Sequence: Synthetic oligonucleotide
  Sense strand starting at position 40 of SEQ ID NO: 588861
ggugauggcaguuauagag

SEQ ID NO: 894957 - RNA, 19 nt, Artificial Sequence
  Description of Artificial Sequence: Synthetic oligonucleotide
  Antisense strand to SEQ ID NO: 894956
cucuauaacugccaucacc

SEQ ID NO: 894958 - RNA, 19 nt, Artificial Sequence
  Description of Artificial Sequence: Synthetic oligonucleotide
  Sense strand starting at position 46 of SEQ ID NO: 588861
ggcaguuauagaggucaag

SEQ ID NO: 894959 - RNA, 19 nt, Artificial Sequence
  Description of Artificial Sequence: Synthetic oligonucleotide
  Antisense strand to SEQ ID NO: 894958
cuugaccucuauaacugcc

SEQ ID NO: 894960 - RNA, 19 nt, Artificial Sequence
  Description of Artificial Sequence: Synthetic oligonucleotide
  Sense strand starting at position 639 of SEQ ID NO: 588861
aagugagaaccugggaguu

SEQ ID NO: 894961 - RNA, 19 nt, Artificial Sequence
  Description of Artificial Sequence: Synthetic oligonucleotide
  Antisense strand to SEQ ID NO: 894960
aacucccagguucucacuu

SEQ ID NO: 894962 - RNA, 19 nt, Artificial Sequence
  Description of Artificial Sequence: Synthetic oligonucleotide
  Sense strand starting at position 729 of SEQ ID NO: 588861
aagcuuugcccugagaugu

SEQ ID NO: 894963 - RNA, 19 nt, Artificial Sequence
  Description of Artificial Sequence: Synthetic oligonucleotide
  Antisense strand to SEQ ID NO: 894962
acaucucagggcaaagcuu

SEQ ID NO: 894964 - RNA, 19 nt, Artificial Sequence
  Description of Artificial Sequence: Synthetic oligonucleotide
  Sense strand starting at position 740 of SEQ ID NO: 588861
ugagaugucucccuugaag

SEQ ID NO: 894965 - RNA, 19 nt, Artificial Sequence
  Description of Artificial Sequence: Synthetic oligonucleotide
  Antisense strand to SEQ ID NO: 894964
cuucaagggagacaucuca

SEQ ID NO: 894966 - RNA, 19 nt, Artificial Sequence
  Description of Artificial Sequence: Synthetic oligonucleotide
  Sense strand starting at position 742 of SEQ ID NO: 588861
agaugucucccuugaagcu

SEQ ID NO: 894967 - RNA, 19 nt, Artificial Sequence
  Description of Artificial Sequence: Synthetic oligonucleotide
  Antisense strand to SEQ ID NO: 894966
agcuucaagggagacaucu

SEQ ID NO: 894968 - RNA, 19 nt, Artificial Sequence
  Description of Artificial Sequence: Synthetic oligonucleotide
  Sense strand starting at position 1308 of SEQ ID NO: 588861
acaggaaucuggucagcaa

SEQ ID NO: 894969 - RNA, 19 nt, Artificial Sequence
  Description of Artificial Sequence: Synthetic oligonucleotide
  Antisense strand to SEQ ID NO: 894968
uugcugaccagauuccugu

SEQ ID NO: 894970 - RNA, 19 nt, Artificial Sequence
  Description of Artificial Sequence: Synthetic oligonucleotide
  Sense strand starting at position 1311 of SEQ ID NO: 588861
ggaaucuggucagcaacuu

SEQ ID NO: 894971 - RNA, 19 nt, Artificial Sequence
  Description of Artificial Sequence: Synthetic oligonucleotide
  Antisense strand to SEQ ID NO: 894970
aaguugcugaccagauucc

SEQ ID NO: 894972 - RNA, 19 nt, Artificial Sequence
  Description of Artificial Sequence: Synthetic oligonucleotide
  Sense strand starting at position 1400 of SEQ ID NO: 588861
ucccuaccugucuguagau

SEQ ID NO: 894973 - RNA, 19 nt, Artificial Sequence
  Description of Artificial Sequence: Synthetic oligonucleotide
  Antisense strand to SEQ ID NO: 894972
aucuacagacagguaggga

SEQ ID NO: 894974 - RNA, 19 nt, Artificial Sequence
  Description of Artificial Sequence: Synthetic oligonucleotide
  Sense strand starting at position 1401 of SEQ ID NO: 588861
cccuaccugucuguagaua

SEQ ID NO: 894975 - RNA, 19 nt, Artificial Sequence
  Description of Artificial Sequence: Synthetic oligonucleotide
  Antisense strand to SEQ ID NO: 894974
uaucuacagacagguaggg

SEQ ID NO: 894976 - RNA, 19 nt, Artificial Sequence
  Description of Artificial Sequence: Synthetic oligonucleotide
  Sense strand starting at position 1402 of SEQ ID NO: 588861
ccuaccugucuguagauaa

SEQ ID NO: 894977 - RNA, 19 nt, Artificial Sequence
  Description of Artificial Sequence: Synthetic oligonucleotide
  Antisense strand to SEQ ID NO: 894976
uuaucuacagacagguagg

SEQ ID NO: 894978 - RNA, 19 nt, Artificial Sequence
  Description of Artificial Sequence: Synthetic oligonucleotide
  Sense strand starting at position 1620 of SEQ ID NO: 588861
gagaaauagcagcgucaca

SEQ ID NO: 894979 - RNA, 19 nt, Artificial Sequence
  Description of Artificial Sequence: Synthetic oligonucleotide
  Antisense strand to SEQ ID NO: 894978
ugugacgcugcuauuucuc

SEQ ID NO: 894980 - RNA, 19 nt, Artificial Sequence
  Description of Artificial Sequence: Synthetic oligonucleotide
  Sense strand starting at position 1681 of SEQ ID NO: 588861
gggauuccuguggauguga

SEQ ID NO: 894981 - RNA, 19 nt, Artificial Sequence
  Description of Artificial Sequence: Synthetic oligonucleotide
  Antisense strand to SEQ ID NO: 894980
ucacauccacaggaauccc

SEQ ID NO: 894982 - RNA, 19 nt, Artificial Sequence
  Description of Artificial Sequence: Synthetic oligonucleotide
  Sense strand starting at position 1683 of SEQ ID NO: 588861
gauuccuguggaugugaaa

SEQ ID NO: 894983 - RNA, 19 nt, Artificial Sequence
  Description of Artificial Sequence: Synthetic oligonucleotide
  Antisense strand to SEQ ID NO: 894982
uuucacauccacaggaauc

SEQ ID NO: 894984 - RNA, 19 nt, Artificial Sequence
  Description of Artificial Sequence: Synthetic oligonucleotide
  Sense strand starting at position 2170 of SEQ ID NO: 588861
aguugagucccugaggacu

SEQ ID NO: 894985 - RNA, 19 nt, Artificial Sequence
  Description of Artificial Sequence: Synthetic oligonucleotide
  Antisense strand to SEQ ID NO: 894984
aguccucagggacucaacu

SEQ ID NO: 894986 - RNA, 19 nt, Artificial Sequence
  Description of Artificial Sequence: Synthetic oligonucleotide
  Sense strand starting at position 2304 of SEQ ID NO: 588861
uguauuccucaaugaguau

SEQ ID NO: 894987 - RNA, 19 nt, Artificial Sequence
  Description of Artificial Sequence: Synthetic oligonucleotide
  Antisense strand to SEQ ID NO: 894986
auacucauugaggaauaca

SEQ ID NO: 894988 - RNA, 19 nt, Artificial Sequence
  Description of Artificial Sequence: Synthetic oligonucleotide
  Sense strand starting at position 2308 of SEQ ID NO: 588861
uuccucaaugaguauggua

SEQ ID NO: 894989 - RNA, 19 nt, Artificial Sequence
  Description of Artificial Sequence: Synthetic oligonucleotide
  Antisense strand to SEQ ID NO: 894988
uaccauacucauugaggaa

SEQ ID NO: 894990 - RNA, 19 nt, Artificial Sequence
  Description of Artificial Sequence: Synthetic oligonucleotide
  Sense strand starting at position 2310 of SEQ ID NO: 588861
ccucaaugaguaugguaua

SEQ ID NO: 894991 - RNA, 19 nt, Artificial Sequence
  Description of Artificial Sequence: Synthetic oligonucleotide
  Antisense strand to SEQ ID NO: 894990
uauaccauacucauugagg

SEQ ID NO: 894992 - RNA, 19 nt, Artificial Sequence
  Description of Artificial Sequence: Synthetic oligonucleotide
  Sense strand starting at position 2315 of SEQ ID NO: 588861
augaguaugguauaaagug

SEQ ID NO: 894993 - RNA, 19 nt, Artificial Sequence
  Description of Artificial Sequence: Synthetic oligonucleotide
  Antisense strand to SEQ ID NO: 894992
cacuuuauaccauacucau

SEQ ID NO: 894994 - RNA, 19 nt, Artificial Sequence
  Description of Artificial Sequence: Synthetic oligonucleotide
  Sense strand starting at position 2376 of SEQ ID NO: 588861
cccuaaggcugaucugaga

SEQ ID NO: 894995 - RNA, 19 nt, Artificial Sequence
  Description of Artificial Sequence: Synthetic oligonucleotide
  Antisense strand to SEQ ID NO: 894994
ucucagaucagccuuaggg

SEQ ID NO: 894996 - RNA, 19 nt, Artificial Sequence
  Description of Artificial Sequence: Synthetic oligonucleotide
  Sense strand starting at position 2383 of SEQ ID NO: 588861
gcugaucugagaggauaug

SEQ ID NO: 894997 - RNA, 19 nt, Artificial Sequence
  Description of Artificial Sequence: Synthetic oligonucleotide
  Antisense strand to SEQ ID NO: 894996
cauauccucucagaucagc

SEQ ID NO: 894998 - RNA, 19 nt, Artificial Sequence
  Description of Artificial Sequence: Synthetic oligonucleotide
  Sense strand starting at position 2389 of SEQ ID NO: 588861
cugagaggauauguguuua

SEQ ID NO: 894999 - RNA, 19 nt, Artificial Sequence
  Description of Artificial Sequence: Synthetic oligonucleotide
  Antisense strand to SEQ ID NO: 894998
uaaacacauauccucucag

SEQ ID NO: 895000 - RNA, 19 nt, Artificial Sequence
  Description of Artificial Sequence: Synthetic oligonucleotide
  Sense strand starting at position 2393 of SEQ ID NO: 588861
gaggauauguguuuagaug

SEQ ID NO: 895001 - RNA, 19 nt, Artificial Sequence
  Description of Artificial Sequence: Synthetic oligonucleotide
  Antisense strand to SEQ ID NO: 895000
caucuaaacacauauccuc

SEQ ID NO: 895002 - RNA, 19 nt, Artificial Sequence
  Description of Artificial Sequence: Synthetic oligonucleotide
  Sense strand starting at position 2399 of SEQ ID NO: 588861
auguguuuagaugaugcuu

SEQ ID NO: 895003 - RNA, 19 nt, Artificial Sequence
  Description of Artificial Sequence: Synthetic oligonucleotide
  Antisense strand to SEQ ID NO: 895002
aagcaucaucuaaacacau

SEQ ID NO: 895004 - RNA, 19 nt, Artificial Sequence
  Description of Artificial Sequence: Synthetic oligonucleotide
  Sense strand starting at position 2404 of SEQ ID NO: 588861
uuuagaugaugcuuguuau

SEQ ID NO: 895005 - RNA, 19 nt, Artificial Sequence
  Description of Artificial Sequence: Synthetic oligonucleotide
  Antisense strand to SEQ ID NO: 895004
auaacaagcaucaucuaaa

SEQ ID NO: 895006 - RNA, 19 nt, Artificial Sequence
  Description of Artificial Sequence: Synthetic oligonucleotide
  Sense strand starting at position 2405 of SEQ ID NO: 588861
uuagaugaugcuuguuauu

SEQ ID NO: 895007 - RNA, 19 nt, Artificial Sequence
  Description of Artificial Sequence: Synthetic oligonucleotide
  Antisense strand to SEQ ID NO: 895006
aauaacaagcaucaucuaa

SEQ ID NO: 895008 - RNA, 19 nt, Artificial Sequence
  Description of Artificial Sequence: Synthetic oligonucleotide
  Sense strand starting at position 2407 of SEQ ID NO: 588861
agaugaugcuuguuauugu

SEQ ID NO: 895009 - RNA, 19 nt, Artificial Sequence
  Description of Artificial Sequence: Synthetic oligonucleotide
  Antisense strand to SEQ ID NO: 895008
acaauaacaagcaucaucu

SEQ ID NO: 895010 - RNA, 19 nt, Artificial Sequence
  Description of Artificial Sequence: Synthetic oligonucleotide
  Sense strand starting at position 2485 of SEQ ID NO: 588861
auccaaacugucuguaaga

SEQ ID NO: 895011 - RNA, 19 nt, Artificial Sequence
  Description of Artificial Sequence: Synthetic oligonucleotide
  Antisense strand to SEQ ID NO: 895010
ucuuacagacaguuuggau

SEQ ID NO: 895012 - RNA, 19 nt, Artificial Sequence
  Description of Artificial Sequence: Synthetic oligonucleotide
  Sense strand starting at position 2486 of SEQ ID NO: 588861
uccaaacugucuguaagaa

SEQ ID NO: 895013 - RNA, 19 nt, Artificial Sequence
  Description of Artificial Sequence: Synthetic oligonucleotide
  Antisense strand to SEQ ID NO: 895012
uucuuacagacaguuugga

SEQ ID NO: 895014 - RNA, 19 nt, Artificial Sequence
  Description of Artificial Sequence: Synthetic oligonucleotide
  Sense strand starting at position 2549 of SEQ ID NO: 588861
aggacuguccugggaaacu

SEQ ID NO: 895015 - RNA, 19 nt, Artificial Sequence
  Description of Artificial Sequence: Synthetic oligonucleotide
  Antisense strand to SEQ ID NO: 895014
aguuucccaggacaguccu

SEQ ID NO: 895016 - RNA, 19 nt, Artificial Sequence
  Description of Artificial Sequence: Synthetic oligonucleotide
  Sense strand starting at position 2609 of SEQ ID NO: 588861
cugccauaccuagagcuaa

SEQ ID NO: 895017 - RNA, 19 nt, Artificial Sequence
  Description of Artificial Sequence: Synthetic oligonucleotide
  Antisense strand to SEQ ID NO: 895016
uuagcucuagguauggcag

SEQ ID NO: 895018 - RNA, 19 nt, Artificial Sequence
  Description of Artificial Sequence: Synthetic oligonucleotide
  Sense strand starting at position 2644 of SEQ ID NO: 588861
gcuauugauguaggaagag

SEQ ID NO: 895019 - RNA, 19 nt, Artificial Sequence
  Description of Artificial Sequence: Synthetic oligonucleotide
  Antisense strand to SEQ ID NO: 895018
cucuuccuacaucaauagc

SEQ ID NO: 895020 - RNA, 19 nt, Artificial Sequence
  Description of Artificial Sequence: Synthetic oligonucleotide
  Sense strand starting at position 2693 of SEQ ID NO: 588861
ccagaagucagagaugugu

SEQ ID NO: 895021 - RNA, 19 nt, Artificial Sequence
  Description of Artificial Sequence: Synthetic oligonucleotide
  Antisense strand to SEQ ID NO: 895020
acacaucucugacuucugg

SEQ ID NO: 895022 - RNA, 19 nt, Artificial Sequence
  Description of Artificial Sequence: Synthetic oligonucleotide
  Sense strand starting at position 2695 of SEQ ID NO: 588861
agaagucagagauguguuu

SEQ ID NO: 895023 - RNA, 19 nt, Artificial Sequence
  Description of Artificial Sequence: Synthetic oligonucleotide
  Antisense strand to SEQ ID NO: 895022
aaacacaucucugacuucu

SEQ ID NO: 895024 - RNA, 19 nt, Artificial Sequence
  Description of Artificial Sequence: Synthetic oligonucleotide
  Sense strand starting at position 2819 of SEQ ID NO: 588861
gugcauugucuguagagaa

SEQ ID NO: 895025 - RNA, 19 nt, Artificial Sequence
  Description of Artificial Sequence: Synthetic oligonucleotide
  Antisense strand to SEQ ID NO: 895024
uucucuacagacaaugcac

SEQ ID NO: 895026 - RNA, 19 nt, Artificial Sequence
  Description of Artificial Sequence: Synthetic oligonucleotide
  Sense strand starting at position 3255 of SEQ ID NO: 588861
uuuaaauugcuguagugga

SEQ ID NO: 895027 - RNA, 19 nt, Artificial Sequence
  Description of Artificial Sequence: Synthetic oligonucleotide
  Antisense strand to SEQ ID NO: 895026
uccacuacagcaauuuaaa

SEQ ID NO: 895028 - RNA, 19 nt, Artificial Sequence
  Description of Artificial Sequence: Synthetic oligonucleotide
  Sense strand starting at position 3618 of SEQ ID NO: 588861
gguaacaugcuguaagcau

SEQ ID NO: 895029 - RNA, 19 nt, Artificial Sequence
  Description of Artificial Sequence: Synthetic oligonucleotide
  Antisense strand to SEQ ID NO: 895028
augcuuacagcauguuacc

SEQ ID NO: 895030 - RNA, 19 nt, Artificial Sequence
  Description of Artificial Sequence: Synthetic oligonucleotide
  Sense strand starting at position 3666 of SEQ ID NO: 588861
guagccuagauggguaaua

SEQ ID NO: 895031 - RNA, 19 nt, Artificial Sequence
  Description of Artificial Sequence: Synthetic oligonucleotide
  Antisense strand to SEQ ID NO: 895030
uauuacccaucuaggcuac

SEQ ID NO: 895032 - RNA, 19 nt, Artificial Sequence
  Description of Artificial Sequence: Synthetic oligonucleotide
  Sense strand starting at position 3801 of SEQ ID NO: 588861
uuaugcugacaugauuaua

SEQ ID NO: 895033 - RNA, 19 nt, Artificial Sequence
  Description of Artificial Sequence: Synthetic oligonucleotide
  Antisense strand to SEQ ID NO: 895032
uauaaucaugucagcauaa

SEQ ID NO: 895034 - RNA, 19 nt, Artificial Sequence
  Description of Artificial Sequence: Synthetic oligonucleotide
  Sense strand starting at position 3854 of SEQ ID NO: 588861
guuuauuucuuggcccuua

SEQ ID NO: 895035 - RNA, 19 nt, Artificial Sequence
  Description of Artificial Sequence: Synthetic oligonucleotide
  Antisense strand to SEQ ID NO: 895034
uaagggccaagaaauaaac

SEQ ID NO: 895036 - RNA, 19 nt, Artificial Sequence
  Description of Artificial Sequence: Synthetic oligonucleotide
  Sense strand starting at position 133 of SEQ ID NO: 588862
cgacucuuaucacuaggaa

SEQ ID NO: 895037 - RNA, 19 nt, Artificial Sequence
  Description of Artificial Sequence: Synthetic oligonucleotide
  Antisense strand to SEQ ID NO: 895036
uuccuagugauaagagucg

SEQ ID NO: 895038 - RNA, 19 nt, Artificial Sequence
  Description of Artificial Sequence: Synthetic oligonucleotide
  Sense strand starting at position 170 of SEQ ID NO: 588862
uucucuuuggccuaaagga

SEQ ID NO: 895039 - RNA, 19 nt, Artificial Sequence
  Description of Artificial Sequence: Synthetic oligonucleotide
  Antisense strand to SEQ ID NO: 895038
uccuuuaggccaaagagaa

SEQ ID NO: 895040 - RNA, 19 nt, Artificial Sequence
  Description of Artificial Sequence: Synthetic oligonucleotide
  Sense strand starting at position 185 of SEQ ID NO: 588862
aggaaaucaagucguucuu

SEQ ID NO: 895041 - RNA, 19 nt, Artificial Sequence
  Description of Artificial Sequence: Synthetic oligonucleotide
  Antisense strand to SEQ ID NO: 895040
aagaacgacuugauuuccu

SEQ ID NO: 895042 - RNA, 19 nt, Artificial Sequence
  Description of Artificial Sequence: Synthetic oligonucleotide
  Sense strand starting at position 207 of SEQ ID NO: 588862
agcguaugcuauuuaaaua

SEQ ID NO: 895043 - RNA, 19 nt, Artificial Sequence
  Description of Artificial Sequence: Synthetic oligonucleotide
  Antisense strand to SEQ ID NO: 895042
uauuuaaauagcauacgcu

SEQ ID NO: 895044 - RNA, 19 nt, Artificial Sequence
  Description of Artificial Sequence: Synthetic oligonucleotide
  Sense strand starting at position 313 of SEQ ID NO: 588862
agucaagauuugcuucugu

SEQ ID NO: 895045 - RNA, 19 nt, Artificial Sequence
  Description of Artificial Sequence: Synthetic oligonucleotide
  Antisense strand to SEQ ID NO: 895044
acagaagcaaaucuugacu

SEQ ID NO: 895046 - RNA, 19 nt, Artificial Sequence
  Description of Artificial Sequence: Synthetic oligonucleotide
  Sense strand starting at position 368 of SEQ ID NO: 588862
gggccauuccaggauguua

SEQ ID NO: 895047 - RNA, 19 nt, Artificial Sequence
  Description of Artificial Sequence: Synthetic oligonucleotide
  Antisense strand to SEQ ID NO: 895046
uaacauccuggaauggccc

SEQ ID NO: 895048 - RNA, 19 nt, Artificial Sequence
  Description of Artificial Sequence: Synthetic oligonucleotide
  Sense strand starting at position 370 of SEQ ID NO: 588862
gccauuccaggauguuauu

SEQ ID NO: 895049 - RNA, 19 nt, Artificial Sequence
  Description of Artificial Sequence: Synthetic oligonucleotide
  Antisense strand to SEQ ID NO: 895048
aauaacauccuggaauggc

SEQ ID NO: 895050 - RNA, 19 nt, Artificial Sequence
  Description of Artificial Sequence: Synthetic oligonucleotide
  Sense strand starting at position 373 of SEQ ID NO: 588862
auuccaggauguuauuuau

SEQ ID NO: 895051 - RNA, 19 nt, Artificial Sequence
  Description of Artificial Sequence: Synthetic oligonucleotide
  Antisense strand to SEQ ID NO: 895050
auaaauaacauccuggaau

SEQ ID NO: 895052 - RNA, 19 nt, Artificial Sequence
  Description of Artificial Sequence: Synthetic oligonucleotide
  Sense strand starting at position 469 of SEQ ID NO: 588862
aggccauuuccaugcccua

SEQ ID NO: 895053 - RNA, 19 nt, Artificial Sequence
  Description of Artificial Sequence: Synthetic oligonucleotide
  Antisense strand to SEQ ID NO: 895052
uagggcauggaaauggccu

SEQ ID NO: 895054 - RNA, 19 nt, Artificial Sequence
  Description of Artificial Sequence: Synthetic oligonucleotide
  Sense strand starting at position 834 of SEQ ID NO: 588862
ugagcaauggcucagacau

SEQ ID NO: 895055 - RNA, 19 nt, Artificial Sequence
  Description of Artificial Sequence: Synthetic oligonucleotide
  Antisense strand to SEQ ID NO: 895054
augucugagccauugcuca

SEQ ID NO: 895056 - RNA, 19 nt, Artificial Sequence
  Description of Artificial Sequence: Synthetic oligonucleotide
  Sense strand starting at position 1198 of SEQ ID NO: 588862
cagggugccucuuccaauu

SEQ ID NO: 895057 - RNA, 19 nt, Artificial Sequence
  Description of Artificial Sequence: Synthetic oligonucleotide
  Antisense strand to SEQ ID NO: 895056
aauuggaagaggcacccug

SEQ ID NO: 895058 - RNA, 19 nt, Artificial Sequence
  Description of Artificial Sequence: Synthetic oligonucleotide
  Sense strand starting at position 1209 of SEQ ID NO: 588862
uuccaauucgacugagaac

SEQ ID NO: 895059 - RNA, 19 nt, Artificial Sequence
  Description of Artificial Sequence: Synthetic oligonucleotide
  Antisense strand to SEQ ID NO: 895058
guucucagucgaauuggaa

SEQ ID NO: 895060 - RNA, 19 nt, Artificial Sequence
  Description of Artificial Sequence: Synthetic oligonucleotide
  Sense strand starting at position 1216 of SEQ ID NO: 588862
ucgacugagaacuguaauc

SEQ ID NO: 895061 - RNA, 19 nt, Artificial Sequence
  Description of Artificial Sequence: Synthetic oligonucleotide
  Antisense strand to SEQ ID NO: 895060
gauuacaguucucagucga

SEQ ID NO: 895062 - RNA, 19 nt, Artificial Sequence
  Description of Artificial Sequence: Synthetic oligonucleotide
  Sense strand starting at position 1279 of SEQ ID NO: 588862
gaggaagguggcggugaua

SEQ ID NO: 895063 - RNA, 19 nt, Artificial Sequence
  Description of Artificial Sequence: Synthetic oligonucleotide
  Antisense strand to SEQ ID NO: 895062
uaucaccgccaccuuccuc

SEQ ID NO: 895064 - RNA, 19 nt, Artificial Sequence
  Description of Artificial Sequence: Synthetic oligonucleotide
  Sense strand starting at position 1470 of SEQ ID NO: 588862
guucuuggugugcaguaau

SEQ ID NO: 895065 - RNA, 19 nt, Artificial Sequence
  Description of Artificial Sequence: Synthetic oligonucleotide
  Antisense strand to SEQ ID NO: 895064
auuacugcacaccaagaac

SEQ ID NO: 895066 - RNA, 19 nt, Artificial Sequence
  Description of Artificial Sequence: Synthetic oligonucleotide
  Sense strand starting at position 1473 of SEQ ID NO: 588862
cuuggugugcaguaauuag

SEQ ID NO: 895067 - RNA, 19 nt, Artificial Sequence
  Description of Artificial Sequence: Synthetic oligonucleotide
  Antisense strand to SEQ ID NO: 895066
cuaauuacugcacaccaag

SEQ ID NO: 895068 - RNA, 19 nt, Artificial Sequence
  Description of Artificial Sequence: Synthetic oligonucleotide
  Sense strand starting at position 2438 of SEQ ID NO: 588862
ccgcgaaagccugaagcuu

SEQ ID NO: 895069 - RNA, 19 nt, Artificial Sequence
  Description of Artificial Sequence: Synthetic oligonucleotide
  Antisense strand to SEQ ID NO: 895068
aagcuucaggcuuucgcgg

SEQ ID NO: 895070 - RNA, 19 nt, Artificial Sequence
  Description of Artificial Sequence: Synthetic oligonucleotide
  Sense strand starting at position 2485 of SEQ ID NO: 588862
agaacauggcuuuggaaac

SEQ ID NO: 895071 - RNA, 19 nt, Artificial Sequence
  Description of Artificial Sequence: Synthetic oligonucleotide
  Antisense strand to SEQ ID NO: 895070
guuuccaaagccauguucu

SEQ ID NO: 895072 - RNA, 19 nt, Artificial Sequence
  Description of Artificial Sequence: Synthetic oligonucleotide
  Sense strand starting at position 2534 of SEQ ID NO: 588862
ggauuauucuccucuucga

SEQ ID NO: 895073 - RNA, 19 nt, Artificial Sequence
  Description of Artificial Sequence: Synthetic oligonucleotide
  Antisense strand to SEQ ID NO: 895072
ucgaagaggagaauaaucc

SEQ ID NO: 895074 - RNA, 19 nt, Artificial Sequence
  Description of Artificial Sequence: Synthetic oligonucleotide
  Sense strand starting at position 2563 of SEQ ID NO: 588862
gugauuugucuguggacac

SEQ ID NO: 895075 - RNA, 19 nt, Artificial Sequence
  Description of Artificial Sequence: Synthetic oligonucleotide
  Antisense strand to SEQ ID NO: 895074
guguccacagacaaaucac

SEQ ID NO: 895076 - RNA, 19 nt, Artificial Sequence
  Description of Artificial Sequence: Synthetic oligonucleotide
  Sense strand starting at position 2589 of SEQ ID NO: 588862
gggaguguucccugcacaa

SEQ ID NO: 895077 - RNA, 19 nt, Artificial Sequence
  Description of Artificial Sequence: Synthetic oligonucleotide
  Antisense strand to SEQ ID NO: 895076
uugugcagggaacacuccc

SEQ ID NO: 895078 - RNA, 19 nt, Artificial Sequence
  Description of Artificial Sequence: Synthetic oligonucleotide
  Sense strand starting at position 2614 of SEQ ID NO: 588862
ggugauuucucuuagaacu

SEQ ID NO: 895079 - RNA, 19 nt, Artificial Sequence
  Description of Artificial Sequence: Synthetic oligonucleotide
  Antisense strand to SEQ ID NO: 895078
aguucuaagagaaaucacc

SEQ ID NO: 895080 - RNA, 19 nt, Artificial Sequence
  Description of Artificial Sequence: Synthetic oligonucleotide
  Sense strand starting at position 2648 of SEQ ID NO: 588862
gggacuugcucugugacca

SEQ ID NO: 895081 - RNA, 19 nt, Artificial Sequence
  Description of Artificial Sequence: Synthetic oligonucleotide
  Antisense strand to SEQ ID NO: 895080
uggucacagagcaaguccc

SEQ ID NO: 895082 - RNA, 19 nt, Artificial Sequence
  Description of Artificial Sequence: Synthetic oligonucleotide
  Sense strand starting at position 2822 of SEQ ID NO: 588862
ugguguugcuaagugaauu

SEQ ID NO: 895083 - RNA, 19 nt, Artificial Sequence
  Description of Artificial Sequence: Synthetic oligonucleotide
  Antisense strand to SEQ ID NO: 895082
aauucacuuagcaacacca

SEQ ID NO: 895084 - RNA, 19 nt, Artificial Sequence
  Description of Artificial Sequence: Synthetic oligonucleotide
  Sense strand starting at position 2823 of SEQ ID NO: 588862
gguguugcuaagugaauuu

SEQ ID NO: 895085 - RNA, 19 nt, Artificial Sequence
  Description of Artificial Sequence: Synthetic oligonucleotide
  Antisense strand to SEQ ID NO: 895084
aaauucacuuagcaacacc

SEQ ID NO: 895086 - RNA, 19 nt, Artificial Sequence
  Description of Artificial Sequence: Synthetic oligonucleotide
  Sense strand starting at position 2832 of SEQ ID NO: 588862
aagugaauuucugaugcuc

SEQ ID NO: 895087 - RNA, 19 nt, Artificial Sequence
  Description of Artificial Sequence: Synthetic oligonucleotide
  Antisense strand to SEQ ID NO: 895086
gagcaucagaaauucacuu

SEQ ID NO: 895088 - RNA, 19 nt, Artificial Sequence
  Description of Artificial Sequence: Synthetic oligonucleotide
  Sense strand starting at position 2928 of SEQ ID NO: 588862
agcuguaagcggucuucuu

SEQ ID NO: 895089 - RNA, 19 nt, Artificial Sequence
  Description of Artificial Sequence: Synthetic oligonucleotide
  Antisense strand to SEQ ID NO: 895088
aagaagaccgcuuacagcu

SEQ ID NO: 895090 - RNA, 19 nt, Artificial Sequence
  Description of Artificial Sequence: Synthetic oligonucleotide
  Sense strand starting at position 2929 of SEQ ID NO: 588862
gcuguaagcggucuucuua

SEQ ID NO: 895091 - RNA, 19 nt, Artificial Sequence
  Description of Artificial Sequence: Synthetic oligonucleotide
  Antisense strand to SEQ ID NO: 895090
uaagaagaccgcuuacagc

SEQ ID NO: 895092 - RNA, 19 nt, Artificial Sequence
  Description of Artificial Sequence: Synthetic oligonucleotide
  Sense strand starting at position 2952 of SEQ ID NO: 588862
cguuccuaaaguuaaguga

SEQ ID NO: 895093 - RNA, 19 nt, Artificial Sequence
  Description of Artificial Sequence: Synthetic oligonucleotide
  Antisense strand to SEQ ID NO: 895092
ucacuuaacuuuaggaacg

SEQ ID NO: 895094 - RNA, 19 nt, Artificial Sequence
  Description of Artificial Sequence: Synthetic oligonucleotide
  Sense strand starting at position 2984 of SEQ ID NO: 588862
uuugcuauuguagaaucua

SEQ ID NO: 895095 - RNA, 19 nt, Artificial Sequence
  Description of Artificial Sequence: Synthetic oligonucleotide
  Antisense strand to SEQ ID NO: 895094
uagauucuacaauagcaaa

SEQ ID NO: 895096 - RNA, 19 nt, Artificial Sequence
  Description of Artificial Sequence: Synthetic oligonucleotide
  Sense strand starting at position 2992 of SEQ ID NO: 588862
uguagaaucuacucugauu

SEQ ID NO: 895097 - RNA, 19 nt, Artificial Sequence
  Description of Artificial Sequence: Synthetic oligonucleotide
  Antisense strand to SEQ ID NO: 895096
aaucagaguagauucuaca

SEQ ID NO: 895098 - RNA, 19 nt, Artificial Sequence
  Description of Artificial Sequence: Synthetic oligonucleotide
  Sense strand starting at position 3003 of SEQ ID NO: 588862
cucugauuguggguaggga

SEQ ID NO: 895099 - RNA, 19 nt, Artificial Sequence
  Description of Artificial Sequence: Synthetic oligonucleotide
  Antisense strand to SEQ ID NO: 895098
ucccuacccacaaucagag

SEQ ID NO: 895100 - RNA, 19 nt, Artificial Sequence
  Description of Artificial Sequence: Synthetic oligonucleotide
  Sense strand starting at position 3139 of SEQ ID NO: 588862
uagacuuuaguaugaauga

SEQ ID NO: 895101 - RNA, 19 nt, Artificial Sequence
  Description of Artificial Sequence: Synthetic oligonucleotide
  Antisense strand to SEQ ID NO: 895100
ucauucauacuaaagucua

SEQ ID NO: 895102 - RNA, 19 nt, Artificial Sequence
  Description of Artificial Sequence: Synthetic oligonucleotide
  Sense strand starting at position 3154 of SEQ ID NO: 588862
augaguuuaucagcucuuu

SEQ ID NO: 895103 - RNA, 19 nt, Artificial Sequence
  Description of Artificial Sequence: Synthetic oligonucleotide
  Antisense strand to SEQ ID NO: 895102
aaagagcugauaaacucau

SEQ ID NO: 895104 - RNA, 19 nt, Artificial Sequence
  Description of Artificial Sequence: Synthetic oligonucleotide
  Sense strand starting at position 3179 of SEQ ID NO: 588862
aguaaacuuugagagaaag

SEQ ID NO: 895105 - RNA, 19 nt, Artificial Sequence
  Description of Artificial Sequence: Synthetic oligonucleotide
  Antisense strand to SEQ ID NO: 895104
cuuucucucaaaguuuacu

SEQ ID NO: 895106 - RNA, 19 nt, Artificial Sequence
  Description of Artificial Sequence: Synthetic oligonucleotide
  Sense strand starting at position 3222 of SEQ ID NO: 588862
uuggguguccgaggaagau

SEQ ID NO: 895107 - RNA, 19 nt, Artificial Sequence
  Description of Artificial Sequence: Synthetic oligonucleotide
  Antisense strand to SEQ ID NO: 895106
aucuuccucggacacccaa

SEQ ID NO: 895108 - RNA, 19 nt, Artificial Sequence
  Description of Artificial Sequence: Synthetic oligonucleotide
  Sense strand starting at position 3231 of SEQ ID NO: 588862
cgaggaagaucugaagaaa

SEQ ID NO: 895109 - RNA, 19 nt, Artificial Sequence
  Description of Artificial Sequence: Synthetic oligonucleotide
  Antisense strand to SEQ ID NO: 895108
uuucuucagaucuuccucg

SEQ ID NO: 895110 - RNA, 19 nt, Artificial Sequence
  Description of Artificial Sequence: Synthetic oligonucleotide
  Sense strand starting at position 3713 of SEQ ID NO: 588862
ggaaaucccgucuaccaaa

SEQ ID NO: 895111 - RNA, 19 nt, Artificial Sequence
  Description of Artificial Sequence: Synthetic oligonucleotide
  Antisense strand to SEQ ID NO: 895110
uuugguagacgggauuucc

SEQ ID NO: 895112 - RNA, 19 nt, Artificial Sequence
  Description of Artificial Sequence: Synthetic oligonucleotide
  Sense strand starting at position 3877 of SEQ ID NO: 588862
gggaaacccugucucauaa

SEQ ID NO: 895113 - RNA, 19 nt, Artificial Sequence
  Description of Artificial Sequence: Synthetic oligonucleotide
  Antisense strand to SEQ ID NO: 895112
uuaugagacaggguuuccc

SEQ ID NO: 895114 - RNA, 19 nt, Artificial Sequence
  Description of Artificial Sequence: Synthetic oligonucleotide
  Sense strand starting at position 3926 of SEQ ID NO: 588862
acagauuugucccacagua

SEQ ID NO: 895115 - RNA, 19 nt, Artificial Sequence
  Description of Artificial Sequence: Synthetic oligonucleotide
  Antisense strand to SEQ ID NO: 895114
uacugugggacaaaucugu

SEQ ID NO: 895116 - RNA, 19 nt, Artificial Sequence
  Description of Artificial Sequence: Synthetic oligonucleotide
  Sense strand starting at position 47 of SEQ ID NO: 588863
auuccacugcuaggauaua

SEQ ID NO: 895117 - RNA, 19 nt, Artificial Sequence
  Description of Artificial Sequence: Synthetic oligonucleotide
  Antisense strand to SEQ ID NO: 895116
uauauccuagcaguggaau

SEQ ID NO: 895118 - RNA, 19 nt, Artificial Sequence
  Description of Artificial Sequence: Synthetic oligonucleotide
  Sense strand starting at position 138 of SEQ ID NO: 588863
agguguuugcaggaauuac

SEQ ID NO: 895119 - RNA, 19 nt, Artificial Sequence
  Description of Artificial Sequence: Synthetic oligonucleotide
  Antisense strand to SEQ ID NO: 895118
guaauuccugcaaacaccu

SEQ ID NO: 895120 - RNA, 19 nt, Artificial Sequence
  Description of Artificial Sequence: Synthetic oligonucleotide
  Sense strand starting at position 368 of SEQ ID NO: 588863
cuaagacaugauuguguca

SEQ ID NO: 895121 - RNA, 19 nt, Artificial Sequence
  Description of Artificial Sequence: Synthetic oligonucleotide
  Antisense strand to SEQ ID NO: 895120
ugacacaaucaugucuuag

SEQ ID NO: 895122 - RNA, 19 nt, Artificial Sequence
  Description of Artificial Sequence: Synthetic oligonucleotide
  Sense strand starting at position 371 of SEQ ID NO: 588863
agacaugauugugucaauc

SEQ ID NO: 895123 - RNA, 19 nt, Artificial Sequence
  Description of Artificial Sequence: Synthetic oligonucleotide
  Antisense strand to SEQ ID NO: 895122
gauugacacaaucaugucu

SEQ ID NO: 895124 - RNA, 19 nt, Artificial Sequence
  Description of Artificial Sequence: Synthetic oligonucleotide
  Sense strand starting at position 490 of SEQ ID NO: 588863
cucuaaagagaugguucuu

SEQ ID NO: 895125 - RNA, 19 nt, Artificial Sequence
  Description of Artificial Sequence: Synthetic oligonucleotide
  Antisense strand to SEQ ID NO: 895124
aagaaccaucucuuuagag

SEQ ID NO: 895126 - RNA, 19 nt, Artificial Sequence
  Description of Artificial Sequence: Synthetic oligonucleotide
  Sense strand starting at position 495 of SEQ ID NO: 588863
aagagaugguucuuucuug

SEQ ID NO: 895127 - RNA, 19 nt, Artificial Sequence
  Description of Artificial Sequence: Synthetic oligonucleotide
  Antisense strand to SEQ ID NO: 895126
caagaaagaaccaucucuu

SEQ ID NO: 895128 - RNA, 19 nt, Artificial Sequence
  Description of Artificial Sequence: Synthetic oligonucleotide
  Sense strand starting at position 868 of SEQ ID NO: 588863
ucagaaccguagucaagaa

SEQ ID NO: 895129 - RNA, 19 nt, Artificial Sequence
  Description of Artificial Sequence: Synthetic oligonucleotide
  Antisense strand to SEQ ID NO: 895128
uucuugacuacgguucuga

SEQ ID NO: 895130 - RNA, 19 nt, Artificial Sequence
  Description of Artificial Sequence: Synthetic oligonucleotide
  Sense strand starting at position 1085 of SEQ ID NO: 588863
auaugaucagcaugaucaa

SEQ ID NO: 895131 - RNA, 19 nt, Artificial Sequence
  Description of Artificial Sequence: Synthetic oligonucleotide
  Antisense strand to SEQ ID NO: 895130
uugaucaugcugaucauau

SEQ ID NO: 895132 - RNA, 19 nt, Artificial Sequence
  Description of Artificial Sequence: Synthetic oligonucleotide
  Sense strand starting at position 1100 of SEQ ID NO: 588863
ucaagucaacaauguagaa

SEQ ID NO: 895133 - RNA, 19 nt, Artificial Sequence
  Description of Artificial Sequence: Synthetic oligonucleotide
  Antisense strand to SEQ ID NO: 895132
uucuacauuguugacuuga

SEQ ID NO: 895134 - RNA, 19 nt, Artificial Sequence
  Description of Artificial Sequence: Synthetic oligonucleotide
  Sense strand starting at position 1143 of SEQ ID NO: 588863
ccaugucagguuuaagauu

SEQ ID NO: 895135 - RNA, 19 nt, Artificial Sequence
  Description of Artificial Sequence: Synthetic oligonucleotide
  Antisense strand to SEQ ID NO: 895134
aaucuuaaaccugacaugg

SEQ ID NO: 895136 - RNA, 19 nt, Artificial Sequence
  Description of Artificial Sequence: Synthetic oligonucleotide
  Sense strand starting at position 1204 of SEQ ID NO: 588863
uugaauacugcugaaccua

SEQ ID NO: 895137 - RNA, 19 nt, Artificial Sequence
  Description of Artificial Sequence: Synthetic oligonucleotide
  Antisense strand to SEQ ID NO: 895136
uagguucagcaguauucaa

SEQ ID NO: 895138 - RNA, 19 nt, Artificial Sequence
  Description of Artificial Sequence: Synthetic oligonucleotide
  Sense strand starting at position 1397 of SEQ ID NO: 588863
uggcuaaggcuaugaacau

SEQ ID NO: 895139 - RNA, 19 nt, Artificial Sequence
  Description of Artificial Sequence: Synthetic oligonucleotide
  Antisense strand to SEQ ID NO: 895138
auguucauagccuuagcca

SEQ ID NO: 895140 - RNA, 19 nt, Artificial Sequence
  Description of Artificial Sequence: Synthetic oligonucleotide
  Sense strand starting at position 1403 of SEQ ID NO: 588863
aggcuaugaacauguagau

SEQ ID NO: 895141 - RNA, 19 nt, Artificial Sequence
  Description of Artificial Sequence: Synthetic oligonucleotide
  Antisense strand to SEQ ID NO: 895140
aucuacauguucauagccu

SEQ ID NO: 895142 - RNA, 19 nt, Artificial Sequence
  Description of Artificial Sequence: Synthetic oligonucleotide
  Sense strand starting at position 1507 of SEQ ID NO: 588863
ucuguacuauucucagacu

SEQ ID NO: 895143 - RNA, 19 nt, Artificial Sequence
  Description of Artificial Sequence: Synthetic oligonucleotide
  Antisense strand to SEQ ID NO: 895142
agucugagaauaguacaga

SEQ ID NO: 895144 - RNA, 19 nt, Artificial Sequence
  Description of Artificial Sequence: Synthetic oligonucleotide
  Sense strand starting at position 1549 of SEQ ID NO: 588863
uguggaguauaauccagaa

SEQ ID NO: 895145 - RNA, 19 nt, Artificial Sequence
  Description of Artificial Sequence: Synthetic oligonucleotide
  Antisense strand to SEQ ID NO: 895144
uucuggauuauacuccaca

SEQ ID NO: 895146 - RNA, 19 nt, Artificial Sequence
  Description of Artificial Sequence: Synthetic oligonucleotide
  Sense strand starting at position 1583 of SEQ ID NO: 588863
cuaagagaguucucugaug

SEQ ID NO: 895147 - RNA, 19 nt, Artificial Sequence
  Description of Artificial Sequence: Synthetic oligonucleotide
  Antisense strand to SEQ ID NO: 895146
caucagagaacucucuuag

SEQ ID NO: 895148 - RNA, 19 nt, Artificial Sequence
  Description of Artificial Sequence: Synthetic oligonucleotide
  Sense strand starting at position 1585 of SEQ ID NO: 588863
aagagaguucucugauggu

SEQ ID NO: 895149 - RNA, 19 nt, Artificial Sequence
  Description of Artificial Sequence: Synthetic oligonucleotide
  Antisense strand to SEQ ID NO: 895148
accaucagagaacucucuu

SEQ ID NO: 895150 - RNA, 19 nt, Artificial Sequence
  Description of Artificial Sequence: Synthetic oligonucleotide
  Sense strand starting at position 1695 of SEQ ID NO: 588863
agugcuaauggcuaccaga

SEQ ID NO: 895151 - RNA, 19 nt, Artificial Sequence
  Description of Artificial Sequence: Synthetic oligonucleotide
  Antisense strand to SEQ ID NO: 895150
ucugguagccauuagcacu

SEQ ID NO: 895152 - RNA, 19 nt, Artificial Sequence
  Description of Artificial Sequence: Synthetic oligonucleotide
  Sense strand starting at position 1724 of SEQ ID NO: 588863
ggccuaagacucgaauuaa

SEQ ID NO: 895153 - RNA, 19 nt, Artificial Sequence
  Description of Artificial Sequence: Synthetic oligonucleotide
  Antisense strand to SEQ ID NO: 895152
uuaauucgagucuuaggcc

SEQ ID NO: 895154 - RNA, 19 nt, Artificial Sequence
  Description of Artificial Sequence: Synthetic oligonucleotide
  Sense strand starting at position 1862 of SEQ ID NO: 588863
uggauauggugaucuucca

SEQ ID NO: 895155 - RNA, 19 nt, Artificial Sequence
  Description of Artificial Sequence: Synthetic oligonucleotide
  Antisense strand to SEQ ID NO: 895154
uggaagaucaccauaucca

SEQ ID NO: 895156 - RNA, 19 nt, Artificial Sequence
  Description of Artificial Sequence: Synthetic oligonucleotide
  Sense strand starting at position 1918 of SEQ ID NO: 588863
cuuacuuuauaguuaacga

SEQ ID NO: 895157 - RNA, 19 nt, Artificial Sequence
  Description of Artificial Sequence: Synthetic oligonucleotide
  Antisense strand to SEQ ID NO: 895156
ucguuaacuauaaaguaag

SEQ ID NO: 895158 - RNA, 19 nt, Artificial Sequence
  Description of Artificial Sequence: Synthetic oligonucleotide
  Sense strand starting at position 2225 of SEQ ID NO: 588863
ggauguggcacuuaugaag

SEQ ID NO: 895159 - RNA, 19 nt, Artificial Sequence
  Description of Artificial Sequence: Synthetic oligonucleotide
  Antisense strand to SEQ ID NO: 895158
cuucauaagugccacaucc

SEQ ID NO: 895160 - RNA, 19 nt, Artificial Sequence
  Description of Artificial Sequence: Synthetic oligonucleotide
  Sense strand starting at position 2231 of SEQ ID NO: 588863
ggcacuuaugaagauguau

SEQ ID NO: 895161 - RNA, 19 nt, Artificial Sequence
  Description of Artificial Sequence: Synthetic oligonucleotide
  Antisense strand to SEQ ID NO: 895160
auacaucuucauaagugcc

SEQ ID NO: 895162 - RNA, 19 nt, Artificial Sequence
  Description of Artificial Sequence: Synthetic oligonucleotide
  Sense strand starting at position 2272 of SEQ ID NO: 588863
ugguaaauccaauguuagg

SEQ ID NO: 895163 - RNA, 19 nt, Artificial Sequence
  Description of Artificial Sequence: Synthetic oligonucleotide
  Antisense strand to SEQ ID NO: 895162
ccuaacauuggauuuacca

SEQ ID NO: 895164 - RNA, 19 nt, Artificial Sequence
  Description of Artificial Sequence: Synthetic oligonucleotide
  Sense strand starting at position 2281 of SEQ ID NO: 588863
caauguuaggugcagagaa

SEQ ID NO: 895165 - RNA, 19 nt, Artificial Sequence
  Description of Artificial Sequence: Synthetic oligonucleotide
  Antisense strand to SEQ ID NO: 895164
uucucugcaccuaacauug

SEQ ID NO: 895166 - RNA, 19 nt, Artificial Sequence
  Description of Artificial Sequence: Synthetic oligonucleotide
  Sense strand starting at position 2371 of SEQ ID NO: 588863
cuuccagugcuauaaaggu

SEQ ID NO: 895167 - RNA, 19 nt, Artificial Sequence
  Description of Artificial Sequence: Synthetic oligonucleotide
  Antisense strand to SEQ ID NO: 895166
accuuuauagcacuggaag

SEQ ID NO: 895168 - RNA, 19 nt, Artificial Sequence
  Description of Artificial Sequence: Synthetic oligonucleotide
  Sense strand starting at position 2404 of SEQ ID NO: 588863
cagaacugucuagguacuu

SEQ ID NO: 895169 - RNA, 19 nt, Artificial Sequence
  Description of Artificial Sequence: Synthetic oligonucleotide
  Antisense strand to SEQ ID NO: 895168
aaguaccuagacaguucug

SEQ ID NO: 895170 - RNA, 19 nt, Artificial Sequence
  Description of Artificial Sequence: Synthetic oligonucleotide
  Sense strand starting at position 2463 of SEQ ID NO: 588863
acauaauucucaguuguag

SEQ ID NO: 895171 - RNA, 19 nt, Artificial Sequence
  Description of Artificial Sequence: Synthetic oligonucleotide
  Antisense strand to SEQ ID NO: 895170
cuacaacugagaauuaugu

SEQ ID NO: 895172 - RNA, 19 nt, Artificial Sequence
  Description of Artificial Sequence: Synthetic oligonucleotide
  Sense strand starting at position 2509 of SEQ ID NO: 588863
uuggaaagugagugauucu

SEQ ID NO: 895173 - RNA, 19 nt, Artificial Sequence
  Description of Artificial Sequence: Synthetic oligonucleotide
  Antisense strand to SEQ ID NO: 895172
agaaucacucacuuuccaa

SEQ ID NO: 895174 - RNA, 19 nt, Artificial Sequence
  Description of Artificial Sequence: Synthetic oligonucleotide
  Sense strand starting at position 2510 of SEQ ID NO: 588863
uggaaagugagugauucuu

SEQ ID NO: 895175 - RNA, 19 nt, Artificial Sequence
  Description of Artificial Sequence: Synthetic oligonucleotide
  Antisense strand to SEQ ID NO: 895174
aagaaucacucacuuucca

SEQ ID NO: 895176 - RNA, 19 nt, Artificial Sequence
  Description of Artificial Sequence: Synthetic oligonucleotide
  Sense strand starting at position 2512 of SEQ ID NO: 588863
gaaagugagugauucuuua

SEQ ID NO: 895177 - RNA, 19 nt, Artificial Sequence
  Description of Artificial Sequence: Synthetic oligonucleotide
  Antisense strand to SEQ ID NO: 895176
uaaagaaucacucacuuuc

SEQ ID NO: 895178 - RNA, 19 nt, Artificial Sequence
  Description of Artificial Sequence: Synthetic oligonucleotide
  Sense strand starting at position 2595 of SEQ ID NO: 588863
cuuuaucagaugcgggaaa

SEQ ID NO: 895179 - RNA, 19 nt, Artificial Sequence
  Description of Artificial Sequence: Synthetic oligonucleotide
  Antisense strand to SEQ ID NO: 895178
uuucccgcaucugauaaag

SEQ ID NO: 895180 - RNA, 19 nt, Artificial Sequence
  Description of Artificial Sequence: Synthetic oligonucleotide
  Sense strand starting at position 2770 of SEQ ID NO: 588863
cucccaaugcagugaaaua

SEQ ID NO: 895181 - RNA, 19 nt, Artificial Sequence
  Description of Artificial Sequence: Synthetic oligonucleotide
  Antisense strand to SEQ ID NO: 895180
uauuucacugcauugggag

SEQ ID NO: 895182 - RNA, 19 nt, Artificial Sequence
  Description of Artificial Sequence: Synthetic oligonucleotide
  Sense strand starting at position 2891 of SEQ ID NO: 588863
ugacuuuaauagguuagau

SEQ ID NO: 895183 - RNA, 19 nt, Artificial Sequence
  Description of Artificial Sequence: Synthetic oligonucleotide
  Antisense strand to SEQ ID NO: 895182
aucuaaccuauuaaaguca

SEQ ID NO: 895184 - RNA, 19 nt, Artificial Sequence
  Description of Artificial Sequence: Synthetic oligonucleotide
  Sense strand starting at position 3051 of SEQ ID NO: 588863
gaggcagucgcugagauaa

SEQ ID NO: 895185 - RNA, 19 nt, Artificial Sequence
  Description of Artificial Sequence: Synthetic oligonucleotide
  Antisense strand to SEQ ID NO: 895184
uuaucucagcgacugccuc

SEQ ID NO: 895186 - RNA, 19 nt, Artificial Sequence
  Description of Artificial Sequence: Synthetic oligonucleotide
  Sense strand starting at position 3115 of SEQ ID NO: 588863
ugagauuagcuggagcuca

SEQ ID NO: 895187 - RNA, 19 nt, Artificial Sequence
  Description of Artificial Sequence: Synthetic oligonucleotide
  Antisense strand to SEQ ID NO: 895186
ugagcuccagcuaaucuca

SEQ ID NO: 895188 - RNA, 19 nt, Artificial Sequence
  Description of Artificial Sequence: Synthetic oligonucleotide
  Sense strand starting at position 3178 of SEQ ID NO: 588863
gcugcuacuccugagauaa

SEQ ID NO: 895189 - RNA, 19 nt, Artificial Sequence
  Description of Artificial Sequence: Synthetic oligonucleotide
  Antisense strand to SEQ ID NO: 895188
uuaucucaggaguagcagc

SEQ ID NO: 895190 - RNA, 19 nt, Artificial Sequence
  Description of Artificial Sequence: Synthetic oligonucleotide
  Sense strand starting at position 3457 of SEQ ID NO: 588863
ccaaacuuucccuggugga

SEQ ID NO: 895191 - RNA, 19 nt, Artificial Sequence
  Description of Artificial Sequence: Synthetic oligonucleotide
  Antisense strand to SEQ ID NO: 895190
uccaccagggaaaguuugg

SEQ ID NO: 895192 - RNA, 19 nt, Artificial Sequence
  Description of Artificial Sequence: Synthetic oligonucleotide
  Sense strand starting at position 3458 of SEQ ID NO: 588863
caaacuuucccugguggau

SEQ ID NO: 895193 - RNA, 19 nt, Artificial Sequence
  Description of Artificial Sequence: Synthetic oligonucleotide
  Antisense strand to SEQ ID NO: 895192
auccaccagggaaaguuug

SEQ ID NO: 895194 - RNA, 19 nt, Artificial Sequence
  Description of Artificial Sequence: Synthetic oligonucleotide
  Sense strand starting at position 3857 of SEQ ID NO: 588863
cgcacuuaccaggauaaga

SEQ ID NO: 895195 - RNA, 19 nt, Artificial Sequence
  Description of Artificial Sequence: Synthetic oligonucleotide
  Antisense strand to SEQ ID NO: 895194
ucuuauccugguaagugcg

SEQ ID NO: 895196 - RNA, 19 nt, Artificial Sequence
  Description of Artificial Sequence: Synthetic oligonucleotide
  Sense strand starting at position 511 of SEQ ID NO: 588864
cuccuaggcugauccuaau

SEQ ID NO: 895197 - RNA, 19 nt, Artificial Sequence
  Description of Artificial Sequence: Synthetic oligonucleotide
  Antisense strand to SEQ ID NO: 895196
auuaggaucagccuaggag

SEQ ID NO: 895198 - RNA, 19 nt, Artificial Sequence
  Description of Artificial Sequence: Synthetic oligonucleotide
  Sense strand starting at position 527 of SEQ ID NO: 588864
aauaguuagcgcuaaauac

SEQ ID NO: 895199 - RNA, 19 nt, Artificial Sequence
  Description of Artificial Sequence: Synthetic oligonucleotide
  Antisense strand to SEQ ID NO: 895198
guauuuagcgcuaacuauu

SEQ ID NO: 895200 - RNA, 19 nt, Artificial Sequence
  Description of Artificial Sequence: Synthetic oligonucleotide
  Sense strand starting at position 536 of SEQ ID NO: 588864
cgcuaaauaccuuggaugu

SEQ ID NO: 895201 - RNA, 19 nt, Artificial Sequence
  Description of Artificial Sequence: Synthetic oligonucleotide
  Antisense strand to SEQ ID NO: 895200
acauccaagguauuuagcg

SEQ ID NO: 895202 - RNA, 19 nt, Artificial Sequence
  Description of Artificial Sequence: Synthetic oligonucleotide
  Sense strand starting at position 537 of SEQ ID NO: 588864
gcuaaauaccuuggauguu

SEQ ID NO: 895203 - RNA, 19 nt, Artificial Sequence
  Description of Artificial Sequence: Synthetic oligonucleotide
  Antisense strand to SEQ ID NO: 895202
aacauccaagguauuuagc

SEQ ID NO: 895204 - RNA, 19 nt, Artificial Sequence
  Description of Artificial Sequence: Synthetic oligonucleotide
  Sense strand starting at position 546 of SEQ ID NO: 588864
cuuggauguugauccaaga

SEQ ID NO: 895205 - RNA, 19 nt, Artificial Sequence
  Description of Artificial Sequence: Synthetic oligonucleotide
  Antisense strand to SEQ ID NO: 895204
ucuuggaucaacauccaag

SEQ ID NO: 895206 - RNA, 19 nt, Artificial Sequence
  Description of Artificial Sequence: Synthetic oligonucleotide
  Sense strand starting at position 566 of SEQ ID NO: 588864
ucuugaacaugaguuaaca

SEQ ID NO: 895207 - RNA, 19 nt, Artificial Sequence
  Description of Artificial Sequence: Synthetic oligonucleotide
  Antisense strand to SEQ ID NO: 895206
uguuaacucauguucaaga

SEQ ID NO: 895208 - RNA, 19 nt, Artificial Sequence
  Description of Artificial Sequence: Synthetic oligonucleotide
  Sense strand starting at position 626 of SEQ ID NO: 588864
ggcgguuuaccagauucuu

SEQ ID NO: 895209 - RNA, 19 nt, Artificial Sequence
  Description of Artificial Sequence: Synthetic oligonucleotide
  Antisense strand to SEQ ID NO: 895208
aagaaucugguaaaccgcc

SEQ ID NO: 895210 - RNA, 19 nt, Artificial Sequence
  Description of Artificial Sequence: Synthetic oligonucleotide
  Sense strand starting at position 647 of SEQ ID NO: 588864
cauacuuggcuacgagauu

SEQ ID NO: 895211 - RNA, 19 nt, Artificial Sequence
  Description of Artificial Sequence: Synthetic oligonucleotide
  Antisense strand to SEQ ID NO: 895210
aaucucguagccaaguaug

SEQ ID NO: 895212 - RNA, 19 nt, Artificial Sequence
  Description of Artificial Sequence: Synthetic oligonucleotide
  Sense strand starting at position 656 of SEQ ID NO: 588864
cuacgagauucucuaauug

SEQ ID NO: 895213 - RNA, 19 nt, Artificial Sequence
  Description of Artificial Sequence: Synthetic oligonucleotide
  Antisense strand to SEQ ID NO: 895212
caauuagagaaucucguag

SEQ ID NO: 895214 - RNA, 19 nt, Artificial Sequence
  Description of Artificial Sequence: Synthetic oligonucleotide
  Sense strand starting at position 709 of SEQ ID NO: 588864
ugaaacagguucuuaggua

SEQ ID NO: 895215 - RNA, 19 nt, Artificial Sequence
  Description of Artificial Sequence: Synthetic oligonucleotide
  Antisense strand to SEQ ID NO: 895214
uaccuaagaaccuguuuca

SEQ ID NO: 895216 - RNA, 19 nt, Artificial Sequence
  Description of Artificial Sequence: Synthetic oligonucleotide
  Sense strand starting at position 713 of SEQ ID NO: 588864
acagguucuuagguaaagu

SEQ ID NO: 895217 - RNA, 19 nt, Artificial Sequence
  Description of Artificial Sequence: Synthetic oligonucleotide
  Antisense strand to SEQ ID NO: 895216
acuuuaccuaagaaccugu

SEQ ID NO: 895218 - RNA, 19 nt, Artificial Sequence
  Description of Artificial Sequence: Synthetic oligonucleotide
  Sense strand starting at position 723 of SEQ ID NO: 588864
agguaaaguacucaggagu

SEQ ID NO: 895219 - RNA, 19 nt, Artificial Sequence
  Description of Artificial Sequence: Synthetic oligonucleotide
  Antisense strand to SEQ ID NO: 895218
acuccugaguacuuuaccu

SEQ ID NO: 895220 - RNA, 19 nt, Artificial Sequence
  Description of Artificial Sequence: Synthetic oligonucleotide
  Sense strand starting at position 742 of SEQ ID NO: 588864
ccuauuccaggcuguaaau

SEQ ID NO: 895221 - RNA, 19 nt, Artificial Sequence
  Description of Artificial Sequence: Synthetic oligonucleotide
  Antisense strand to SEQ ID NO: 895220
auuuacagccuggaauagg

SEQ ID NO: 895222 - RNA, 19 nt, Artificial Sequence
  Description of Artificial Sequence: Synthetic oligonucleotide
  Sense strand starting at position 754 of SEQ ID NO: 588864
uguaaaucaggcuaagcua

SEQ ID NO: 895223 - RNA, 19 nt, Artificial Sequence
  Description of Artificial Sequence: Synthetic oligonucleotide
  Antisense strand to SEQ ID NO: 895222
uagcuuagccugauuuaca

SEQ ID NO: 895224 - RNA, 19 nt, Artificial Sequence
  Description of Artificial Sequence: Synthetic oligonucleotide
  Sense strand starting at position 1266 of SEQ ID NO: 588864
gaacccauccuugggugaa

SEQ ID NO: 895225 - RNA, 19 nt, Artificial Sequence
  Description of Artificial Sequence: Synthetic oligonucleotide
  Antisense strand to SEQ ID NO: 895224
uucacccaaggauggguuc

SEQ ID NO: 895226 - RNA, 19 nt, Artificial Sequence
  Description of Artificial Sequence: Synthetic oligonucleotide
  Sense strand starting at position 1343 of SEQ ID NO: 588864
ggccuucuacucugggcaa

SEQ ID NO: 895227 - RNA, 19 nt, Artificial Sequence
  Description of Artificial Sequence: Synthetic oligonucleotide
  Antisense strand to SEQ ID NO: 895226
uugcccagaguagaaggcc

SEQ ID NO: 895228 - RNA, 19 nt, Artificial Sequence
  Description of Artificial Sequence: Synthetic oligonucleotide
  Sense strand starting at position 1345 of SEQ ID NO: 588864
ccuucuacucugggcaaga

SEQ ID NO: 895229 - RNA, 19 nt, Artificial Sequence
  Description of Artificial Sequence: Synthetic oligonucleotide
  Antisense strand to SEQ ID NO: 895228
ucuugcccagaguagaagg

SEQ ID NO: 895230 - RNA, 19 nt, Artificial Sequence
  Description of Artificial Sequence: Synthetic oligonucleotide
  Sense strand starting at position 2144 of SEQ ID NO: 588864
acggacuacccggaucaau

SEQ ID NO: 895231 - RNA, 19 nt, Artificial Sequence
  Description of Artificial Sequence: Synthetic oligonucleotide
  Antisense strand to SEQ ID NO: 895230
auugauccggguaguccgu

SEQ ID NO: 895232 - RNA, 19 nt, Artificial Sequence
  Description of Artificial Sequence: Synthetic oligonucleotide
  Sense strand starting at position 2258 of SEQ ID NO: 588864
cagcgauaggcaugaguaa

SEQ ID NO: 895233 - RNA, 19 nt, Artificial Sequence
  Description of Artificial Sequence: Synthetic oligonucleotide
  Antisense strand to SEQ ID NO: 895232
uuacucaugccuaucgcug

SEQ ID NO: 895234 - RNA, 19 nt, Artificial Sequence
  Description of Artificial Sequence: Synthetic oligonucleotide
  Sense strand starting at position 2259 of SEQ ID NO: 588864
agcgauaggcaugaguaau

SEQ ID NO: 895235 - RNA, 19 nt, Artificial Sequence
  Description of Artificial Sequence: Synthetic oligonucleotide
  Antisense strand to SEQ ID NO: 895234
auuacucaugccuaucgcu

SEQ ID NO: 895236 - RNA, 19 nt, Artificial Sequence
  Description of Artificial Sequence: Synthetic oligonucleotide
  Sense strand starting at position 2270 of SEQ ID NO: 588864
ugaguaaugugauuggcag

SEQ ID NO: 895237 - RNA, 19 nt, Artificial Sequence
  Description of Artificial Sequence: Synthetic oligonucleotide
  Antisense strand to SEQ ID NO: 895236
cugccaaucacauuacuca

SEQ ID NO: 895238 - RNA, 19 nt, Artificial Sequence
  Description of Artificial Sequence: Synthetic oligonucleotide
  Sense strand starting at position 2276 of SEQ ID NO: 588864
augugauuggcaggcggaa

SEQ ID NO: 895239 - RNA, 19 nt, Artificial Sequence
  Description of Artificial Sequence: Synthetic oligonucleotide
  Antisense strand to SEQ ID NO: 895238
uuccgccugccaaucacau

SEQ ID NO: 895240 - RNA, 19 nt, Artificial Sequence
  Description of Artificial Sequence: Synthetic oligonucleotide
  Sense strand starting at position 2304 of SEQ ID NO: 588864
uccaguuuccauugaugaa

SEQ ID NO: 895241 - RNA, 19 nt, Artificial Sequence
  Description of Artificial Sequence: Synthetic oligonucleotide
  Antisense strand to SEQ ID NO: 895240
uucaucaauggaaacugga

SEQ ID NO: 895242 - RNA, 19 nt, Artificial Sequence
  Description of Artificial Sequence: Synthetic oligonucleotide
  Sense strand starting at position 2319 of SEQ ID NO: 588864
ugaacuaacucuguuuaga

SEQ ID NO: 895243 - RNA, 19 nt, Artificial Sequence
  Description of Artificial Sequence: Synthetic oligonucleotide
  Antisense strand to SEQ ID NO: 895242
ucuaaacagaguuaguuca

SEQ ID NO: 895244 - RNA, 19 nt, Artificial Sequence
  Description of Artificial Sequence: Synthetic oligonucleotide
  Sense strand starting at position 2332 of SEQ ID NO: 588864
uuuagacugcgggaucuua

SEQ ID NO: 895245 - RNA, 19 nt, Artificial Sequence
  Description of Artificial Sequence: Synthetic oligonucleotide
  Antisense strand to SEQ ID NO: 895244
uaagaucccgcagucuaaa

SEQ ID NO: 895246 - RNA, 19 nt, Artificial Sequence
  Description of Artificial Sequence: Synthetic oligonucleotide
  Sense strand starting at position 2402 of SEQ ID NO: 588864
caggauuugugugagagca

SEQ ID NO: 895247 - RNA, 19 nt, Artificial Sequence
  Description of Artificial Sequence: Synthetic oligonucleotide
  Antisense strand to SEQ ID NO: 895246
ugcucucacacaaauccug

SEQ ID NO: 895248 - RNA, 19 nt, Artificial Sequence
  Description of Artificial Sequence: Synthetic oligonucleotide
  Sense strand starting at position 2418 of SEQ ID NO: 588864
gcauuugugaacugcaguu

SEQ ID NO: 895249 - RNA, 19 nt, Artificial Sequence
  Description of Artificial Sequence: Synthetic oligonucleotide
  Antisense strand to SEQ ID NO: 895248
aacugcaguucacaaaugc

SEQ ID NO: 895250 - RNA, 19 nt, Artificial Sequence
  Description of Artificial Sequence: Synthetic oligonucleotide
  Sense strand starting at position 2472 of SEQ ID NO: 588864
aguuaauugacccaugggu

SEQ ID NO: 895251 - RNA, 19 nt, Artificial Sequence
  Description of Artificial Sequence: Synthetic oligonucleotide
  Antisense strand to SEQ ID NO: 895250
acccaugggucaauuaacu

SEQ ID NO: 895252 - RNA, 19 nt, Artificial Sequence
  Description of Artificial Sequence: Synthetic oligonucleotide
  Sense strand starting at position 2474 of SEQ ID NO: 588864
uuaauugacccauggguca

SEQ ID NO: 895253 - RNA, 19 nt, Artificial Sequence
  Description of Artificial Sequence: Synthetic oligonucleotide
  Antisense strand to SEQ ID NO: 895252
ugacccaugggucaauuaa

SEQ ID NO: 895254 - RNA, 19 nt, Artificial Sequence
  Description of Artificial Sequence: Synthetic oligonucleotide
  Sense strand starting at position 2494 of SEQ ID NO: 588864
ggccgaaagcacuaaguau

SEQ ID NO: 895255 - RNA, 19 nt, Artificial Sequence
  Description of Artificial Sequence: Synthetic oligonucleotide
  Antisense strand to SEQ ID NO: 895254
auacuuagugcuuucggcc

SEQ ID NO: 895256 - RNA, 19 nt, Artificial Sequence
  Description of Artificial Sequence: Synthetic oligonucleotide
  Sense strand starting at position 2685 of SEQ ID NO: 588864
caaugaucaggcgaauuac

SEQ ID NO: 895257 - RNA, 19 nt, Artificial Sequence
  Description of Artificial Sequence: Synthetic oligonucleotide
  Antisense strand to SEQ ID NO: 895256
guaauucgccugaucauug

SEQ ID NO: 895258 - RNA, 19 nt, Artificial Sequence
  Description of Artificial Sequence: Synthetic oligonucleotide
  Sense strand starting at position 2694 of SEQ ID NO: 588864
ggcgaauuacaguaagcag

SEQ ID NO: 895259 - RNA, 19 nt, Artificial Sequence
  Description of Artificial Sequence: Synthetic oligonucleotide
  Antisense strand to SEQ ID NO: 895258
cugcuuacuguaauucgcc

SEQ ID NO: 895260 - RNA, 19 nt, Artificial Sequence
  Description of Artificial Sequence: Synthetic oligonucleotide
  Sense strand starting at position 2744 of SEQ ID NO: 588864
gaaccagugaucgacguga

SEQ ID NO: 895261 - RNA, 19 nt, Artificial Sequence
  Description of Artificial Sequence: Synthetic oligonucleotide
  Antisense strand to SEQ ID NO: 895260
ucacgucgaucacugguuc

SEQ ID NO: 895262 - RNA, 19 nt, Artificial Sequence
  Description of Artificial Sequence: Synthetic oligonucleotide
  Sense strand starting at position 2746 of SEQ ID NO: 588864
accagugaucgacgugaua

SEQ ID NO: 895263 - RNA, 19 nt, Artificial Sequence
  Description of Artificial Sequence: Synthetic oligonucleotide
  Antisense strand to SEQ ID NO: 895262
uaucacgucgaucacuggu

SEQ ID NO: 895264 - RNA, 19 nt, Artificial Sequence
  Description of Artificial Sequence: Synthetic oligonucleotide
  Sense strand starting at position 2758 of SEQ ID NO: 588864
cgugauauuugagcagcua

SEQ ID NO: 895265 - RNA, 19 nt, Artificial Sequence
  Description of Artificial Sequence: Synthetic oligonucleotide
  Antisense strand to SEQ ID NO: 895264
uagcugcucaaauaucacg

SEQ ID NO: 895266 - RNA, 19 nt, Artificial Sequence
  Description of Artificial Sequence: Synthetic oligonucleotide
  Sense strand starting at position 3302 of SEQ ID NO: 588864
ucaagaagaaguggucuga

SEQ ID NO: 895267 - RNA, 19 nt, Artificial Sequence
  Description of Artificial Sequence: Synthetic oligonucleotide
  Antisense strand to SEQ ID NO: 895266
ucagaccacuucuucuuga

SEQ ID NO: 895268 - RNA, 19 nt, Artificial Sequence
  Description of Artificial Sequence: Synthetic oligonucleotide
  Sense strand starting at position 3306 of SEQ ID NO: 588864
gaagaaguggucugaccuc

SEQ ID NO: 895269 - RNA, 19 nt, Artificial Sequence
  Description of Artificial Sequence: Synthetic oligonucleotide
  Antisense strand to SEQ ID NO: 895268
gaggucagaccacuucuuc

SEQ ID NO: 895270 - RNA, 19 nt, Artificial Sequence
  Description of Artificial Sequence: Synthetic oligonucleotide
  Sense strand starting at position 3803 of SEQ ID NO: 588864
ggacuucugacgugcugga

SEQ ID NO: 895271 - RNA, 19 nt, Artificial Sequence
  Description of Artificial Sequence: Synthetic oligonucleotide
  Antisense strand to SEQ ID NO: 895270
uccagcacgucagaagucc

SEQ ID NO: 895272 - RNA, 19 nt, Artificial Sequence
  Description of Artificial Sequence: Synthetic oligonucleotide
  Sense strand starting at position 3834 of SEQ ID NO: 588864
gagcauugccaccauguuu

SEQ ID NO: 895273 - RNA, 19 nt, Artificial Sequence
  Description of Artificial Sequence: Synthetic oligonucleotide
  Antisense strand to SEQ ID NO: 895272
aaacaugguggcaaugcuc

SEQ ID NO: 895274 - RNA, 19 nt, Artificial Sequence
  Description of Artificial Sequence: Synthetic oligonucleotide
  Sense strand starting at position 3842 of SEQ ID NO: 588864
ccaccauguuuguccauga

SEQ ID NO: 895275 - RNA, 19 nt, Artificial Sequence
  Description of Artificial Sequence: Synthetic oligonucleotide
  Antisense strand to SEQ ID NO: 895274
ucauggacaaacauggugg

SEQ ID NO: 895276 - RNA, 19 nt, Artificial Sequence
  Description of Artificial Sequence: Synthetic oligonucleotide
  Sense strand starting at position 70 of SEQ ID NO: 588865
ccggccauucgagguagua

SEQ ID NO: 895277 - RNA, 19 nt, Artificial Sequence
  Description of Artificial Sequence: Synthetic oligonucleotide
  Antisense strand to SEQ ID NO: 895276
uacuaccucgaauggccgg

SEQ ID NO: 895278 - RNA, 19 nt, Artificial Sequence
  Description of Artificial Sequence: Synthetic oligonucleotide
  Sense strand starting at position 72 of SEQ ID NO: 588865
ggccauucgagguaguaau

SEQ ID NO: 895279 - RNA, 19 nt, Artificial Sequence
  Description of Artificial Sequence: Synthetic oligonucleotide
  Antisense strand to SEQ ID NO: 895278
auuacuaccucgaauggcc

SEQ ID NO: 895280 - RNA, 19 nt, Artificial Sequence
  Description of Artificial Sequence: Synthetic oligonucleotide
  Sense strand starting at position 179 of SEQ ID NO: 588865
gugacacccucucuuugaa

SEQ ID NO: 895281 - RNA, 19 nt, Artificial Sequence
  Description of Artificial Sequence: Synthetic oligonucleotide
  Antisense strand to SEQ ID NO: 895280
uucaaagagagggugucac

SEQ ID NO: 895282 - RNA, 19 nt, Artificial Sequence
  Description of Artificial Sequence: Synthetic oligonucleotide
  Sense strand starting at position 210 of SEQ ID NO: 588865
acaucucaggcauaacagu

SEQ ID NO: 895283 - RNA, 19 nt, Artificial Sequence
  Description of Artificial Sequence: Synthetic oligonucleotide
  Antisense strand to SEQ ID NO: 895282
acuguuaugccugagaugu

SEQ ID NO: 895284 - RNA, 19 nt, Artificial Sequence
  Description of Artificial Sequence: Synthetic oligonucleotide
  Sense strand starting at position 219 of SEQ ID NO: 588865
gcauaacagucucugagag

SEQ ID NO: 895285 - RNA, 19 nt, Artificial Sequence
  Description of Artificial Sequence: Synthetic oligonucleotide
  Antisense strand to SEQ ID NO: 895284
cucucagagacuguuaugc

SEQ ID NO: 895286 - RNA, 19 nt, Artificial Sequence
  Description of Artificial Sequence: Synthetic oligonucleotide
  Sense strand starting at position 220 of SEQ ID NO: 588865
cauaacagucucugagaga

SEQ ID NO: 895287 - RNA, 19 nt, Artificial Sequence
  Description of Artificial Sequence: Synthetic oligonucleotide
  Antisense strand to SEQ ID NO: 895286
ucucucagagacuguuaug

SEQ ID NO: 895288 - RNA, 19 nt, Artificial Sequence
  Description of Artificial Sequence: Synthetic oligonucleotide
  Sense strand starting at position 239 of SEQ ID NO: 588865
cccacugcuuugcucagaa

SEQ ID NO: 895289 - RNA, 19 nt, Artificial Sequence
  Description of Artificial Sequence: Synthetic oligonucleotide
  Antisense strand to SEQ ID NO: 895288
uucugagcaaagcaguggg

SEQ ID NO: 895290 - RNA, 19 nt, Artificial Sequence
  Description of Artificial Sequence: Synthetic oligonucleotide
  Sense strand starting at position 377 of SEQ ID NO: 588865
ucuuaacaucucuguggua

SEQ ID NO: 895291 - RNA, 19 nt, Artificial Sequence
  Description of Artificial Sequence: Synthetic oligonucleotide
  Antisense strand to SEQ ID NO: 895290
uaccacagagauguuaaga

SEQ ID NO: 895292 - RNA, 19 nt, Artificial Sequence
  Description of Artificial Sequence: Synthetic oligonucleotide
  Sense strand starting at position 378 of SEQ ID NO: 588865
cuuaacaucucugugguau

SEQ ID NO: 895293 - RNA, 19 nt, Artificial Sequence
  Description of Artificial Sequence: Synthetic oligonucleotide
  Antisense strand to SEQ ID NO: 895292
auaccacagagauguuaag

SEQ ID NO: 895294 - RNA, 19 nt, Artificial Sequence
  Description of Artificial Sequence: Synthetic oligonucleotide
  Sense strand starting at position 379 of SEQ ID NO: 588865
uuaacaucucugugguauc

SEQ ID NO: 895295 - RNA, 19 nt, Artificial Sequence
  Description of Artificial Sequence: Synthetic oligonucleotide
  Antisense strand to SEQ ID NO: 895294
gauaccacagagauguuaa

SEQ ID NO: 895296 - RNA, 19 nt, Artificial Sequence
  Description of Artificial Sequence: Synthetic oligonucleotide
  Sense strand starting at position 512 of SEQ ID NO: 588865
ggagaaaucugagccaagu

SEQ ID NO: 895297 - RNA, 19 nt, Artificial Sequence
  Description of Artificial Sequence: Synthetic oligonucleotide
  Antisense strand to SEQ ID NO: 895296
acuuggcucagauuucucc

SEQ ID NO: 895298 - RNA, 19 nt, Artificial Sequence
  Description of Artificial Sequence: Synthetic oligonucleotide
  Sense strand starting at position 529 of SEQ ID NO: 588865
guggcaauuuccuuucuaa

SEQ ID NO: 895299 - RNA, 19 nt, Artificial Sequence
  Description of Artificial Sequence: Synthetic oligonucleotide
  Antisense strand to SEQ ID NO: 895298
uuagaaaggaaauugccac

SEQ ID NO: 895300 - RNA, 19 nt, Artificial Sequence
  Description of Artificial Sequence: Synthetic oligonucleotide
  Sense strand starting at position 642 of SEQ ID NO: 588865
accucucuuuaguuguuua

SEQ ID NO: 895301 - RNA, 19 nt, Artificial Sequence
  Description of Artificial Sequence: Synthetic oligonucleotide
  Antisense strand to SEQ ID NO: 895300
uaaacaacuaaagagaggu

SEQ ID NO: 895302 - RNA, 19 nt, Artificial Sequence
  Description of Artificial Sequence: Synthetic oligonucleotide
  Sense strand starting at position 654 of SEQ ID NO: 588865
uuguuuaacccugggcaaa

SEQ ID NO: 895303 - RNA, 19 nt, Artificial Sequence
  Description of Artificial Sequence: Synthetic oligonucleotide
  Antisense strand to SEQ ID NO: 895302
uuugcccaggguuaaacaa

SEQ ID NO: 895304 - RNA, 19 nt, Artificial Sequence
  Description of Artificial Sequence: Synthetic oligonucleotide
  Sense strand starting at position 655 of SEQ ID NO: 588865
uguuuaacccugggcaaau

SEQ ID NO: 895305 - RNA, 19 nt, Artificial Sequence
  Description of Artificial Sequence: Synthetic oligonucleotide
  Antisense strand to SEQ ID NO: 895304
auuugcccaggguuaaaca

SEQ ID NO: 895306 - RNA, 19 nt, Artificial Sequence
  Description of Artificial Sequence: Synthetic oligonucleotide
  Sense strand starting at position 656 of SEQ ID NO: 588865
guuuaacccugggcaaaua

SEQ ID NO: 895307 - RNA, 19 nt, Artificial Sequence
  Description of Artificial Sequence: Synthetic oligonucleotide
  Antisense strand to SEQ ID NO: 895306
uauuugcccaggguuaaac

SEQ ID NO: 895308 - RNA, 19 nt, Artificial Sequence
  Description of Artificial Sequence: Synthetic oligonucleotide
  Sense strand starting at position 736 of SEQ ID NO: 588865
ggcucuugugaggauggua

SEQ ID NO: 895309 - RNA, 19 nt, Artificial Sequence
  Description of Artificial Sequence: Synthetic oligonucleotide
  Antisense strand to SEQ ID NO: 895308
uaccauccucacaagagcc

SEQ ID NO: 895310 - RNA, 19 nt, Artificial Sequence
  Description of Artificial Sequence: Synthetic oligonucleotide
  Sense strand starting at position 1036 of SEQ ID NO: 588865
uccugagcuguucggauaa

SEQ ID NO: 895311 - RNA, 19 nt, Artificial Sequence
  Description of Artificial Sequence: Synthetic oligonucleotide
  Antisense strand to SEQ ID NO: 895310
uuauccgaacagcucagga

SEQ ID NO: 895312 - RNA, 19 nt, Artificial Sequence
  Description of Artificial Sequence: Synthetic oligonucleotide
  Sense strand starting at position 1267 of SEQ ID NO: 588865
ccgaacuaacguugugagu

SEQ ID NO: 895313 - RNA, 19 nt, Artificial Sequence
  Description of Artificial Sequence: Synthetic oligonucleotide
  Antisense strand to SEQ ID NO: 895312
acucacaacguuaguucgg

SEQ ID NO: 895314 - RNA, 19 nt, Artificial Sequence
  Description of Artificial Sequence: Synthetic oligonucleotide
  Sense strand starting at position 2129 of SEQ ID NO: 588865
gcugauugccugcaugaag

SEQ ID NO: 895315 - RNA, 19 nt, Artificial Sequence
  Description of Artificial Sequence: Synthetic oligonucleotide
  Antisense strand to SEQ ID NO: 895314
cuucaugcaggcaaucagc

SEQ ID NO: 895316 - RNA, 19 nt, Artificial Sequence
  Description of Artificial Sequence: Synthetic oligonucleotide
  Sense strand starting at position 2183 of SEQ ID NO: 588865
ccagaugaggcucagcuua

SEQ ID NO: 895317 - RNA, 19 nt, Artificial Sequence
  Description of Artificial Sequence: Synthetic oligonucleotide
  Antisense strand to SEQ ID NO: 895316
uaagcugagccucaucugg

SEQ ID NO: 895318 - RNA, 19 nt, Artificial Sequence
  Description of Artificial Sequence: Synthetic oligonucleotide
  Sense strand starting at position 2185 of SEQ ID NO: 588865
agaugaggcucagcuuaca

SEQ ID NO: 895319 - RNA, 19 nt, Artificial Sequence
  Description of Artificial Sequence: Synthetic oligonucleotide
  Antisense strand to SEQ ID NO: 895318
uguaagcugagccucaucu

SEQ ID NO: 895320 - RNA, 19 nt, Artificial Sequence
  Description of Artificial Sequence: Synthetic oligonucleotide
  Sense strand starting at position 2286 of SEQ ID NO: 588865
gugcaacaccaucaagagu

SEQ ID NO: 895321 - RNA, 19 nt, Artificial Sequence
  Description of Artificial Sequence: Synthetic oligonucleotide
  Antisense strand to SEQ ID NO: 895320
acucuugaugguguugcac

SEQ ID NO: 895322 - RNA, 19 nt, Artificial Sequence
  Description of Artificial Sequence: Synthetic oligonucleotide
  Sense strand starting at position 2297 of SEQ ID NO: 588865
ucaagaguccuuggcagca

SEQ ID NO: 895323 - RNA, 19 nt, Artificial Sequence
  Description of Artificial Sequence: Synthetic oligonucleotide
  Antisense strand to SEQ ID NO: 895322
ugcugccaaggacucuuga

SEQ ID NO: 895324 - RNA, 19 nt, Artificial Sequence
  Description of Artificial Sequence: Synthetic oligonucleotide
  Sense strand starting at position 2320 of SEQ ID NO: 588865
cuaagagcauucuagaaac

SEQ ID NO: 895325 - RNA, 19 nt, Artificial Sequence
  Description of Artificial Sequence: Synthetic oligonucleotide
  Antisense strand to SEQ ID NO: 895324
guuucuagaaugcucuuag

SEQ ID NO: 895326 - RNA, 19 nt, Artificial Sequence
  Description of Artificial Sequence: Synthetic oligonucleotide
  Sense strand starting at position 2480 of SEQ ID NO: 588865
ggcacagauuaagucugua

SEQ ID NO: 895327 - RNA, 19 nt, Artificial Sequence
  Description of Artificial Sequence: Synthetic oligonucleotide
  Antisense strand to SEQ ID NO: 895326
uacagacuuaaucugugcc

SEQ ID NO: 895328 - RNA, 19 nt, Artificial Sequence
  Description of Artificial Sequence: Synthetic oligonucleotide
  Sense strand starting at position 2483 of SEQ ID NO: 588865
acagauuaagucuguagac

SEQ ID NO: 895329 - RNA, 19 nt, Artificial Sequence
  Description of Artificial Sequence: Synthetic oligonucleotide
  Antisense strand to SEQ ID NO: 895328
gucuacagacuuaaucugu

SEQ ID NO: 895330 - RNA, 19 nt, Artificial Sequence
  Description of Artificial Sequence: Synthetic oligonucleotide
  Sense strand starting at position 2531 of SEQ ID NO: 588865
ggaauuaaucuauggucau

SEQ ID NO: 895331 - RNA, 19 nt, Artificial Sequence
  Description of Artificial Sequence: Synthetic oligonucleotide
  Antisense strand to SEQ ID NO: 895330
augaccauagauuaauucc

SEQ ID NO: 895332 - RNA, 19 nt, Artificial Sequence
  Description of Artificial Sequence: Synthetic oligonucleotide
  Sense strand starting at position 2544 of SEQ ID NO: 588865
ggucauuuguuucuuaguu

SEQ ID NO: 895333 - RNA, 19 nt, Artificial Sequence
  Description of Artificial Sequence: Synthetic oligonucleotide
  Antisense strand to SEQ ID NO: 895332
aacuaagaaacaaaugacc

SEQ ID NO: 895334 - RNA, 19 nt, Artificial Sequence
  Description of Artificial Sequence: Synthetic oligonucleotide
  Sense strand starting at position 2545 of SEQ ID NO: 588865
gucauuuguuucuuaguuu

SEQ ID NO: 895335 - RNA, 19 nt, Artificial Sequence
  Description of Artificial Sequence: Synthetic oligonucleotide
  Antisense strand to SEQ ID NO: 895334
aaacuaagaaacaaaugac

SEQ ID NO: 895336 - RNA, 19 nt, Artificial Sequence
  Description of Artificial Sequence: Synthetic oligonucleotide
  Sense strand starting at position 2586 of SEQ ID NO: 588865
uacugucauuccucgcuga

SEQ ID NO: 895337 - RNA, 19 nt, Artificial Sequence
  Description of Artificial Sequence: Synthetic oligonucleotide
  Antisense strand to SEQ ID NO: 895336
ucagcgaggaaugacagua

SEQ ID NO: 895338 - RNA, 19 nt, Artificial Sequence
  Description of Artificial Sequence: Synthetic oligonucleotide
  Sense strand starting at position 3411 of SEQ ID NO: 588865
gcagaugagagacguguuu

SEQ ID NO: 895339 - RNA, 19 nt, Artificial Sequence
  Description of Artificial Sequence: Synthetic oligonucleotide
  Antisense strand to SEQ ID NO: 895338
aaacacgucucucaucugc

SEQ ID NO: 895340 - RNA, 19 nt, Artificial Sequence
  Description of Artificial Sequence: Synthetic oligonucleotide
  Sense strand starting at position 3462 of SEQ ID NO: 588865
gaaccauaagcauguauga

SEQ ID NO: 895341 - RNA, 19 nt, Artificial Sequence
  Description of Artificial Sequence: Synthetic oligonucleotide
  Antisense strand to SEQ ID NO: 895340
ucauacaugcuuaugguuc

SEQ ID NO: 895342 - RNA, 19 nt, Artificial Sequence
  Description of Artificial Sequence: Synthetic oligonucleotide
  Sense strand starting at position 3471 of SEQ ID NO: 588865
gcauguaugacccaggcau

SEQ ID NO: 895343 - RNA, 19 nt, Artificial Sequence
  Description of Artificial Sequence: Synthetic oligonucleotide
  Antisense strand to SEQ ID NO: 895342
augccugggucauacaugc

SEQ ID NO: 895344 - RNA, 19 nt, Artificial Sequence
  Description of Artificial Sequence: Synthetic oligonucleotide
  Sense strand starting at position 3840 of SEQ ID NO: 588865
gagagaaaguaagaugguu

SEQ ID NO: 895345 - RNA, 19 nt, Artificial Sequence
  Description of Artificial Sequence: Synthetic oligonucleotide
  Antisense strand to SEQ ID NO: 895344
aaccaucuuacuuucucuc

SEQ ID NO: 895346 - RNA, 19 nt, Artificial Sequence
  Description of Artificial Sequence: Synthetic oligonucleotide
  Sense strand starting at position 3846 of SEQ ID NO: 588865
aaguaagaugguugagaug

SEQ ID NO: 895347 - RNA, 19 nt, Artificial Sequence
  Description of Artificial Sequence: Synthetic oligonucleotide
  Antisense strand to SEQ ID NO: 895346
caucucaaccaucuuacuu

SEQ ID NO: 895348 - RNA, 19 nt, Artificial Sequence
  Description of Artificial Sequence: Synthetic oligonucleotide
  Sense strand starting at position 3868 of SEQ ID NO: 588865
uccuaaggcuuguucugaa

SEQ ID NO: 895349 - RNA, 19 nt, Artificial Sequence
  Description of Artificial Sequence: Synthetic oligonucleotide
  Antisense strand to SEQ ID NO: 895348
uucagaacaagccuuagga

SEQ ID NO: 895350 - RNA, 19 nt, Artificial Sequence
  Description of Artificial Sequence: Synthetic oligonucleotide
  Sense strand starting at position 3878 of SEQ ID NO: 588865
uguucugaaagcugaagga

SEQ ID NO: 895351 - RNA, 19 nt, Artificial Sequence
  Description of Artificial Sequence: Synthetic oligonucleotide
  Antisense strand to SEQ ID NO: 895350
uccuucagcuuucagaaca

SEQ ID NO: 895352 - RNA, 19 nt, Artificial Sequence
  Description of Artificial Sequence: Synthetic oligonucleotide
  Sense strand starting at position 3907 of SEQ ID NO: 588865
guugcccucucacuagaua

SEQ ID NO: 895353 - RNA, 19 nt, Artificial Sequence
  Description of Artificial Sequence: Synthetic oligonucleotide
  Antisense strand to SEQ ID NO: 895352
uaucuagugagagggcaac

SEQ ID NO: 895354 - RNA, 19 nt, Artificial Sequence
  Description of Artificial Sequence: Synthetic oligonucleotide
  Sense strand starting at position 3949 of SEQ ID NO: 588865
uuugcauguugauuaaaug

SEQ ID NO: 895355 - RNA, 19 nt, Artificial Sequence
  Description of Artificial Sequence: Synthetic oligonucleotide
  Antisense strand to SEQ ID NO: 895354
cauuuaaucaacaugcaaa

SEQ ID NO: 895356 - RNA, 19 nt, Artificial Sequence
  Description of Artificial Sequence: Synthetic oligonucleotide
  Sense strand starting at position 67 of SEQ ID NO: 588866
gcacuuuagugucccaaga

SEQ ID NO: 895357 - RNA, 19 nt, Artificial Sequence
  Description of Artificial Sequence: Synthetic oligonucleotide
  Antisense strand to SEQ ID NO: 895356
ucuugggacacuaaagugc

SEQ ID NO: 895358 - RNA, 19 nt, Artificial Sequence
  Description of Artificial Sequence: Synthetic oligonucleotide
  Sense strand starting at position 94 of SEQ ID NO: 588866
agagacuguuccuuggcaa

SEQ ID NO: 895359 - RNA, 19 nt, Artificial Sequence
  Description of Artificial Sequence: Synthetic oligonucleotide
  Antisense strand to SEQ ID NO: 895358
uugccaaggaacagucucu

SEQ ID NO: 895360 - RNA, 19 nt, Artificial Sequence
  Description of Artificial Sequence: Synthetic oligonucleotide
  Sense strand starting at position 95 of SEQ ID NO: 588866
gagacuguuccuuggcaau

SEQ ID NO: 895361 - RNA, 19 nt, Artificial Sequence
  Description of Artificial Sequence: Synthetic oligonucleotide
  Antisense strand to SEQ ID NO: 895360
auugccaaggaacagucuc

SEQ ID NO: 895362 - RNA, 19 nt, Artificial Sequence
  Description of Artificial Sequence: Synthetic oligonucleotide
  Sense strand starting at position 97 of SEQ ID NO: 588866
gacuguuccuuggcaauga

SEQ ID NO: 895363 - RNA, 19 nt, Artificial Sequence
  Description of Artificial Sequence: Synthetic oligonucleotide
  Antisense strand to SEQ ID NO: 895362
ucauugccaaggaacaguc

SEQ ID NO: 895364 - RNA, 19 nt, Artificial Sequence
  Description of Artificial Sequence: Synthetic oligonucleotide
  Sense strand starting at position 101 of SEQ ID NO: 588866
guuccuuggcaaugagguu

SEQ ID NO: 895365 - RNA, 19 nt, Artificial Sequence
  Description of Artificial Sequence: Synthetic oligonucleotide
  Antisense strand to SEQ ID NO: 895364
aaccucauugccaaggaac

SEQ ID NO: 895366 - RNA, 19 nt, Artificial Sequence
  Description of Artificial Sequence: Synthetic oligonucleotide
  Sense strand starting at position 174 of SEQ ID NO: 588866
cuguuaaugguuggcaacu

SEQ ID NO: 895367 - RNA, 19 nt, Artificial Sequence
  Description of Artificial Sequence: Synthetic oligonucleotide
  Antisense strand to SEQ ID NO: 895366
aguugccaaccauuaacag

SEQ ID NO: 895368 - RNA, 19 nt, Artificial Sequence
  Description of Artificial Sequence: Synthetic oligonucleotide
  Sense strand starting at position 302 of SEQ ID NO: 588866
ggagguaggaaaugucauu

SEQ ID NO: 895369 - RNA, 19 nt, Artificial Sequence
  Description of Artificial Sequence: Synthetic oligonucleotide
  Antisense strand to SEQ ID NO: 895368
aaugacauuuccuaccucc

SEQ ID NO: 895370 - RNA, 19 nt, Artificial Sequence
  Description of Artificial Sequence: Synthetic oligonucleotide
  Sense strand starting at position 580 of SEQ ID NO: 588866
uccuguguccuccggauuu

SEQ ID NO: 895371 - RNA, 19 nt, Artificial Sequence
  Description of Artificial Sequence: Synthetic oligonucleotide
  Antisense strand to SEQ ID NO: 895370
aaauccggaggacacagga

SEQ ID NO: 895372 - RNA, 19 nt, Artificial Sequence
  Description of Artificial Sequence: Synthetic oligonucleotide
  Sense strand starting at position 595 of SEQ ID NO: 588866
auuucucacugggagaaau

SEQ ID NO: 895373 - RNA, 19 nt, Artificial Sequence
  Description of Artificial Sequence: Synthetic oligonucleotide
  Antisense strand to SEQ ID NO: 895372
auuucucccagugagaaau

SEQ ID NO: 895374 - RNA, 19 nt, Artificial Sequence
  Description of Artificial Sequence: Synthetic oligonucleotide
  Sense strand starting at position 656 of SEQ ID NO: 588866
gcuagcucgcguccucaaa

SEQ ID NO: 895375 - RNA, 19 nt, Artificial Sequence
  Description of Artificial Sequence: Synthetic oligonucleotide
  Antisense strand to SEQ ID NO: 895374
uuugaggacgcgagcuagc

SEQ ID NO: 895376 - RNA, 19 nt, Artificial Sequence
  Description of Artificial Sequence: Synthetic oligonucleotide
  Sense strand starting at position 777 of SEQ ID NO: 588866
augaccuggcgcgaucaaa

SEQ ID NO: 895377 - RNA, 19 nt, Artificial Sequence
  Description of Artificial Sequence: Synthetic oligonucleotide
  Antisense strand to SEQ ID NO: 895376
uuugaucgcgccaggucau

SEQ ID NO: 895378 - RNA, 19 nt, Artificial Sequence
  Description of Artificial Sequence: Synthetic oligonucleotide
  Sense strand starting at position 866 of SEQ ID NO: 588866
uuuaacuuccuguggacau

SEQ ID NO: 895379 - RNA, 19 nt, Artificial Sequence
  Description of Artificial Sequence: Synthetic oligonucleotide
  Antisense strand to SEQ ID NO: 895378
auguccacaggaaguuaaa

SEQ ID NO: 895380 - RNA, 19 nt, Artificial Sequence
  Description of Artificial Sequence: Synthetic oligonucleotide
  Sense strand starting at position 879 of SEQ ID NO: 588866
ggacaucugugcucucaga

SEQ ID NO: 895381 - RNA, 19 nt, Artificial Sequence
  Description of Artificial Sequence: Synthetic oligonucleotide
  Antisense strand to SEQ ID NO: 895380
ucugagagcacagaugucc

SEQ ID NO: 895382 - RNA, 19 nt, Artificial Sequence
  Description of Artificial Sequence: Synthetic oligonucleotide
  Sense strand starting at position 886 of SEQ ID NO: 588866
ugugcucucagacaagagu

SEQ ID NO: 895383 - RNA, 19 nt, Artificial Sequence
  Description of Artificial Sequence: Synthetic oligonucleotide
  Antisense strand to SEQ ID NO: 895382
acucuugucugagagcaca

SEQ ID NO: 895384 - RNA, 19 nt, Artificial Sequence
  Description of Artificial Sequence: Synthetic oligonucleotide
  Sense strand starting at position 920 of SEQ ID NO: 588866
uagggugacugcuccaaau

SEQ ID NO: 895385 - RNA, 19 nt, Artificial Sequence
  Description of Artificial Sequence: Synthetic oligonucleotide
  Antisense strand to SEQ ID NO: 895384
auuuggagcagucacccua

SEQ ID NO: 895386 - RNA, 19 nt, Artificial Sequence
  Description of Artificial Sequence: Synthetic oligonucleotide
  Sense strand starting at position 922 of SEQ ID NO: 588866
gggugacugcuccaaaucu

SEQ ID NO: 895387 - RNA, 19 nt, Artificial Sequence
  Description of Artificial Sequence: Synthetic oligonucleotide
  Antisense strand to SEQ ID NO: 895386
agauuuggagcagucaccc

SEQ ID NO: 895388 - RNA, 19 nt, Artificial Sequence
  Description of Artificial Sequence: Synthetic oligonucleotide
  Sense strand starting at position 1315 of SEQ ID NO: 588866
cacagcgaugucugagagu

SEQ ID NO: 895389 - RNA, 19 nt, Artificial Sequence
  Description of Artificial Sequence: Synthetic oligonucleotide
  Antisense strand to SEQ ID NO: 895388
acucucagacaucgcugug

SEQ ID NO: 895390 - RNA, 19 nt, Artificial Sequence
  Description of Artificial Sequence: Synthetic oligonucleotide
  Sense strand starting at position 2191 of SEQ ID NO: 588866
caguuaacucuuggagaag

SEQ ID NO: 895391 - RNA, 19 nt, Artificial Sequence
  Description of Artificial Sequence: Synthetic oligonucleotide
  Antisense strand to SEQ ID NO: 895390
cuucuccaagaguuaacug

SEQ ID NO: 895392 - RNA, 19 nt, Artificial Sequence
  Description of Artificial Sequence: Synthetic oligonucleotide
  Sense strand starting at position 2434 of SEQ ID NO: 588866
ccaguucagcugugaggau

SEQ ID NO: 895393 - RNA, 19 nt, Artificial Sequence
  Description of Artificial Sequence: Synthetic oligonucleotide
  Antisense strand to SEQ ID NO: 895392
auccucacagcugaacugg

SEQ ID NO: 895394 - RNA, 19 nt, Artificial Sequence
  Description of Artificial Sequence: Synthetic oligonucleotide
  Sense strand starting at position 2973 of SEQ ID NO: 588866
guuguacugagccaggauu

SEQ ID NO: 895395 - RNA, 19 nt, Artificial Sequence
  Description of Artificial Sequence: Synthetic oligonucleotide
  Antisense strand to SEQ ID NO: 895394
aauccuggcucaguacaac

SEQ ID NO: 895396 - RNA, 19 nt, Artificial Sequence
  Description of Artificial Sequence: Synthetic oligonucleotide
  Sense strand starting at position 3336 of SEQ ID NO: 588866
ccacuaccgggauggauaa

SEQ ID NO: 895397 - RNA, 19 nt, Artificial Sequence
  Description of Artificial Sequence: Synthetic oligonucleotide
  Antisense strand to SEQ ID NO: 895396
uuauccaucccgguagugg

SEQ ID NO: 895398 - RNA, 19 nt, Artificial Sequence
  Description of Artificial Sequence: Synthetic oligonucleotide
  Sense strand starting at position 3426 of SEQ ID NO: 588866
acucguaaagaggguguua

SEQ ID NO: 895399 - RNA, 19 nt, Artificial Sequence
  Description of Artificial Sequence: Synthetic oligonucleotide
  Antisense strand to SEQ ID NO: 895398
uaacacccucuuuacgagu

SEQ ID NO: 895400 - RNA, 19 nt, Artificial Sequence
  Description of Artificial Sequence: Synthetic oligonucleotide
  Sense strand starting at position 3428 of SEQ ID NO: 588866
ucguaaagaggguguuaca

SEQ ID NO: 895401 - RNA, 19 nt, Artificial Sequence
  Description of Artificial Sequence: Synthetic oligonucleotide
  Antisense strand to SEQ ID NO: 895400
uguaacacccucuuuacga

SEQ ID NO: 895402 - RNA, 19 nt, Artificial Sequence
  Description of Artificial Sequence: Synthetic oligonucleotide
  Sense strand starting at position 3438 of SEQ ID NO: 588866
gguguuacaagauguugau

SEQ ID NO: 895403 - RNA, 19 nt, Artificial Sequence
  Description of Artificial Sequence: Synthetic oligonucleotide
  Antisense strand to SEQ ID NO: 895402
aucaacaucuuguaacacc

SEQ ID NO: 895404 - RNA, 19 nt, Artificial Sequence
  Description of Artificial Sequence: Synthetic oligonucleotide
  Sense strand starting at position 3447 of SEQ ID NO: 588866
agauguugauacuuacaca

SEQ ID NO: 895405 - RNA, 19 nt, Artificial Sequence
  Description of Artificial Sequence: Synthetic oligonucleotide
  Antisense strand to SEQ ID NO: 895404
uguguaaguaucaacaucu

SEQ ID NO: 895406 - RNA, 19 nt, Artificial Sequence
  Description of Artificial Sequence: Synthetic oligonucleotide
  Sense strand starting at position 3477 of SEQ ID NO: 588866
aacagagauuaugacaagu

SEQ ID NO: 895407 - RNA, 19 nt, Artificial Sequence
  Description of Artificial Sequence: Synthetic oligonucleotide
  Antisense strand to SEQ ID NO: 895406
acuugucauaaucucuguu

SEQ ID NO: 895408 - RNA, 19 nt, Artificial Sequence
  Description of Artificial Sequence: Synthetic oligonucleotide
  Sense strand starting at position 3479 of SEQ ID NO: 588866
cagagauuaugacaaguga

SEQ ID NO: 895409 - RNA, 19 nt, Artificial Sequence
  Description of Artificial Sequence: Synthetic oligonucleotide
  Antisense strand to SEQ ID NO: 895408
ucacuugucauaaucucug

SEQ ID NO: 895410 - RNA, 19 nt, Artificial Sequence
  Description of Artificial Sequence: Synthetic oligonucleotide
  Sense strand starting at position 3527 of SEQ ID NO: 588866
ugauaacgagucugugaga

SEQ ID NO: 895411 - RNA, 19 nt, Artificial Sequence
  Description of Artificial Sequence: Synthetic oligonucleotide
  Antisense strand to SEQ ID NO: 895410
ucucacagacucguuauca

SEQ ID NO: 895412 - RNA, 19 nt, Artificial Sequence
  Description of Artificial Sequence: Synthetic oligonucleotide
  Sense strand starting at position 3528 of SEQ ID NO: 588866
gauaacgagucugugagaa

SEQ ID NO: 895413 - RNA, 19 nt, Artificial Sequence
  Description of Artificial Sequence: Synthetic oligonucleotide
  Antisense strand to SEQ ID NO: 895412
uucucacagacucguuauc

SEQ ID NO: 895414 - RNA, 19 nt, Artificial Sequence
  Description of Artificial Sequence: Synthetic oligonucleotide
  Sense strand starting at position 3579 of SEQ ID NO: 588866
ugaggucgcacuggauuau

SEQ ID NO: 895415 - RNA, 19 nt, Artificial Sequence
  Description of Artificial Sequence: Synthetic oligonucleotide
  Antisense strand to SEQ ID NO: 895414
auaauccagugcgaccuca

SEQ ID NO: 895416 - RNA, 19 nt, Artificial Sequence
  Description of Artificial Sequence: Synthetic oligonucleotide
  Sense strand starting at position 3589 of SEQ ID NO: 588866
cuggauuauccaggcagau

SEQ ID NO: 895417 - RNA, 19 nt, Artificial Sequence
  Description of Artificial Sequence: Synthetic oligonucleotide
  Antisense strand to SEQ ID NO: 895416
aucugccuggauaauccag

SEQ ID NO: 895418 - RNA, 19 nt, Artificial Sequence
  Description of Artificial Sequence: Synthetic oligonucleotide
  Sense strand starting at position 3621 of SEQ ID NO: 588866
ccgcuaaauccaugacacu

SEQ ID NO: 895419 - RNA, 19 nt, Artificial Sequence
  Description of Artificial Sequence: Synthetic oligonucleotide
  Antisense strand to SEQ ID NO: 895418
agugucauggauuuagcgg

SEQ ID NO: 895420 - RNA, 19 nt, Artificial Sequence
  Description of Artificial Sequence: Synthetic oligonucleotide
  Sense strand starting at position 3754 of SEQ ID NO: 588866
ggaccuccuugucuggaaa

SEQ ID NO: 895421 - RNA, 19 nt, Artificial Sequence
  Description of Artificial Sequence: Synthetic oligonucleotide
  Antisense strand to SEQ ID NO: 895420
uuuccagacaaggaggucc

SEQ ID NO: 895422 - RNA, 19 nt, Artificial Sequence
  Description of Artificial Sequence: Synthetic oligonucleotide
  Sense strand starting at position 3755 of SEQ ID NO: 588866
gaccuccuugucuggaaau

SEQ ID NO: 895423 - RNA, 19 nt, Artificial Sequence
  Description of Artificial Sequence: Synthetic oligonucleotide
  Antisense strand to SEQ ID NO: 895422
auuuccagacaaggagguc

SEQ ID NO: 895424 - RNA, 19 nt, Artificial Sequence
  Description of Artificial Sequence: Synthetic oligonucleotide
  Sense strand starting at position 3757 of SEQ ID NO: 588866
ccuccuugucuggaaauaa

SEQ ID NO: 895425 - RNA, 19 nt, Artificial Sequence
  Description of Artificial Sequence: Synthetic oligonucleotide
  Antisense strand to SEQ ID NO: 895424
uuauuuccagacaaggagg

SEQ ID NO: 895426 - RNA, 19 nt, Artificial Sequence
  Description of Artificial Sequence: Synthetic oligonucleotide
  Sense strand starting at position 3812 of SEQ ID NO: 588866
gcuuccaaaugagugaauu

SEQ ID NO: 895427 - RNA, 19 nt, Artificial Sequence
  Description of Artificial Sequence: Synthetic oligonucleotide
  Antisense strand to SEQ ID NO: 895426
aauucacucauuuggaagc

SEQ ID NO: 895428 - RNA, 19 nt, Artificial Sequence
  Description of Artificial Sequence: Synthetic oligonucleotide
  Sense strand starting at position 3813 of SEQ ID NO: 588866
cuuccaaaugagugaauua

SEQ ID NO: 895429 - RNA, 19 nt, Artificial Sequence
  Description of Artificial Sequence: Synthetic oligonucleotide
  Antisense strand to SEQ ID NO: 895428
uaauucacucauuuggaag

SEQ ID NO: 895430 - RNA, 19 nt, Artificial Sequence
  Description of Artificial Sequence: Synthetic oligonucleotide
  Sense strand starting at position 3865 of SEQ ID NO: 588866
uuauaaccaugcuugauga

SEQ ID NO: 895431 - RNA, 19 nt, Artificial Sequence
  Description of Artificial Sequence: Synthetic oligonucleotide
  Antisense strand to SEQ ID NO: 895430
ucaucaagcaugguuauaa

SEQ ID NO: 895432 - RNA, 19 nt, Artificial Sequence
  Description of Artificial Sequence: Synthetic oligonucleotide
  Sense strand starting at position 3894 of SEQ ID NO: 588866
uucugagcaucugcaaaua

SEQ ID NO: 895433 - RNA, 19 nt, Artificial Sequence
  Description of Artificial Sequence: Synthetic oligonucleotide
  Antisense strand to SEQ ID NO: 895432
uauuugcagaugcucagaa

SEQ ID NO: 895434 - RNA, 19 nt, Artificial Sequence
  Description of Artificial Sequence: Synthetic oligonucleotide
  Sense strand starting at position 3911 of SEQ ID NO: 588866
uagaguugucagggcauua

SEQ ID NO: 895435 - RNA, 19 nt, Artificial Sequence
  Description of Artificial Sequence: Synthetic oligonucleotide
  Antisense strand to SEQ ID NO: 895434
uaaugcccugacaacucua

SEQ ID NO: 895436 - RNA, 19 nt, Artificial Sequence
  Description of Artificial Sequence: Synthetic oligonucleotide
  Sense strand starting at position 17 of SEQ ID NO: 588867
auuacuguacauugagauu

SEQ ID NO: 895437 - RNA, 19 nt, Artificial Sequence
  Description of Artificial Sequence: Synthetic oligonucleotide
  Antisense strand to SEQ ID NO: 895436
aaucucaauguacaguaau

SEQ ID NO: 895438 - RNA, 19 nt, Artificial Sequence
  Description of Artificial Sequence: Synthetic oligonucleotide
  Sense strand starting at position 28 of SEQ ID NO: 588867
uugagauucucagauuuaa

SEQ ID NO: 895439 - RNA, 19 nt, Artificial Sequence
  Description of Artificial Sequence: Synthetic oligonucleotide
  Antisense strand to SEQ ID NO: 895438
uuaaaucugagaaucucaa

SEQ ID NO: 895440 - RNA, 19 nt, Artificial Sequence
  Description of Artificial Sequence: Synthetic oligonucleotide
  Sense strand starting at position 174 of SEQ ID NO: 588867
ggauaaugugcacagcauu

SEQ ID NO: 895441 - RNA, 19 nt, Artificial Sequence
  Description of Artificial Sequence: Synthetic oligonucleotide
  Antisense strand to SEQ ID NO: 895440
aaugcugugcacauuaucc

SEQ ID NO: 895442 - RNA, 19 nt, Artificial Sequence
  Description of Artificial Sequence: Synthetic oligonucleotide
  Sense strand starting at position 197 of SEQ ID NO: 588867
gguaguacaguuuagacuu

SEQ ID NO: 895443 - RNA, 19 nt, Artificial Sequence
  Description of Artificial Sequence: Synthetic oligonucleotide
  Antisense strand to SEQ ID NO: 895442
aagucuaaacuguacuacc

SEQ ID NO: 895444 - RNA, 19 nt, Artificial Sequence
  Description of Artificial Sequence: Synthetic oligonucleotide
  Sense strand starting at position 231 of SEQ ID NO: 588867
uacugugaacaugguuaaa

SEQ ID NO: 895445 - RNA, 19 nt, Artificial Sequence
  Description of Artificial Sequence: Synthetic oligonucleotide
  Antisense strand to SEQ ID NO: 895444
uuuaaccauguucacagua

SEQ ID NO: 895446 - RNA, 19 nt, Artificial Sequence
  Description of Artificial Sequence: Synthetic oligonucleotide
  Sense strand starting at position 233 of SEQ ID NO: 588867
cugugaacaugguuaaauu

SEQ ID NO: 895447 - RNA, 19 nt, Artificial Sequence
  Description of Artificial Sequence: Synthetic oligonucleotide
  Antisense strand to SEQ ID NO: 895446
aauuuaaccauguucacag

SEQ ID NO: 895448 - RNA, 19 nt, Artificial Sequence
  Description of Artificial Sequence: Synthetic oligonucleotide
  Sense strand starting at position 242 of SEQ ID NO: 588867
ugguuaaauuucuuugcua

SEQ ID NO: 895449 - RNA, 19 nt, Artificial Sequence
  Description of Artificial Sequence: Synthetic oligonucleotide
  Antisense strand to SEQ ID NO: 895448
uagcaaagaaauuuaacca

SEQ ID NO: 895450 - RNA, 19 nt, Artificial Sequence
  Description of Artificial Sequence: Synthetic oligonucleotide
  Sense strand starting at position 289 of SEQ ID NO: 588867
uguggauaauucuuugcaa

SEQ ID NO: 895451 - RNA, 19 nt, Artificial Sequence
  Description of Artificial Sequence: Synthetic oligonucleotide
  Antisense strand to SEQ ID NO: 895450
uugcaaagaauuauccaca

SEQ ID NO: 895452 - RNA, 19 nt, Artificial Sequence
  Description of Artificial Sequence: Synthetic oligonucleotide
  Sense strand starting at position 290 of SEQ ID NO: 588867
guggauaauucuuugcaau

SEQ ID NO: 895453 - RNA, 19 nt, Artificial Sequence
  Description of Artificial Sequence: Synthetic oligonucleotide
  Antisense strand to SEQ ID NO: 895452
auugcaaagaauuauccac

SEQ ID NO: 895454 - RNA, 19 nt, Artificial Sequence
  Description of Artificial Sequence: Synthetic oligonucleotide
  Sense strand starting at position 291 of SEQ ID NO: 588867
uggauaauucuuugcaauu

SEQ ID NO: 895455 - RNA, 19 nt, Artificial Sequence
  Description of Artificial Sequence: Synthetic oligonucleotide
  Antisense strand to SEQ ID NO: 895454
aauugcaaagaauuaucca

SEQ ID NO: 895456 - RNA, 19 nt, Artificial Sequence
  Description of Artificial Sequence: Synthetic oligonucleotide
  Sense strand starting at position 417 of SEQ ID NO: 588867
agcuucugugacuaagaaa

SEQ ID NO: 895457 - RNA, 19 nt, Artificial Sequence
  Description of Artificial Sequence: Synthetic oligonucleotide
  Antisense strand to SEQ ID NO: 895456
uuucuuagucacagaagcu

SEQ ID NO: 895458 - RNA, 19 nt, Artificial Sequence
  Description of Artificial Sequence: Synthetic oligonucleotide
  Sense strand starting at position 476 of SEQ ID NO: 588867
cauggaucagcaugauaca

SEQ ID NO: 895459 - RNA, 19 nt, Artificial Sequence
  Description of Artificial Sequence: Synthetic oligonucleotide
  Antisense strand to SEQ ID NO: 895458
uguaucaugcugauccaug

SEQ ID NO: 895460 - RNA, 19 nt, Artificial Sequence
  Description of Artificial Sequence: Synthetic oligonucleotide
  Sense strand starting at position 507 of SEQ ID NO: 588867
gcacaaaggucucugcaaa

SEQ ID NO: 895461 - RNA, 19 nt, Artificial Sequence
  Description of Artificial Sequence: Synthetic oligonucleotide
  Antisense strand to SEQ ID NO: 895460
uuugcagagaccuuugugc

SEQ ID NO: 895462 - RNA, 19 nt, Artificial Sequence
  Description of Artificial Sequence: Synthetic oligonucleotide
  Sense strand starting at position 548 of SEQ ID NO: 588867
auucucaaaggaugugaau

SEQ ID NO: 895463 - RNA, 19 nt, Artificial Sequence
  Description of Artificial Sequence: Synthetic oligonucleotide
  Antisense strand to SEQ ID NO: 895462
auucacauccuuugagaau

SEQ ID NO: 895464 - RNA, 19 nt, Artificial Sequence
  Description of Artificial Sequence: Synthetic oligonucleotide
  Sense strand starting at position 637 of SEQ ID NO: 588867
cuagcuugccaauauaaag

SEQ ID NO: 895465 - RNA, 19 nt, Artificial Sequence
  Description of Artificial Sequence: Synthetic oligonucleotide
  Antisense strand to SEQ ID NO: 895464
cuuuauauuggcaagcuag

SEQ ID NO: 895466 - RNA, 19 nt, Artificial Sequence
  Description of Artificial Sequence: Synthetic oligonucleotide
  Sense strand starting at position 883 of SEQ ID NO: 588867
uggcaaggucacuauacau

SEQ ID NO: 895467 - RNA, 19 nt, Artificial Sequence
  Description of Artificial Sequence: Synthetic oligonucleotide
  Antisense strand to SEQ ID NO: 895466
auguauagugaccuugcca

SEQ ID NO: 895468 - RNA, 19 nt, Artificial Sequence
  Description of Artificial Sequence: Synthetic oligonucleotide
  Sense strand starting at position 940 of SEQ ID NO: 588867
aacagaaggugggaauuaa

SEQ ID NO: 895469 - RNA, 19 nt, Artificial Sequence
  Description of Artificial Sequence: Synthetic oligonucleotide
  Antisense strand to SEQ ID NO: 895468
uuaauucccaccuucuguu

SEQ ID NO: 895470 - RNA, 19 nt, Artificial Sequence
  Description of Artificial Sequence: Synthetic oligonucleotide
  Sense strand starting at position 952 of SEQ ID NO: 588867
gaauuaagaucagcuaggu

SEQ ID NO: 895471 - RNA, 19 nt, Artificial Sequence
  Description of Artificial Sequence: Synthetic oligonucleotide
  Antisense strand to SEQ ID NO: 895470
accuagcugaucuuaauuc

SEQ ID NO: 895472 - RNA, 19 nt, Artificial Sequence
  Description of Artificial Sequence: Synthetic oligonucleotide
  Sense strand starting at position 966 of SEQ ID NO: 588867
uagguagagcugugagaug

SEQ ID NO: 895473 - RNA, 19 nt, Artificial Sequence
  Description of Artificial Sequence: Synthetic oligonucleotide
  Antisense strand to SEQ ID NO: 895472
caucucacagcucuaccua

SEQ ID NO: 895474 - RNA, 19 nt, Artificial Sequence
  Description of Artificial Sequence: Synthetic oligonucleotide
  Sense strand starting at position 1126 of SEQ ID NO: 588867
ugcaauaugcugucgcaga

SEQ ID NO: 895475 - RNA, 19 nt, Artificial Sequence
  Description of Artificial Sequence: Synthetic oligonucleotide
  Antisense strand to SEQ ID NO: 895474
ucugcgacagcauauugca

SEQ ID NO: 895476 - RNA, 19 nt, Artificial Sequence
  Description of Artificial Sequence: Synthetic oligonucleotide
  Sense strand starting at position 1158 of SEQ ID NO: 588867
ggcuauguagcugaacuua

SEQ ID NO: 895477 - RNA, 19 nt, Artificial Sequence
  Description of Artificial Sequence: Synthetic oligonucleotide
  Antisense strand to SEQ ID NO: 895476
uaaguucagcuacauagcc

SEQ ID NO: 895478 - RNA, 19 nt, Artificial Sequence
  Description of Artificial Sequence: Synthetic oligonucleotide
  Sense strand starting at position 2234 of SEQ ID NO: 588867
ugcuuugggacguauggau

SEQ ID NO: 895479 - RNA, 19 nt, Artificial Sequence
  Description of Artificial Sequence: Synthetic oligonucleotide
  Antisense strand to SEQ ID NO: 895478
auccauacgucccaaagca

SEQ ID NO: 895480 - RNA, 19 nt, Artificial Sequence
  Description of Artificial Sequence: Synthetic oligonucleotide
  Sense strand starting at position 2322 of SEQ ID NO: 588867
guuagaaggcuugggucaa

SEQ ID NO: 895481 - RNA, 19 nt, Artificial Sequence
  Description of Artificial Sequence: Synthetic oligonucleotide
  Antisense strand to SEQ ID NO: 895480
uugacccaagccuucuaac

SEQ ID NO: 895482 - RNA, 19 nt, Artificial Sequence
  Description of Artificial Sequence: Synthetic oligonucleotide
  Sense strand starting at position 2341 of SEQ ID NO: 588867
agucauagcccucauacuu

SEQ ID NO: 895483 - RNA, 19 nt, Artificial Sequence
  Description of Artificial Sequence: Synthetic oligonucleotide
  Antisense strand to SEQ ID NO: 895482
aaguaugagggcuaugacu

SEQ ID NO: 895484 - RNA, 19 nt, Artificial Sequence
  Description of Artificial Sequence: Synthetic oligonucleotide
  Sense strand starting at position 2349 of SEQ ID NO: 588867
cccucauacuucuugagag

SEQ ID NO: 895485 - RNA, 19 nt, Artificial Sequence
  Description of Artificial Sequence: Synthetic oligonucleotide
  Antisense strand to SEQ ID NO: 895484
cucucaagaaguaugaggg

SEQ ID NO: 895486 - RNA, 19 nt, Artificial Sequence
  Description of Artificial Sequence: Synthetic oligonucleotide
  Sense strand starting at position 2351 of SEQ ID NO: 588867
cucauacuucuugagagug

SEQ ID NO: 895487 - RNA, 19 nt, Artificial Sequence
  Description of Artificial Sequence: Synthetic oligonucleotide
  Antisense strand to SEQ ID NO: 895486
cacucucaagaaguaugag

SEQ ID NO: 895488 - RNA, 19 nt, Artificial Sequence
  Description of Artificial Sequence: Synthetic oligonucleotide
  Sense strand starting at position 2457 of SEQ ID NO: 588867
agucuuuggaaaugauggu

SEQ ID NO: 895489 - RNA, 19 nt, Artificial Sequence
  Description of Artificial Sequence: Synthetic oligonucleotide
  Antisense strand to SEQ ID NO: 895488
accaucauuuccaaagacu

SEQ ID NO: 895490 - RNA, 19 nt, Artificial Sequence
  Description of Artificial Sequence: Synthetic oligonucleotide
  Sense strand starting at position 2475 of SEQ ID NO: 588867
uucugacucugaguuggaa

SEQ ID NO: 895491 - RNA, 19 nt, Artificial Sequence
  Description of Artificial Sequence: Synthetic oligonucleotide
  Antisense strand to SEQ ID NO: 895490
uuccaacucagagucagaa

SEQ ID NO: 895492 - RNA, 19 nt, Artificial Sequence
  Description of Artificial Sequence: Synthetic oligonucleotide
  Sense strand starting at position 2862 of SEQ ID NO: 588867
gcgucugaugaaggauaca

SEQ ID NO: 895493 - RNA, 19 nt, Artificial Sequence
  Description of Artificial Sequence: Synthetic oligonucleotide
  Antisense strand to SEQ ID NO: 895492
uguauccuucaucagacgc

SEQ ID NO: 895494 - RNA, 19 nt, Artificial Sequence
  Description of Artificial Sequence: Synthetic oligonucleotide
  Sense strand starting at position 3013 of SEQ ID NO: 588867
aagucauagcagcaggaga

SEQ ID NO: 895495 - RNA, 19 nt, Artificial Sequence
  Description of Artificial Sequence: Synthetic oligonucleotide
  Antisense strand to SEQ ID NO: 895494
ucuccugcugcuaugacuu

SEQ ID NO: 895496 - RNA, 19 nt, Artificial Sequence
  Description of Artificial Sequence: Synthetic oligonucleotide
  Sense strand starting at position 3104 of SEQ ID NO: 588867
uaauuaguacgcgagggau

SEQ ID NO: 895497 - RNA, 19 nt, Artificial Sequence
  Description of Artificial Sequence: Synthetic oligonucleotide
  Antisense strand to SEQ ID NO: 895496
aucccucgcguacuaauua

SEQ ID NO: 895498 - RNA, 19 nt, Artificial Sequence
  Description of Artificial Sequence: Synthetic oligonucleotide
  Sense strand starting at position 3106 of SEQ ID NO: 588867
auuaguacgcgagggauaa

SEQ ID NO: 895499 - RNA, 19 nt, Artificial Sequence
  Description of Artificial Sequence: Synthetic oligonucleotide
  Antisense strand to SEQ ID NO: 895498
uuaucccucgcguacuaau

SEQ ID NO: 895500 - RNA, 19 nt, Artificial Sequence
  Description of Artificial Sequence: Synthetic oligonucleotide
  Sense strand starting at position 3107 of SEQ ID NO: 588867
uuaguacgcgagggauaaa

SEQ ID NO: 895501 - RNA, 19 nt, Artificial Sequence
  Description of Artificial Sequence: Synthetic oligonucleotide
  Antisense strand to SEQ ID NO: 895500
uuuaucccucgcguacuaa

SEQ ID NO: 895502 - RNA, 19 nt, Artificial Sequence
  Description of Artificial Sequence: Synthetic oligonucleotide
  Sense strand starting at position 3108 of SEQ ID NO: 588867
uaguacgcgagggauaaau

SEQ ID NO: 895503 - RNA, 19 nt, Artificial Sequence
  Description of Artificial Sequence: Synthetic oligonucleotide
  Antisense strand to SEQ ID NO: 895502
auuuaucccucgcguacua

SEQ ID NO: 895504 - RNA, 19 nt, Artificial Sequence
  Description of Artificial Sequence: Synthetic oligonucleotide
  Sense strand starting at position 3172 of SEQ ID NO: 588867
caguuaaucgggcaacagu

SEQ ID NO: 895505 - RNA, 19 nt, Artificial Sequence
  Description of Artificial Sequence: Synthetic oligonucleotide
  Antisense strand to SEQ ID NO: 895504
acuguugcccgauuaacug

SEQ ID NO: 895506 - RNA, 19 nt, Artificial Sequence
  Description of Artificial Sequence: Synthetic oligonucleotide
  Sense strand starting at position 3282 of SEQ ID NO: 588867
ggcauccagcguguucaua

SEQ ID NO: 895507 - RNA, 19 nt, Artificial Sequence
  Description of Artificial Sequence: Synthetic oligonucleotide
  Antisense strand to SEQ ID NO: 895506
uaugaacacgcuggaugcc

SEQ ID NO: 895508 - RNA, 19 nt, Artificial Sequence
  Description of Artificial Sequence: Synthetic oligonucleotide
  Sense strand starting at position 3514 of SEQ ID NO: 588867
cuuaguuccuugucagaaa

SEQ ID NO: 895509 - RNA, 19 nt, Artificial Sequence
  Description of Artificial Sequence: Synthetic oligonucleotide
  Antisense strand to SEQ ID NO: 895508
uuucugacaaggaacuaag

SEQ ID NO: 895510 - RNA, 19 nt, Artificial Sequence
  Description of Artificial Sequence: Synthetic oligonucleotide
  Sense strand starting at position 3551 of SEQ ID NO: 588867
gcucuucuugggcauauga

SEQ ID NO: 895511 - RNA, 19 nt, Artificial Sequence
  Description of Artificial Sequence: Synthetic oligonucleotide
  Antisense strand to SEQ ID NO: 895510
ucauaugcccaagaagagc

SEQ ID NO: 895512 - RNA, 19 nt, Artificial Sequence
  Description of Artificial Sequence: Synthetic oligonucleotide
  Sense strand starting at position 3553 of SEQ ID NO: 588867
ucuucuugggcauaugaau

SEQ ID NO: 895513 - RNA, 19 nt, Artificial Sequence
  Description of Artificial Sequence: Synthetic oligonucleotide
  Antisense strand to SEQ ID NO: 895512
auucauaugcccaagaaga

SEQ ID NO: 895514 - RNA, 19 nt, Artificial Sequence
  Description of Artificial Sequence: Synthetic oligonucleotide
  Sense strand starting at position 3714 of SEQ ID NO: 588867
ucaugucaucccgcagcuu

SEQ ID NO: 895515 - RNA, 19 nt, Artificial Sequence
  Description of Artificial Sequence: Synthetic oligonucleotide
  Antisense strand to SEQ ID NO: 895514
aagcugcgggaugacauga

SEQ ID NO: 895516 - RNA, 19 nt, Artificial Sequence
  Description of Artificial Sequence: Synthetic oligonucleotide
  Sense strand starting at position 152 of SEQ ID NO: 588868
auacuuguggaauguacaa

SEQ ID NO: 895517 - RNA, 19 nt, Artificial Sequence
  Description of Artificial Sequence: Synthetic oligonucleotide
  Antisense strand to SEQ ID NO: 895516
uuguacauuccacaaguau

SEQ ID NO: 895518 - RNA, 19 nt, Artificial Sequence
  Description of Artificial Sequence: Synthetic oligonucleotide
  Sense strand starting at position 398 of SEQ ID NO: 588868
ccgaguuguccugagacgu

SEQ ID NO: 895519 - RNA, 19 nt, Artificial Sequence
  Description of Artificial Sequence: Synthetic oligonucleotide
  Antisense strand to SEQ ID NO: 895518
acgucucaggacaacucgg

SEQ ID NO: 895520 - RNA, 19 nt, Artificial Sequence
  Description of Artificial Sequence: Synthetic oligonucleotide
  Sense strand starting at position 399 of SEQ ID NO: 588868
cgaguuguccugagacgug

SEQ ID NO: 895521 - RNA, 19 nt, Artificial Sequence
  Description of Artificial Sequence: Synthetic oligonucleotide
  Antisense strand to SEQ ID NO: 895520
cacgucucaggacaacucg

SEQ ID NO: 895522 - RNA, 19 nt, Artificial Sequence
  Description of Artificial Sequence: Synthetic oligonucleotide
  Sense strand starting at position 404 of SEQ ID NO: 588868
uguccugagacguguucua

SEQ ID NO: 895523 - RNA, 19 nt, Artificial Sequence
  Description of Artificial Sequence: Synthetic oligonucleotide
  Antisense strand to SEQ ID NO: 895522
uagaacacgucucaggaca

SEQ ID NO: 895524 - RNA, 19 nt, Artificial Sequence
  Description of Artificial Sequence: Synthetic oligonucleotide
  Sense strand starting at position 852 of SEQ ID NO: 588868
agggagguucuguggauga

SEQ ID NO: 895525 - RNA, 19 nt, Artificial Sequence
  Description of Artificial Sequence: Synthetic oligonucleotide
  Antisense strand to SEQ ID NO: 895524
ucauccacagaaccucccu

SEQ ID NO: 895526 - RNA, 19 nt, Artificial Sequence
  Description of Artificial Sequence: Synthetic oligonucleotide
  Sense strand starting at position 946 of SEQ ID NO: 588868
gugcgucuguuggucuaua

SEQ ID NO: 895527 - RNA, 19 nt, Artificial Sequence
  Description of Artificial Sequence: Synthetic oligonucleotide
  Antisense strand to SEQ ID NO: 895526
uauagaccaacagacgcac

SEQ ID NO: 895528 - RNA, 19 nt, Artificial Sequence
  Description of Artificial Sequence: Synthetic oligonucleotide
  Sense strand starting at position 982 of SEQ ID NO: 588868
cgaguuagagccuggaagu

SEQ ID NO: 895529 - RNA, 19 nt, Artificial Sequence
  Description of Artificial Sequence: Synthetic oligonucleotide
  Antisense strand to SEQ ID NO: 895528
acuuccaggcucuaacucg

SEQ ID NO: 895530 - RNA, 19 nt, Artificial Sequence
  Description of Artificial Sequence: Synthetic oligonucleotide
  Sense strand starting at position 983 of SEQ ID NO: 588868
gaguuagagccuggaagug

SEQ ID NO: 895531 - RNA, 19 nt, Artificial Sequence
  Description of Artificial Sequence: Synthetic oligonucleotide
  Antisense strand to SEQ ID NO: 895530
cacuuccaggcucuaacuc

SEQ ID NO: 895532 - RNA, 19 nt, Artificial Sequence
  Description of Artificial Sequence: Synthetic oligonucleotide
  Sense strand starting at position 993 of SEQ ID NO: 588868
cuggaagugcuugaaaggu

SEQ ID NO: 895533 - RNA, 19 nt, Artificial Sequence
  Description of Artificial Sequence: Synthetic oligonucleotide
  Antisense strand to SEQ ID NO: 895532
accuuucaagcacuuccag

SEQ ID NO: 895534 - RNA, 19 nt, Artificial Sequence
  Description of Artificial Sequence: Synthetic oligonucleotide
  Sense strand starting at position 995 of SEQ ID NO: 588868
ggaagugcuugaaagguga

SEQ ID NO: 895535 - RNA, 19 nt, Artificial Sequence
  Description of Artificial Sequence: Synthetic oligonucleotide
  Antisense strand to SEQ ID NO: 895534
ucaccuuucaagcacuucc

SEQ ID NO: 895536 - RNA, 19 nt, Artificial Sequence
  Description of Artificial Sequence: Synthetic oligonucleotide
  Sense strand starting at position 1131 of SEQ ID NO: 588868
aggcgaaugacuugacugu

SEQ ID NO: 895537 - RNA, 19 nt, Artificial Sequence
  Description of Artificial Sequence: Synthetic oligonucleotide
  Antisense strand to SEQ ID NO: 895536
acagucaagucauucgccu

SEQ ID NO: 895538 - RNA, 19 nt, Artificial Sequence
  Description of Artificial Sequence: Synthetic oligonucleotide
  Sense strand starting at position 1135 of SEQ ID NO: 588868
gaaugacuugacugugcuu

SEQ ID NO: 895539 - RNA, 19 nt, Artificial Sequence
  Description of Artificial Sequence: Synthetic oligonucleotide
  Antisense strand to SEQ ID NO: 895538
aagcacagucaagucauuc

SEQ ID NO: 895540 - RNA, 19 nt, Artificial Sequence
  Description of Artificial Sequence: Synthetic oligonucleotide
  Sense strand starting at position 1182 of SEQ ID NO: 588868
gguucuauuccuggagcuu

SEQ ID NO: 895541 - RNA, 19 nt, Artificial Sequence
  Description of Artificial Sequence: Synthetic oligonucleotide
  Antisense strand to SEQ ID NO: 895540
aagcuccaggaauagaacc

SEQ ID NO: 895542 - RNA, 19 nt, Artificial Sequence
  Description of Artificial Sequence: Synthetic oligonucleotide
  Sense strand starting at position 1183 of SEQ ID NO: 588868
guucuauuccuggagcuuu

SEQ ID NO: 895543 - RNA, 19 nt, Artificial Sequence
  Description of Artificial Sequence: Synthetic oligonucleotide
  Antisense strand to SEQ ID NO: 895542
aaagcuccaggaauagaac

SEQ ID NO: 895544 - RNA, 19 nt, Artificial Sequence
  Description of Artificial Sequence: Synthetic oligonucleotide
  Sense strand starting at position 1249 of SEQ ID NO: 588868
uuuccuguucuugggagua

SEQ ID NO: 895545 - RNA, 19 nt, Artificial Sequence
  Description of Artificial Sequence: Synthetic oligonucleotide
  Antisense strand to SEQ ID NO: 895544
uacucccaagaacaggaaa

SEQ ID NO: 895546 - RNA, 19 nt, Artificial Sequence
  Description of Artificial Sequence: Synthetic oligonucleotide
  Sense strand starting at position 1251 of SEQ ID NO: 588868
uccuguucuugggaguaga

SEQ ID NO: 895547 - RNA, 19 nt, Artificial Sequence
  Description of Artificial Sequence: Synthetic oligonucleotide
  Antisense strand to SEQ ID NO: 895546
ucuacucccaagaacagga

SEQ ID NO: 895548 - RNA, 19 nt, Artificial Sequence
  Description of Artificial Sequence: Synthetic oligonucleotide
  Sense strand starting at position 1254 of SEQ ID NO: 588868
uguucuugggaguagauga

SEQ ID NO: 895549 - RNA, 19 nt, Artificial Sequence
  Description of Artificial Sequence: Synthetic oligonucleotide
  Antisense strand to SEQ ID NO: 895548
ucaucuacucccaagaaca

SEQ ID NO: 895550 - RNA, 19 nt, Artificial Sequence
  Description of Artificial Sequence: Synthetic oligonucleotide
  Sense strand starting at position 1267 of SEQ ID NO: 588868
agaugaaggucacaaaugu

SEQ ID NO: 895551 - RNA, 19 nt, Artificial Sequence
  Description of Artificial Sequence: Synthetic oligonucleotide
  Antisense strand to SEQ ID NO: 895550
acauuugugaccuucaucu

SEQ ID NO: 895552 - RNA, 19 nt, Artificial Sequence
  Description of Artificial Sequence: Synthetic oligonucleotide
  Sense strand starting at position 1481 of SEQ ID NO: 588868
gcaggaaccuguccuggaa

SEQ ID NO: 895553 - RNA, 19 nt, Artificial Sequence
  Description of Artificial Sequence: Synthetic oligonucleotide
  Antisense strand to SEQ ID NO: 895552
uuccaggacagguuccugc

SEQ ID NO: 895554 - RNA, 19 nt, Artificial Sequence
  Description of Artificial Sequence: Synthetic oligonucleotide
  Sense strand starting at position 2416 of SEQ ID NO: 588868
gcgcauuggacuucuagcu

SEQ ID NO: 895555 - RNA, 19 nt, Artificial Sequence
  Description of Artificial Sequence: Synthetic oligonucleotide
  Antisense strand to SEQ ID NO: 895554
agcuagaaguccaaugcgc

SEQ ID NO: 895556 - RNA, 19 nt, Artificial Sequence
  Description of Artificial Sequence: Synthetic oligonucleotide
  Sense strand starting at position 2423 of SEQ ID NO: 588868
ggacuucuagcugagccua

SEQ ID NO: 895557 - RNA, 19 nt, Artificial Sequence
  Description of Artificial Sequence: Synthetic oligonucleotide
  Antisense strand to SEQ ID NO: 895556
uaggcucagcuagaagucc

SEQ ID NO: 895558 - RNA, 19 nt, Artificial Sequence
  Description of Artificial Sequence: Synthetic oligonucleotide
  Sense strand starting at position 2586 of SEQ ID NO: 588868
ccaacuuugcugcgacaca

SEQ ID NO: 895559 - RNA, 19 nt, Artificial Sequence
  Description of Artificial Sequence: Synthetic oligonucleotide
  Antisense strand to SEQ ID NO: 895558
ugugucgcagcaaaguugg

SEQ ID NO: 895560 - RNA, 19 nt, Artificial Sequence
  Description of Artificial Sequence: Synthetic oligonucleotide
  Sense strand starting at position 2613 of SEQ ID NO: 588868
ccuggugucuaggugacua

SEQ ID NO: 895561 - RNA, 19 nt, Artificial Sequence
  Description of Artificial Sequence: Synthetic oligonucleotide
  Antisense strand to SEQ ID NO: 895560
uagucaccuagacaccagg

SEQ ID NO: 895562 - RNA, 19 nt, Artificial Sequence
  Description of Artificial Sequence: Synthetic oligonucleotide
  Sense strand starting at position 2621 of SEQ ID NO: 588868
cuaggugacuacgagaaau

SEQ ID NO: 895563 - RNA, 19 nt, Artificial Sequence
  Description of Artificial Sequence: Synthetic oligonucleotide
  Antisense strand to SEQ ID NO: 895562
auuucucguagucaccuag

SEQ ID NO: 895564 - RNA, 19 nt, Artificial Sequence
  Description of Artificial Sequence: Synthetic oligonucleotide
  Sense strand starting at position 2633 of SEQ ID NO: 588868
gagaaauccuuucucguac

SEQ ID NO: 895565 - RNA, 19 nt, Artificial Sequence
  Description of Artificial Sequence: Synthetic oligonucleotide
  Antisense strand to SEQ ID NO: 895564
guacgagaaaggauuucuc

SEQ ID NO: 895566 - RNA, 19 nt, Artificial Sequence
  Description of Artificial Sequence: Synthetic oligonucleotide
  Sense strand starting at position 2648 of SEQ ID NO: 588868
guaccauggugucuuguga

SEQ ID NO: 895567 - RNA, 19 nt, Artificial Sequence
  Description of Artificial Sequence: Synthetic oligonucleotide
  Antisense strand to SEQ ID NO: 895566
ucacaagacaccaugguac

SEQ ID NO: 895568 - RNA, 19 nt, Artificial Sequence
  Description of Artificial Sequence: Synthetic oligonucleotide
  Sense strand starting at position 2703 of SEQ ID NO: 588868
uuuggaggcccuuaguuaa

SEQ ID NO: 895569 - RNA, 19 nt, Artificial Sequence
  Description of Artificial Sequence: Synthetic oligonucleotide
  Antisense strand to SEQ ID NO: 895568
uuaacuaagggccuccaaa

SEQ ID NO: 895570 - RNA, 19 nt, Artificial Sequence
  Description of Artificial Sequence: Synthetic oligonucleotide
  Sense strand starting at position 2736 of SEQ ID NO: 588868
aucucuggucccugcaaca

SEQ ID NO: 895571 - RNA, 19 nt, Artificial Sequence
  Description of Artificial Sequence: Synthetic oligonucleotide
  Antisense strand to SEQ ID NO: 895570
uguugcagggaccagagau

SEQ ID NO: 895572 - RNA, 19 nt, Artificial Sequence
  Description of Artificial Sequence: Synthetic oligonucleotide
  Sense strand starting at position 2764 of SEQ ID NO: 588868
accuauauuugucaugcca

SEQ ID NO: 895573 - RNA, 19 nt, Artificial Sequence
  Description of Artificial Sequence: Synthetic oligonucleotide
  Antisense strand to SEQ ID NO: 895572
uggcaugacaaauauaggu

SEQ ID NO: 895574 - RNA, 19 nt, Artificial Sequence
  Description of Artificial Sequence: Synthetic oligonucleotide
  Sense strand starting at position 2782 of SEQ ID NO: 588868
acccuuauuugucaugcca

SEQ ID NO: 895575 - RNA, 19 nt, Artificial Sequence
  Description of Artificial Sequence: Synthetic oligonucleotide
  Antisense strand to SEQ ID NO: 895574
uggcaugacaaauaagggu

SEQ ID NO: 895576 - RNA, 19 nt, Artificial Sequence
  Description of Artificial Sequence: Synthetic oligonucleotide
  Sense strand starting at position 2864 of SEQ ID NO: 588868
auugguuucuuguuaagua

SEQ ID NO: 895577 - RNA, 19 nt, Artificial Sequence
  Description of Artificial Sequence: Synthetic oligonucleotide
  Antisense strand to SEQ ID NO: 895576
uacuuaacaagaaaccaau

SEQ ID NO: 895578 - RNA, 19 nt, Artificial Sequence
  Description of Artificial Sequence: Synthetic oligonucleotide
  Sense strand starting at position 2868 of SEQ ID NO: 588868
guuucuuguuaaguaacca

SEQ ID NO: 895579 - RNA, 19 nt, Artificial Sequence
  Description of Artificial Sequence: Synthetic oligonucleotide
  Antisense strand to SEQ ID NO: 895578
ugguuacuuaacaagaaac

SEQ ID NO: 895580 - RNA, 19 nt, Artificial Sequence
  Description of Artificial Sequence: Synthetic oligonucleotide
  Sense strand starting at position 2902 of SEQ ID NO: 588868
guugccacuuguccuuaaa

SEQ ID NO: 895581 - RNA, 19 nt, Artificial Sequence
  Description of Artificial Sequence: Synthetic oligonucleotide
  Antisense strand to SEQ ID NO: 895580
uuuaaggacaaguggcaac

SEQ ID NO: 895582 - RNA, 19 nt, Artificial Sequence
  Description of Artificial Sequence: Synthetic oligonucleotide
  Sense strand starting at position 3271 of SEQ ID NO: 588868
uugcuugagcucuggaacu

SEQ ID NO: 895583 - RNA, 19 nt, Artificial Sequence
  Description of Artificial Sequence: Synthetic oligonucleotide
  Antisense strand to SEQ ID NO: 895582
aguuccagagcucaagcaa

SEQ ID NO: 895584 - RNA, 19 nt, Artificial Sequence
  Description of Artificial Sequence: Synthetic oligonucleotide
  Sense strand starting at position 3696 of SEQ ID NO: 588868
ugauaaggauuuggaccua

SEQ ID NO: 895585 - RNA, 19 nt, Artificial Sequence
  Description of Artificial Sequence: Synthetic oligonucleotide
  Antisense strand to SEQ ID NO: 895584
uagguccaaauccuuauca

SEQ ID NO: 895586 - RNA, 19 nt, Artificial Sequence
  Description of Artificial Sequence: Synthetic oligonucleotide
  Sense strand starting at position 3798 of SEQ ID NO: 588868
ggcagaaugugcaguggua

SEQ ID NO: 895587 - RNA, 19 nt, Artificial Sequence
  Description of Artificial Sequence: Synthetic oligonucleotide
  Antisense strand to SEQ ID NO: 895586
uaccacugcacauucugcc

SEQ ID NO: 895588 - RNA, 19 nt, Artificial Sequence
  Description of Artificial Sequence: Synthetic oligonucleotide
  Sense strand starting at position 3811 of SEQ ID NO: 588868
gugguaugggcaugagcau

SEQ ID NO: 895589 - RNA, 19 nt, Artificial Sequence
  Description of Artificial Sequence: Synthetic oligonucleotide
  Antisense strand to SEQ ID NO: 895588
augcucaugcccauaccac

SEQ ID NO: 895590 - RNA, 19 nt, Artificial Sequence
  Description of Artificial Sequence: Synthetic oligonucleotide
  Sense strand starting at position 3834 of SEQ ID NO: 588868
uucgccuucucagcugaaa

SEQ ID NO: 895591 - RNA, 19 nt, Artificial Sequence
  Description of Artificial Sequence: Synthetic oligonucleotide
  Antisense strand to SEQ ID NO: 895590
uuucagcugagaaggcgaa

SEQ ID NO: 895592 - RNA, 19 nt, Artificial Sequence
  Description of Artificial Sequence: Synthetic oligonucleotide
  Sense strand starting at position 3837 of SEQ ID NO: 588868
gccuucucagcugaaaggu

SEQ ID NO: 895593 - RNA, 19 nt, Artificial Sequence
  Description of Artificial Sequence: Synthetic oligonucleotide
  Antisense strand to SEQ ID NO: 895592
accuuucagcugagaaggc

SEQ ID NO: 895594 - RNA, 19 nt, Artificial Sequence
  Description of Artificial Sequence: Synthetic oligonucleotide
  Sense strand starting at position 3914 of SEQ ID NO: 588868
cagggucagcguggagauu

SEQ ID NO: 895595 - RNA, 19 nt, Artificial Sequence
  Description of Artificial Sequence: Synthetic oligonucleotide
  Antisense strand to SEQ ID NO: 895594
aaucuccacgcugacccug

SEQ ID NO: 895596 - RNA, 19 nt, Artificial Sequence
  Description of Artificial Sequence: Synthetic oligonucleotide
  Sense strand starting at position 7 of SEQ ID NO: 588869
ucacuuagcccuuagagaa

SEQ ID NO: 895597 - RNA, 19 nt, Artificial Sequence
  Description of Artificial Sequence: Synthetic oligonucleotide
  Antisense strand to SEQ ID NO: 895596
uucucuaagggcuaaguga

SEQ ID NO: 895598 - RNA, 19 nt, Artificial Sequence
  Description of Artificial Sequence: Synthetic oligonucleotide
  Sense strand starting at position 236 of SEQ ID NO: 588869
cagagaugccgcugagaua

SEQ ID NO: 895599 - RNA, 19 nt, Artificial Sequence
  Description of Artificial Sequence: Synthetic oligonucleotide
  Antisense strand to SEQ ID NO: 895598
uaucucagcggcaucucug

SEQ ID NO: 895600 - RNA, 19 nt, Artificial Sequence
  Description of Artificial Sequence: Synthetic oligonucleotide
  Sense strand starting at position 237 of SEQ ID NO: 588869
agagaugccgcugagauaa

SEQ ID NO: 895601 - RNA, 19 nt, Artificial Sequence
  Description of Artificial Sequence: Synthetic oligonucleotide
  Antisense strand to SEQ ID NO: 895600
uuaucucagcggcaucucu

SEQ ID NO: 895602 - RNA, 19 nt, Artificial Sequence
  Description of Artificial Sequence: Synthetic oligonucleotide
  Sense strand starting at position 398 of SEQ ID NO: 588869
auauaagcuccugagucua

SEQ ID NO: 895603 - RNA, 19 nt, Artificial Sequence
  Description of Artificial Sequence: Synthetic oligonucleotide
  Antisense strand to SEQ ID NO: 895602
uagacucaggagcuuauau

SEQ ID NO: 895604 - RNA, 19 nt, Artificial Sequence
  Description of Artificial Sequence: Synthetic oligonucleotide
  Sense strand starting at position 400 of SEQ ID NO: 588869
auaagcuccugagucuauu

SEQ ID NO: 895605 - RNA, 19 nt, Artificial Sequence
  Description of Artificial Sequence: Synthetic oligonucleotide
  Antisense strand to SEQ ID NO: 895604
aauagacucaggagcuuau

SEQ ID NO: 895606 - RNA, 19 nt, Artificial Sequence
  Description of Artificial Sequence: Synthetic oligonucleotide
  Sense strand starting at position 444 of SEQ ID NO: 588869
ggcucucauacaugugaga

SEQ ID NO: 895607 - RNA, 19 nt, Artificial Sequence
  Description of Artificial Sequence: Synthetic oligonucleotide
  Antisense strand to SEQ ID NO: 895606
ucucacauguaugagagcc

SEQ ID NO: 895608 - RNA, 19 nt, Artificial Sequence
  Description of Artificial Sequence: Synthetic oligonucleotide
  Sense strand starting at position 447 of SEQ ID NO: 588869
ucucauacaugugagauuu

SEQ ID NO: 895609 - RNA, 19 nt, Artificial Sequence
  Description of Artificial Sequence: Synthetic oligonucleotide
  Antisense strand to SEQ ID NO: 895608
aaaucucacauguaugaga

SEQ ID NO: 895610 - RNA, 19 nt, Artificial Sequence
  Description of Artificial Sequence: Synthetic oligonucleotide
  Sense strand starting at position 943 of SEQ ID NO: 588869
ugggcaucacugugaccau

SEQ ID NO: 895611 - RNA, 19 nt, Artificial Sequence
  Description of Artificial Sequence: Synthetic oligonucleotide
  Antisense strand to SEQ ID NO: 895610
auggucacagugaugccca

SEQ ID NO: 895612 - RNA, 19 nt, Artificial Sequence
  Description of Artificial Sequence: Synthetic oligonucleotide
  Sense strand starting at position 1063 of SEQ ID NO: 588869
uggcuagcaccucaaaguu

SEQ ID NO: 895613 - RNA, 19 nt, Artificial Sequence
  Description of Artificial Sequence: Synthetic oligonucleotide
  Antisense strand to SEQ ID NO: 895612
aacuuugaggugcuagcca

SEQ ID NO: 895614 - RNA, 19 nt, Artificial Sequence
  Description of Artificial Sequence: Synthetic oligonucleotide
  Sense strand starting at position 1104 of SEQ ID NO: 588869
cguaaaguccaagggauug

SEQ ID NO: 895615 - RNA, 19 nt, Artificial Sequence
  Description of Artificial Sequence: Synthetic oligonucleotide
  Antisense strand to SEQ ID NO: 895614
caaucccuuggacuuuacg

SEQ ID NO: 895616 - RNA, 19 nt, Artificial Sequence
  Description of Artificial Sequence: Synthetic oligonucleotide
  Sense strand starting at position 1170 of SEQ ID NO: 588869
cugagugucagcuaaggaa

SEQ ID NO: 895617 - RNA, 19 nt, Artificial Sequence
  Description of Artificial Sequence: Synthetic oligonucleotide
  Antisense strand to SEQ ID NO: 895616
uuccuuagcugacacucag

SEQ ID NO: 895618 - RNA, 19 nt, Artificial Sequence
  Description of Artificial Sequence: Synthetic oligonucleotide
  Sense strand starting at position 1255 of SEQ ID NO: 588869
ucugacaggucuccuucua

SEQ ID NO: 895619 - RNA, 19 nt, Artificial Sequence
  Description of Artificial Sequence: Synthetic oligonucleotide
  Antisense strand to SEQ ID NO: 895618
uagaaggagaccugucaga

SEQ ID NO: 895620 - RNA, 19 nt, Artificial Sequence
  Description of Artificial Sequence: Synthetic oligonucleotide
  Sense strand starting at position 1309 of SEQ ID NO: 588869
auuaaucacucagugaguu

SEQ ID NO: 895621 - RNA, 19 nt, Artificial Sequence
  Description of Artificial Sequence: Synthetic oligonucleotide
  Antisense strand to SEQ ID NO: 895620
aacucacugagugauuaau

SEQ ID NO: 895622 - RNA, 19 nt, Artificial Sequence
  Description of Artificial Sequence: Synthetic oligonucleotide
  Sense strand starting at position 1310 of SEQ ID NO: 588869
uuaaucacucagugaguuu

SEQ ID NO: 895623 - RNA, 19 nt, Artificial Sequence
  Description of Artificial Sequence: Synthetic oligonucleotide
  Antisense strand to SEQ ID NO: 895622
aaacucacugagugauuaa

SEQ ID NO: 895624 - RNA, 19 nt, Artificial Sequence
  Description of Artificial Sequence: Synthetic oligonucleotide
  Sense strand starting at position 1338 of SEQ ID NO: 588869
aagugagacugauuugcgu

SEQ ID NO: 895625 - RNA, 19 nt, Artificial Sequence
  Description of Artificial Sequence: Synthetic oligonucleotide
  Antisense strand to SEQ ID NO: 895624
acgcaaaucagucucacuu

SEQ ID NO: 895626 - RNA, 19 nt, Artificial Sequence
  Description of Artificial Sequence: Synthetic oligonucleotide
  Sense strand starting at position 1340 of SEQ ID NO: 588869
gugagacugauuugcguaa

SEQ ID NO: 895627 - RNA, 19 nt, Artificial Sequence
  Description of Artificial Sequence: Synthetic oligonucleotide
  Antisense strand to SEQ ID NO: 895626
uuacgcaaaucagucucac

SEQ ID NO: 895628 - RNA, 19 nt, Artificial Sequence
  Description of Artificial Sequence: Synthetic oligonucleotide
  Sense strand starting at position 1352 of SEQ ID NO: 588869
ugcguaauccagcugcucu

SEQ ID NO: 895629 - RNA, 19 nt, Artificial Sequence
  Description of Artificial Sequence: Synthetic oligonucleotide
  Antisense strand to SEQ ID NO: 895628
agagcagcuggauuacgca

SEQ ID NO: 895630 - RNA, 19 nt, Artificial Sequence
  Description of Artificial Sequence: Synthetic oligonucleotide
  Sense strand starting at position 1404 of SEQ ID NO: 588869
caggacuuggcuugaguaa

SEQ ID NO: 895631 - RNA, 19 nt, Artificial Sequence
  Description of Artificial Sequence: Synthetic oligonucleotide
  Antisense strand to SEQ ID NO: 895630
uuacucaagccaaguccug

SEQ ID NO: 895632 - RNA, 19 nt, Artificial Sequence
  Description of Artificial Sequence: Synthetic oligonucleotide
  Sense strand starting at position 1478 of SEQ ID NO: 588869
cucaccaguucuuuggaaa

SEQ ID NO: 895633 - RNA, 19 nt, Artificial Sequence
  Description of Artificial Sequence: Synthetic oligonucleotide
  Antisense strand to SEQ ID NO: 895632
uuuccaaagaacuggugag

SEQ ID NO: 895634 - RNA, 19 nt, Artificial Sequence
  Description of Artificial Sequence: Synthetic oligonucleotide
  Sense strand starting at position 1566 of SEQ ID NO: 588869
ucuuguuucuaagugacca

SEQ ID NO: 895635 - RNA, 19 nt, Artificial Sequence
  Description of Artificial Sequence: Synthetic oligonucleotide
  Antisense strand to SEQ ID NO: 895634
uggucacuuagaaacaaga

SEQ ID NO: 895636 - RNA, 19 nt, Artificial Sequence
  Description of Artificial Sequence: Synthetic oligonucleotide
  Sense strand starting at position 1663 of SEQ ID NO: 588869
gcuuaaagugugccguuaa

SEQ ID NO: 895637 - RNA, 19 nt, Artificial Sequence
  Description of Artificial Sequence: Synthetic oligonucleotide
  Antisense strand to SEQ ID NO: 895636
uuaacggcacacuuuaagc

SEQ ID NO: 895638 - RNA, 19 nt, Artificial Sequence
  Description of Artificial Sequence: Synthetic oligonucleotide
  Sense strand starting at position 1685 of SEQ ID NO: 588869
ucguauuguccugauaauc

SEQ ID NO: 895639 - RNA, 19 nt, Artificial Sequence
  Description of Artificial Sequence: Synthetic oligonucleotide
  Antisense strand to SEQ ID NO: 895638
gauuaucaggacaauacga

SEQ ID NO: 895640 - RNA, 19 nt, Artificial Sequence
  Description of Artificial Sequence: Synthetic oligonucleotide
  Sense strand starting at position 1696 of SEQ ID NO: 588869
ugauaaucucccugcuuag

SEQ ID NO: 895641 - RNA, 19 nt, Artificial Sequence
  Description of Artificial Sequence: Synthetic oligonucleotide
  Antisense strand to SEQ ID NO: 895640
cuaagcagggagauuauca

SEQ ID NO: 895642 - RNA, 19 nt, Artificial Sequence
  Description of Artificial Sequence: Synthetic oligonucleotide
  Sense strand starting at position 1703 of SEQ ID NO: 588869
cucccugcuuagguaagaa

SEQ ID NO: 895643 - RNA, 19 nt, Artificial Sequence
  Description of Artificial Sequence: Synthetic oligonucleotide
  Antisense strand to SEQ ID NO: 895642
uucuuaccuaagcagggag

SEQ ID NO: 895644 - RNA, 19 nt, Artificial Sequence
  Description of Artificial Sequence: Synthetic oligonucleotide
  Sense strand starting at position 1888 of SEQ ID NO: 588869
gguccuuuguaccugggaa

SEQ ID NO: 895645 - RNA, 19 nt, Artificial Sequence
  Description of Artificial Sequence: Synthetic oligonucleotide
  Antisense strand to SEQ ID NO: 895644
uucccagguacaaaggacc

SEQ ID NO: 895646 - RNA, 19 nt, Artificial Sequence
  Description of Artificial Sequence: Synthetic oligonucleotide
  Sense strand starting at position 1889 of SEQ ID NO: 588869
guccuuuguaccugggaaa

SEQ ID NO: 895647 - RNA, 19 nt, Artificial Sequence
  Description of Artificial Sequence: Synthetic oligonucleotide
  Antisense strand to SEQ ID NO: 895646
uuucccagguacaaaggac

SEQ ID NO: 895648 - RNA, 19 nt, Artificial Sequence
  Description of Artificial Sequence: Synthetic oligonucleotide
  Sense strand starting at position 2497 of SEQ ID NO: 588869
aggacacguucucuauagu

SEQ ID NO: 895649 - RNA, 19 nt, Artificial Sequence
  Description of Artificial Sequence: Synthetic oligonucleotide
  Antisense strand to SEQ ID NO: 895648
acuauagagaacguguccu

SEQ ID NO: 895650 - RNA, 19 nt, Artificial Sequence
  Description of Artificial Sequence: Synthetic oligonucleotide
  Sense strand starting at position 2507 of SEQ ID NO: 588869
cucuauagugcuuagugaa

SEQ ID NO: 895651 - RNA, 19 nt, Artificial Sequence
  Description of Artificial Sequence: Synthetic oligonucleotide
  Antisense strand to SEQ ID NO: 895650
uucacuaagcacuauagag

SEQ ID NO: 895652 - RNA, 19 nt, Artificial Sequence
  Description of Artificial Sequence: Synthetic oligonucleotide
  Sense strand starting at position 2547 of SEQ ID NO: 588869
gguguuaaagacuaggagu

SEQ ID NO: 895653 - RNA, 19 nt, Artificial Sequence
  Description of Artificial Sequence: Synthetic oligonucleotide
  Antisense strand to SEQ ID NO: 895652
acuccuagucuuuaacacc

SEQ ID NO: 895654 - RNA, 19 nt, Artificial Sequence
  Description of Artificial Sequence: Synthetic oligonucleotide
  Sense strand starting at position 2745 of SEQ ID NO: 588869
acaauuuguuuagugucau

SEQ ID NO: 895655 - RNA, 19 nt, Artificial Sequence
  Description of Artificial Sequence: Synthetic oligonucleotide
  Antisense strand to SEQ ID NO: 895654
augacacuaaacaaauugu

SEQ ID NO: 895656 - RNA, 19 nt, Artificial Sequence
  Description of Artificial Sequence: Synthetic oligonucleotide
  Sense strand starting at position 2868 of SEQ ID NO: 588869
uacagaaaugccgauaugu

SEQ ID NO: 895657 - RNA, 19 nt, Artificial Sequence
  Description of Artificial Sequence: Synthetic oligonucleotide
  Antisense strand to SEQ ID NO: 895656
acauaucggcauuucugua

SEQ ID NO: 895658 - RNA, 19 nt, Artificial Sequence
  Description of Artificial Sequence: Synthetic oligonucleotide
  Sense strand starting at position 2870 of SEQ ID NO: 588869
cagaaaugccgauauguga

SEQ ID NO: 895659 - RNA, 19 nt, Artificial Sequence
  Description of Artificial Sequence: Synthetic oligonucleotide
  Antisense strand to SEQ ID NO: 895658
ucacauaucggcauuucug

SEQ ID NO: 895660 - RNA, 19 nt, Artificial Sequence
  Description of Artificial Sequence: Synthetic oligonucleotide
  Sense strand starting at position 2979 of SEQ ID NO: 588869
auauuagcuguagaauucu

SEQ ID NO: 895661 - RNA, 19 nt, Artificial Sequence
  Description of Artificial Sequence: Synthetic oligonucleotide
  Antisense strand to SEQ ID NO: 895660
agaauucuacagcuaauau

SEQ ID NO: 895662 - RNA, 19 nt, Artificial Sequence
  Description of Artificial Sequence: Synthetic oligonucleotide
  Sense strand starting at position 3315 of SEQ ID NO: 588869
cucccaucuggaugacaga

SEQ ID NO: 895663 - RNA, 19 nt, Artificial Sequence
  Description of Artificial Sequence: Synthetic oligonucleotide
  Antisense strand to SEQ ID NO: 895662
ucugucauccagaugggag

SEQ ID NO: 895664 - RNA, 19 nt, Artificial Sequence
  Description of Artificial Sequence: Synthetic oligonucleotide
  Sense strand starting at position 3401 of SEQ ID NO: 588869
caaguauuaugagugguua

SEQ ID NO: 895665 - RNA, 19 nt, Artificial Sequence
  Description of Artificial Sequence: Synthetic oligonucleotide
  Antisense strand to SEQ ID NO: 895664
uaaccacucauaauacuug

SEQ ID NO: 895666 - RNA, 19 nt, Artificial Sequence
  Description of Artificial Sequence: Synthetic oligonucleotide
  Sense strand starting at position 3412 of SEQ ID NO: 588869
agugguuauuucucgguuu

SEQ ID NO: 895667 - RNA, 19 nt, Artificial Sequence
  Description of Artificial Sequence: Synthetic oligonucleotide
  Antisense strand to SEQ ID NO: 895666
aaaccgagaaauaaccacu

SEQ ID NO: 895668 - RNA, 19 nt, Artificial Sequence
  Description of Artificial Sequence: Synthetic oligonucleotide
  Sense strand starting at position 3569 of SEQ ID NO: 588869
uuggucuaaguuugagauu

SEQ ID NO: 895669 - RNA, 19 nt, Artificial Sequence
  Description of Artificial Sequence: Synthetic oligonucleotide
  Antisense strand to SEQ ID NO: 895668
aaucucaaacuuagaccaa

SEQ ID NO: 895670 - RNA, 19 nt, Artificial Sequence
  Description of Artificial Sequence: Synthetic oligonucleotide
  Sense strand starting at position 3575 of SEQ ID NO: 588869
uaaguuugagauugcaacu

SEQ ID NO: 895671 - RNA, 19 nt, Artificial Sequence
  Description of Artificial Sequence: Synthetic oligonucleotide
  Antisense strand to SEQ ID NO: 895670
aguugcaaucucaaacuua

SEQ ID NO: 895672 - RNA, 19 nt, Artificial Sequence
  Description of Artificial Sequence: Synthetic oligonucleotide
  Sense strand starting at position 3628 of SEQ ID NO: 588869
cuuaguagcaguuacaagu

SEQ ID NO: 895673 - RNA, 19 nt, Artificial Sequence
  Description of Artificial Sequence: Synthetic oligonucleotide
  Antisense strand to SEQ ID NO: 895672
acuuguaacugcuacuaag

SEQ ID NO: 895674 - RNA, 19 nt, Artificial Sequence
  Description of Artificial Sequence: Synthetic oligonucleotide
  Sense strand starting at position 3968 of SEQ ID NO: 588869
cugaguuguuuaccaauua

SEQ ID NO: 895675 - RNA, 19 nt, Artificial Sequence
  Description of Artificial Sequence: Synthetic oligonucleotide
  Antisense strand to SEQ ID NO: 895674
uaauugguaaacaacucag

SEQ ID NO: 895676 - RNA, 19 nt, Artificial Sequence
  Description of Artificial Sequence: Synthetic oligonucleotide
  Sense strand starting at position 54 of SEQ ID NO: 588870
uugaaaggucuagaguguu

SEQ ID NO: 895677 - RNA, 19 nt, Artificial Sequence
  Description of Artificial Sequence: Synthetic oligonucleotide
  Antisense strand to SEQ ID NO: 895676
aacacucuagaccuuucaa

SEQ ID NO: 895678 - RNA, 19 nt, Artificial Sequence
  Description of Artificial Sequence: Synthetic oligonucleotide
  Sense strand starting at position 57 of SEQ ID NO: 588870
aaaggucuagaguguugua

SEQ ID NO: 895679 - RNA, 19 nt, Artificial Sequence
  Description of Artificial Sequence: Synthetic oligonucleotide
  Antisense strand to SEQ ID NO: 895678
uacaacacucuagaccuuu

SEQ ID NO: 895680 - RNA, 19 nt, Artificial Sequence
  Description of Artificial Sequence: Synthetic oligonucleotide
  Sense strand starting at position 60 of SEQ ID NO: 588870
ggucuagaguguuguaauc

SEQ ID NO: 895681 - RNA, 19 nt, Artificial Sequence
  Description of Artificial Sequence: Synthetic oligonucleotide
  Antisense strand to SEQ ID NO: 895680
gauuacaacacucuagacc

SEQ ID NO: 895682 - RNA, 19 nt, Artificial Sequence
  Description of Artificial Sequence: Synthetic oligonucleotide
  Sense strand starting at position 62 of SEQ ID NO: 588870
ucuagaguguuguaaucua

SEQ ID NO: 895683 - RNA, 19 nt, Artificial Sequence
  Description of Artificial Sequence: Synthetic oligonucleotide
  Antisense strand to SEQ ID NO: 895682
uagauuacaacacucuaga

SEQ ID NO: 895684 - RNA, 19 nt, Artificial Sequence
  Description of Artificial Sequence: Synthetic oligonucleotide
  Sense strand starting at position 143 of SEQ ID NO: 588870
gagguacuuccuugauggu

SEQ ID NO: 895685 - RNA, 19 nt, Artificial Sequence
  Description of Artificial Sequence: Synthetic oligonucleotide
  Antisense strand to SEQ ID NO: 895684
accaucaaggaaguaccuc

SEQ ID NO: 895686 - RNA, 19 nt, Artificial Sequence
  Description of Artificial Sequence: Synthetic oligonucleotide
  Sense strand starting at position 353 of SEQ ID NO: 588870
cccugagucucacccaaga

SEQ ID NO: 895687 - RNA, 19 nt, Artificial Sequence
  Description of Artificial Sequence: Synthetic oligonucleotide
  Antisense strand to SEQ ID NO: 895686
ucuugggugagacucaggg

SEQ ID NO: 895688 - RNA, 19 nt, Artificial Sequence
  Description of Artificial Sequence: Synthetic oligonucleotide
  Sense strand starting at position 396 of SEQ ID NO: 588870
cugccuauguucugucaag

SEQ ID NO: 895689 - RNA, 19 nt, Artificial Sequence
  Description of Artificial Sequence: Synthetic oligonucleotide
  Antisense strand to SEQ ID NO: 895688
cuugacagaacauaggcag

SEQ ID NO: 895690 - RNA, 19 nt, Artificial Sequence
  Description of Artificial Sequence: Synthetic oligonucleotide
  Sense strand starting at position 548 of SEQ ID NO: 588870
uuagaagucuaccugcacu

SEQ ID NO: 895691 - RNA, 19 nt, Artificial Sequence
  Description of Artificial Sequence: Synthetic oligonucleotide
  Antisense strand to SEQ ID NO: 895690
agugcagguagacuucuaa

SEQ ID NO: 895692 - RNA, 19 nt, Artificial Sequence
  Description of Artificial Sequence: Synthetic oligonucleotide
  Sense strand starting at position 707 of SEQ ID NO: 588870
ccgccaauauucucuuaag

SEQ ID NO: 895693 - RNA, 19 nt, Artificial Sequence
  Description of Artificial Sequence: Synthetic oligonucleotide
  Antisense strand to SEQ ID NO: 895692
cuuaagagaauauuggcgg

SEQ ID NO: 895694 - RNA, 19 nt, Artificial Sequence
  Description of Artificial Sequence: Synthetic oligonucleotide
  Sense strand starting at position 740 of SEQ ID NO: 588870
aagucagcugguggugaau

SEQ ID NO: 895695 - RNA, 19 nt, Artificial Sequence
  Description of Artificial Sequence: Synthetic oligonucleotide
  Antisense strand to SEQ ID NO: 895694
auucaccaccagcugacuu

SEQ ID NO: 895696 - RNA, 19 nt, Artificial Sequence
  Description of Artificial Sequence: Synthetic oligonucleotide
  Sense strand starting at position 832 of SEQ ID NO: 588870
caagccagguccugaaaua

SEQ ID NO: 895697 - RNA, 19 nt, Artificial Sequence
  Description of Artificial Sequence: Synthetic oligonucleotide
  Antisense strand to SEQ ID NO: 895696
uauuucaggaccuggcuug

SEQ ID NO: 895698 - RNA, 19 nt, Artificial Sequence
  Description of Artificial Sequence: Synthetic oligonucleotide
  Sense strand starting at position 902 of SEQ ID NO: 588870
aucugaagcuagcaaguuu

SEQ ID NO: 895699 - RNA, 19 nt, Artificial Sequence
  Description of Artificial Sequence: Synthetic oligonucleotide
  Antisense strand to SEQ ID NO: 895698
aaacuugcuagcuucagau

SEQ ID NO: 895700 - RNA, 19 nt, Artificial Sequence
  Description of Artificial Sequence: Synthetic oligonucleotide
  Sense strand starting at position 1215 of SEQ ID NO: 588870
gcaaguaaucugcaucaua

SEQ ID NO: 895701 - RNA, 19 nt, Artificial Sequence
  Description of Artificial Sequence: Synthetic oligonucleotide
  Antisense strand to SEQ ID NO: 895700
uaugaugcagauuacuugc

SEQ ID NO: 895702 - RNA, 19 nt, Artificial Sequence
  Description of Artificial Sequence: Synthetic oligonucleotide
  Sense strand starting at position 1323 of SEQ ID NO: 588870
guaacagagcaguaucacu

SEQ ID NO: 895703 - RNA, 19 nt, Artificial Sequence
  Description of Artificial Sequence: Synthetic oligonucleotide
  Antisense strand to SEQ ID NO: 895702
agugauacugcucuguuac

SEQ ID NO: 895704 - RNA, 19 nt, Artificial Sequence
  Description of Artificial Sequence: Synthetic oligonucleotide
  Sense strand starting at position 1376 of SEQ ID NO: 588870
uucuccaucucagaguaga

SEQ ID NO: 895705 - RNA, 19 nt, Artificial Sequence
  Description of Artificial Sequence: Synthetic oligonucleotide
  Antisense strand to SEQ ID NO: 895704
ucuacucugagauggagaa

SEQ ID NO: 895706 - RNA, 19 nt, Artificial Sequence
  Description of Artificial Sequence: Synthetic oligonucleotide
  Sense strand starting at position 1421 of SEQ ID NO: 588870
auuccauucucagggacau

SEQ ID NO: 895707 - RNA, 19 nt, Artificial Sequence
  Description of Artificial Sequence: Synthetic oligonucleotide
  Antisense strand to SEQ ID NO: 895706
augucccugagaauggaau

SEQ ID NO: 895708 - RNA, 19 nt, Artificial Sequence
  Description of Artificial Sequence: Synthetic oligonucleotide
  Sense strand starting at position 1540 of SEQ ID NO: 588870
augguaaggucuuucucuu

SEQ ID NO: 895709 - RNA, 19 nt, Artificial Sequence
  Description of Artificial Sequence: Synthetic oligonucleotide
  Antisense strand to SEQ ID NO: 895708
aagagaaagaccuuaccau

SEQ ID NO: 895710 - RNA, 19 nt, Artificial Sequence
  Description of Artificial Sequence: Synthetic oligonucleotide
  Sense strand starting at position 1656 of SEQ ID NO: 588870
ucgugucccugguuaauaa

SEQ ID NO: 895711 - RNA, 19 nt, Artificial Sequence
  Description of Artificial Sequence: Synthetic oligonucleotide
  Antisense strand to SEQ ID NO: 895710
uuauuaaccagggacacga

SEQ ID NO: 895712 - RNA, 19 nt, Artificial Sequence
  Description of Artificial Sequence: Synthetic oligonucleotide
  Sense strand starting at position 1657 of SEQ ID NO: 588870
cgugucccugguuaauaaa

SEQ ID NO: 895713 - RNA, 19 nt, Artificial Sequence
  Description of Artificial Sequence: Synthetic oligonucleotide
  Antisense strand to SEQ ID NO: 895712
uuuauuaaccagggacacg

SEQ ID NO: 895714 - RNA, 19 nt, Artificial Sequence
  Description of Artificial Sequence: Synthetic oligonucleotide
  Sense strand starting at position 1660 of SEQ ID NO: 588870
gucccugguuaauaaagga

SEQ ID NO: 895715 - RNA, 19 nt, Artificial Sequence
  Description of Artificial Sequence: Synthetic oligonucleotide
  Antisense strand to SEQ ID NO: 895714
uccuuuauuaaccagggac

SEQ ID NO: 895716 - RNA, 19 nt, Artificial Sequence
  Description of Artificial Sequence: Synthetic oligonucleotide
  Sense strand starting at position 1784 of SEQ ID NO: 588870
acauguuucuaugagcaca

SEQ ID NO: 895717 - RNA, 19 nt, Artificial Sequence
  Description of Artificial Sequence: Synthetic oligonucleotide
  Antisense strand to SEQ ID NO: 895716
ugugcucauagaaacaugu

SEQ ID NO: 895718 - RNA, 19 nt, Artificial Sequence
  Description of Artificial Sequence: Synthetic oligonucleotide
  Sense strand starting at position 2149 of SEQ ID NO: 588870
ugaguuggcauccaagaug

SEQ ID NO: 895719 - RNA, 19 nt, Artificial Sequence
  Description of Artificial Sequence: Synthetic oligonucleotide
  Antisense strand to SEQ ID NO: 895718
caucuuggaugccaacuca

SEQ ID NO: 895720 - RNA, 19 nt, Artificial Sequence
  Description of Artificial Sequence: Synthetic oligonucleotide
  Sense strand starting at position 2152 of SEQ ID NO: 588870
guuggcauccaagaugcaa

SEQ ID NO: 895721 - RNA, 19 nt, Artificial Sequence
  Description of Artificial Sequence: Synthetic oligonucleotide
  Antisense strand to SEQ ID NO: 895720
uugcaucuuggaugccaac

SEQ ID NO: 895722 - RNA, 19 nt, Artificial Sequence
  Description of Artificial Sequence: Synthetic oligonucleotide
  Sense strand starting at position 2213 of SEQ ID NO: 588870
gaaggagugucuuaugcag

SEQ ID NO: 895723 - RNA, 19 nt, Artificial Sequence
  Description of Artificial Sequence: Synthetic oligonucleotide
  Antisense strand to SEQ ID NO: 895722
cugcauaagacacuccuuc

SEQ ID NO: 895724 - RNA, 19 nt, Artificial Sequence
  Description of Artificial Sequence: Synthetic oligonucleotide
  Sense strand starting at position 2443 of SEQ ID NO: 588870
gcucacauguguuauccua

SEQ ID NO: 895725 - RNA, 19 nt, Artificial Sequence
  Description of Artificial Sequence: Synthetic oligonucleotide
  Antisense strand to SEQ ID NO: 895724
uaggauaacacaugugagc

SEQ ID NO: 895726 - RNA, 19 nt, Artificial Sequence
  Description of Artificial Sequence: Synthetic oligonucleotide
  Sense strand starting at position 2827 of SEQ ID NO: 588870
ggccuagacugucuuuaag

SEQ ID NO: 895727 - RNA, 19 nt, Artificial Sequence
  Description of Artificial Sequence: Synthetic oligonucleotide
  Antisense strand to SEQ ID NO: 895726
cuuaaagacagucuaggcc

SEQ ID NO: 895728 - RNA, 19 nt, Artificial Sequence
  Description of Artificial Sequence: Synthetic oligonucleotide
  Sense strand starting at position 2829 of SEQ ID NO: 588870
ccuagacugucuuuaaggu

SEQ ID NO: 895729 - RNA, 19 nt, Artificial Sequence
  Description of Artificial Sequence: Synthetic oligonucleotide
  Antisense strand to SEQ ID NO: 895728
accuuaaagacagucuagg

SEQ ID NO: 895730 - RNA, 19 nt, Artificial Sequence
  Description of Artificial Sequence: Synthetic oligonucleotide
  Sense strand starting at position 2830 of SEQ ID NO: 588870
cuagacugucuuuaagguu

SEQ ID NO: 895731 - RNA, 19 nt, Artificial Sequence
  Description of Artificial Sequence: Synthetic oligonucleotide
  Antisense strand to SEQ ID NO: 895730
aaccuuaaagacagucuag

SEQ ID NO: 895732 - RNA, 19 nt, Artificial Sequence
  Description of Artificial Sequence: Synthetic oligonucleotide
  Sense strand starting at position 2973 of SEQ ID NO: 588870
guuagcugaguuugguuua

SEQ ID NO: 895733 - RNA, 19 nt, Artificial Sequence
  Description of Artificial Sequence: Synthetic oligonucleotide
  Antisense strand to SEQ ID NO: 895732
uaaaccaaacucagcuaac

SEQ ID NO: 895734 - RNA, 19 nt, Artificial Sequence
  Description of Artificial Sequence: Synthetic oligonucleotide
  Sense strand starting at position 3352 of SEQ ID NO: 588870
ucuuuauguccauauguuc

SEQ ID NO: 895735 - RNA, 19 nt, Artificial Sequence
  Description of Artificial Sequence: Synthetic oligonucleotide
  Antisense strand to SEQ ID NO: 895734
gaacauauggacauaaaga

SEQ ID NO: 895736 - RNA, 19 nt, Artificial Sequence
  Description of Artificial Sequence: Synthetic oligonucleotide
  Sense strand starting at position 3514 of SEQ ID NO: 588870
uaugcuaugguguauagau

SEQ ID NO: 895737 - RNA, 19 nt, Artificial Sequence
  Description of Artificial Sequence: Synthetic oligonucleotide
  Antisense strand to SEQ ID NO: 895736
aucuauacaccauagcaua

SEQ ID NO: 895738 - RNA, 19 nt, Artificial Sequence
  Description of Artificial Sequence: Synthetic oligonucleotide
  Sense strand starting at position 3516 of SEQ ID NO: 588870
ugcuaugguguauagauau

SEQ ID NO: 895739 - RNA, 19 nt, Artificial Sequence
  Description of Artificial Sequence: Synthetic oligonucleotide
  Antisense strand to SEQ ID NO: 895738
auaucuauacaccauagca

SEQ ID NO: 895740 - RNA, 19 nt, Artificial Sequence
  Description of Artificial Sequence: Synthetic oligonucleotide
  Sense strand starting at position 3585 of SEQ ID NO: 588870
ugucuuugcuguuguuaac

SEQ ID NO: 895741 - RNA, 19 nt, Artificial Sequence
  Description of Artificial Sequence: Synthetic oligonucleotide
  Antisense strand to SEQ ID NO: 895740
guuaacaacagcaaagaca

SEQ ID NO: 895742 - RNA, 19 nt, Artificial Sequence
  Description of Artificial Sequence: Synthetic oligonucleotide
  Sense strand starting at position 3861 of SEQ ID NO: 588870
gugagaugguauccaucgu

SEQ ID NO: 895743 - RNA, 19 nt, Artificial Sequence
  Description of Artificial Sequence: Synthetic oligonucleotide
  Antisense strand to SEQ ID NO: 895742
acgauggauaccaucucac

SEQ ID NO: 895744 - RNA, 19 nt, Artificial Sequence
  Description of Artificial Sequence: Synthetic oligonucleotide
  Sense strand starting at position 3865 of SEQ ID NO: 588870
gaugguauccaucgugguu

SEQ ID NO: 895745 - RNA, 19 nt, Artificial Sequence
  Description of Artificial Sequence: Synthetic oligonucleotide
  Antisense strand to SEQ ID NO: 895744
aaccacgauggauaccauc

SEQ ID NO: 895746 - RNA, 19 nt, Artificial Sequence
  Description of Artificial Sequence: Synthetic oligonucleotide
  Sense strand starting at position 109 of SEQ ID NO: 588871
ggcagauaugucugggcac

SEQ ID NO: 895747 - RNA, 19 nt, Artificial Sequence
  Description of Artificial Sequence: Synthetic oligonucleotide
  Antisense strand to SEQ ID NO: 895746
gugcccagacauaucugcc

SEQ ID NO: 895748 - RNA, 19 nt, Artificial Sequence
  Description of Artificial Sequence: Synthetic oligonucleotide
  Sense strand starting at position 111 of SEQ ID NO: 588871
cagauaugucugggcacuu

SEQ ID NO: 895749 - RNA, 19 nt, Artificial Sequence
  Description of Artificial Sequence: Synthetic oligonucleotide
  Antisense strand to SEQ ID NO: 895748
aagugcccagacauaucug

SEQ ID NO: 895750 - RNA, 19 nt, Artificial Sequence
  Description of Artificial Sequence: Synthetic oligonucleotide
  Sense strand starting at position 247 of SEQ ID NO: 588871
acagccauuuguuagggau

SEQ ID NO: 895751 - RNA, 19 nt, Artificial Sequence
  Description of Artificial Sequence: Synthetic oligonucleotide
  Antisense strand to SEQ ID NO: 895750
aucccuaacaaauggcugu

SEQ ID NO: 895752 - RNA, 19 nt, Artificial Sequence
  Description of Artificial Sequence: Synthetic oligonucleotide
  Sense strand starting at position 330 of SEQ ID NO: 588871
cagccugauguuuaaaugu

SEQ ID NO: 895753 - RNA, 19 nt, Artificial Sequence
  Description of Artificial Sequence: Synthetic oligonucleotide
  Antisense strand to SEQ ID NO: 895752
acauuuaaacaucaggcug

SEQ ID NO: 895754 - RNA, 19 nt, Artificial Sequence
  Description of Artificial Sequence: Synthetic oligonucleotide
  Sense strand starting at position 364 of SEQ ID NO: 588871
aggagaauucugugacuug

SEQ ID NO: 895755 - RNA, 19 nt, Artificial Sequence
  Description of Artificial Sequence: Synthetic oligonucleotide
  Antisense strand to SEQ ID NO: 895754
caagucacagaauucuccu

SEQ ID NO: 895756 - RNA, 19 nt, Artificial Sequence
  Description of Artificial Sequence: Synthetic oligonucleotide
  Sense strand starting at position 365 of SEQ ID NO: 588871
ggagaauucugugacuuga

SEQ ID NO: 895757 - RNA, 19 nt, Artificial Sequence
  Description of Artificial Sequence: Synthetic oligonucleotide
  Antisense strand to SEQ ID NO: 895756
ucaagucacagaauucucc

SEQ ID NO: 895758 - RNA, 19 nt, Artificial Sequence
  Description of Artificial Sequence: Synthetic oligonucleotide
  Sense strand starting at position 385 of SEQ ID NO: 588871
gguacugggcuuuaagauu

SEQ ID NO: 895759 - RNA, 19 nt, Artificial Sequence
  Description of Artificial Sequence: Synthetic oligonucleotide
  Antisense strand to SEQ ID NO: 895758
aaucuuaaagcccaguacc

SEQ ID NO: 895760 - RNA, 19 nt, Artificial Sequence
  Description of Artificial Sequence: Synthetic oligonucleotide
  Sense strand starting at position 393 of SEQ ID NO: 588871
gcuuuaagauuuggagguu

SEQ ID NO: 895761 - RNA, 19 nt, Artificial Sequence
  Description of Artificial Sequence: Synthetic oligonucleotide
  Antisense strand to SEQ ID NO: 895760
aaccuccaaaucuuaaagc

SEQ ID NO: 895762 - RNA, 19 nt, Artificial Sequence
  Description of Artificial Sequence: Synthetic oligonucleotide
  Sense strand starting at position 410 of SEQ ID NO: 588871
uucuuaaguucccuguaca

SEQ ID NO: 895763 - RNA, 19 nt, Artificial Sequence
  Description of Artificial Sequence: Synthetic oligonucleotide
  Antisense strand to SEQ ID NO: 895762
uguacagggaacuuaagaa

SEQ ID NO: 895764 - RNA, 19 nt, Artificial Sequence
  Description of Artificial Sequence: Synthetic oligonucleotide
  Sense strand starting at position 411 of SEQ ID NO: 588871
ucuuaaguucccuguacag

SEQ ID NO: 895765 - RNA, 19 nt, Artificial Sequence
  Description of Artificial Sequence: Synthetic oligonucleotide
  Antisense strand to SEQ ID NO: 895764
cuguacagggaacuuaaga

SEQ ID NO: 895766 - RNA, 19 nt, Artificial Sequence
  Description of Artificial Sequence: Synthetic oligonucleotide
  Sense strand starting at position 413 of SEQ ID NO: 588871
uuaaguucccuguacagca

SEQ ID NO: 895767 - RNA, 19 nt, Artificial Sequence
  Description of Artificial Sequence: Synthetic oligonucleotide
  Antisense strand to SEQ ID NO: 895766
ugcuguacagggaacuuaa

SEQ ID NO: 895768 - RNA, 19 nt, Artificial Sequence
  Description of Artificial Sequence: Synthetic oligonucleotide
  Sense strand starting at position 550 of SEQ ID NO: 588871
uggcguuggcccugagaau

SEQ ID NO: 895769 - RNA, 19 nt, Artificial Sequence
  Description of Artificial Sequence: Synthetic oligonucleotide
  Antisense strand to SEQ ID NO: 895768
auucucagggccaacgcca

SEQ ID NO: 895770 - RNA, 19 nt, Artificial Sequence
  Description of Artificial Sequence: Synthetic oligonucleotide
  Sense strand starting at position 551 of SEQ ID NO: 588871
ggcguuggcccugagaauc

SEQ ID NO: 895771 - RNA, 19 nt, Artificial Sequence
  Description of Artificial Sequence: Synthetic oligonucleotide
  Antisense strand to SEQ ID NO: 895770
gauucucagggccaacgcc

SEQ ID NO: 895772 - RNA, 19 nt, Artificial Sequence
  Description of Artificial Sequence: Synthetic oligonucleotide
  Sense strand starting at position 607 of SEQ ID NO: 588871
ggaagugcucaguaaaccu

SEQ ID NO: 895773 - RNA, 19 nt, Artificial Sequence
  Description of Artificial Sequence: Synthetic oligonucleotide
  Antisense strand to SEQ ID NO: 895772
agguuuacugagcacuucc

SEQ ID NO: 895774 - RNA, 19 nt, Artificial Sequence
  Description of Artificial Sequence: Synthetic oligonucleotide
  Sense strand starting at position 614 of SEQ ID NO: 588871
cucaguaaaccuugggaau

SEQ ID NO: 895775 - RNA, 19 nt, Artificial Sequence
  Description of Artificial Sequence: Synthetic oligonucleotide
  Antisense strand to SEQ ID NO: 895774
auucccaagguuuacugag

SEQ ID NO: 895776 - RNA, 19 nt, Artificial Sequence
  Description of Artificial Sequence: Synthetic oligonucleotide
  Sense strand starting at position 615 of SEQ ID NO: 588871
ucaguaaaccuugggaauu

SEQ ID NO: 895777 - RNA, 19 nt, Artificial Sequence
  Description of Artificial Sequence: Synthetic oligonucleotide
  Antisense strand to SEQ ID NO: 895776
aauucccaagguuuacuga

SEQ ID NO: 895778 - RNA, 19 nt, Artificial Sequence
  Description of Artificial Sequence: Synthetic oligonucleotide
  Sense strand starting at position 616 of SEQ ID NO: 588871
caguaaaccuugggaauuu

SEQ ID NO: 895779 - RNA, 19 nt, Artificial Sequence
  Description of Artificial Sequence: Synthetic oligonucleotide
  Antisense strand to SEQ ID NO: 895778
aaauucccaagguuuacug

SEQ ID NO: 895780 - RNA, 19 nt, Artificial Sequence
  Description of Artificial Sequence: Synthetic oligonucleotide
  Sense strand starting at position 665 of SEQ ID NO: 588871
auaugaggcuauuaagauu

SEQ ID NO: 895781 - RNA, 19 nt, Artificial Sequence
  Description of Artificial Sequence: Synthetic oligonucleotide
  Antisense strand to SEQ ID NO: 895780
aaucuuaauagccucauau

SEQ ID NO: 895782 - RNA, 19 nt, Artificial Sequence
  Description of Artificial Sequence: Synthetic oligonucleotide
  Sense strand starting at position 705 of SEQ ID NO: 588871
cugggaucuuccucuccau

SEQ ID NO: 895783 - RNA, 19 nt, Artificial Sequence
  Description of Artificial Sequence: Synthetic oligonucleotide
  Antisense strand to SEQ ID NO: 895782
auggagaggaagaucccag

SEQ ID NO: 895784 - RNA, 19 nt, Artificial Sequence
  Description of Artificial Sequence: Synthetic oligonucleotide
  Sense strand starting at position 926 of SEQ ID NO: 588871
agaggaauccuguagcuuu

SEQ ID NO: 895785 - RNA, 19 nt, Artificial Sequence
  Description of Artificial Sequence: Synthetic oligonucleotide
  Antisense strand to SEQ ID NO: 895784
aaagcuacaggauuccucu

SEQ ID NO: 895786 - RNA, 19 nt, Artificial Sequence
  Description of Artificial Sequence: Synthetic oligonucleotide
  Sense strand starting at position 1011 of SEQ ID NO: 588871
guggagaauuugggagguu

SEQ ID NO: 895787 - RNA, 19 nt, Artificial Sequence
  Description of Artificial Sequence: Synthetic oligonucleotide
  Antisense strand to SEQ ID NO: 895786
aaccucccaaauucuccac

SEQ ID NO: 895788 - RNA, 19 nt, Artificial Sequence
  Description of Artificial Sequence: Synthetic oligonucleotide
  Sense strand starting at position 1023 of SEQ ID NO: 588871
ggagguuccuagcuggaga

SEQ ID NO: 895789 - RNA, 19 nt, Artificial Sequence
  Description of Artificial Sequence: Synthetic oligonucleotide
  Antisense strand to SEQ ID NO: 895788
ucuccagcuaggaaccucc

SEQ ID NO: 895790 - RNA, 19 nt, Artificial Sequence
  Description of Artificial Sequence: Synthetic oligonucleotide
  Sense strand starting at position 1024 of SEQ ID NO: 588871
gagguuccuagcuggagau

SEQ ID NO: 895791 - RNA, 19 nt, Artificial Sequence
  Description of Artificial Sequence: Synthetic oligonucleotide
  Antisense strand to SEQ ID NO: 895790
aucuccagcuaggaaccuc

SEQ ID NO: 895792 - RNA, 19 nt, Artificial Sequence
  Description of Artificial Sequence: Synthetic oligonucleotide
  Sense strand starting at position 1025 of SEQ ID NO: 588871
agguuccuagcuggagaua

SEQ ID NO: 895793 - RNA, 19 nt, Artificial Sequence
  Description of Artificial Sequence: Synthetic oligonucleotide
  Antisense strand to SEQ ID NO: 895792
uaucuccagcuaggaaccu

SEQ ID NO: 895794 - RNA, 19 nt, Artificial Sequence
  Description of Artificial Sequence: Synthetic oligonucleotide
  Sense strand starting at position 1026 of SEQ ID NO: 588871
gguuccuagcuggagauaa

SEQ ID NO: 895795 - RNA, 19 nt, Artificial Sequence
  Description of Artificial Sequence: Synthetic oligonucleotide
  Antisense strand to SEQ ID NO: 895794
uuaucuccagcuaggaacc

SEQ ID NO: 895796 - RNA, 19 nt, Artificial Sequence
  Description of Artificial Sequence: Synthetic oligonucleotide
  Sense strand starting at position 1117 of SEQ ID NO: 588871
gggauuuggucagaugcag

SEQ ID NO: 895797 - RNA, 19 nt, Artificial Sequence
  Description of Artificial Sequence: Synthetic oligonucleotide
  Antisense strand to SEQ ID NO: 895796
cugcaucugaccaaauccc

SEQ ID NO: 895798 - RNA, 19 nt, Artificial Sequence
  Description of Artificial Sequence: Synthetic oligonucleotide
  Sense strand starting at position 1177 of SEQ ID NO: 588871
auguguagaccagggcaua

SEQ ID NO: 895799 - RNA, 19 nt, Artificial Sequence
  Description of Artificial Sequence: Synthetic oligonucleotide
  Antisense strand to SEQ ID NO: 895798
uaugcccuggucuacacau

SEQ ID NO: 895800 - RNA, 19 nt, Artificial Sequence
  Description of Artificial Sequence: Synthetic oligonucleotide
  Sense strand starting at position 1202 of SEQ ID NO: 588871
gcugaaauugccgagcacu

SEQ ID NO: 895801 - RNA, 19 nt, Artificial Sequence
  Description of Artificial Sequence: Synthetic oligonucleotide
  Antisense strand to SEQ ID NO: 895800
agugcucggcaauuucagc

SEQ ID NO: 895802 - RNA, 19 nt, Artificial Sequence
  Description of Artificial Sequence: Synthetic oligonucleotide
  Sense strand starting at position 1423 of SEQ ID NO: 588871
gggaaauucccaggccauu

SEQ ID NO: 895803 - RNA, 19 nt, Artificial Sequence
  Description of Artificial Sequence: Synthetic oligonucleotide
  Antisense strand to SEQ ID NO: 895802
aauggccugggaauuuccc

SEQ ID NO: 895804 - RNA, 19 nt, Artificial Sequence
  Description of Artificial Sequence: Synthetic oligonucleotide
  Sense strand starting at position 1645 of SEQ ID NO: 588871
gggaccaguuccuuaaaua

SEQ ID NO: 895805 - RNA, 19 nt, Artificial Sequence
  Description of Artificial Sequence: Synthetic oligonucleotide
  Antisense strand to SEQ ID NO: 895804
uauuuaaggaacugguccc

SEQ ID NO: 895806 - RNA, 19 nt, Artificial Sequence
  Description of Artificial Sequence: Synthetic oligonucleotide
  Sense strand starting at position 2564 of SEQ ID NO: 588871
acacguaacccagguagua

SEQ ID NO: 895807 - RNA, 19 nt, Artificial Sequence
  Description of Artificial Sequence: Synthetic oligonucleotide
  Antisense strand to SEQ ID NO: 895806
uacuaccuggguuacgugu

SEQ ID NO: 895808 - RNA, 19 nt, Artificial Sequence
  Description of Artificial Sequence: Synthetic oligonucleotide
  Sense strand starting at position 2569 of SEQ ID NO: 588871
uaacccagguaguaagaua

SEQ ID NO: 895809 - RNA, 19 nt, Artificial Sequence
  Description of Artificial Sequence: Synthetic oligonucleotide
  Antisense strand to SEQ ID NO: 895808
uaucuuacuaccuggguua

SEQ ID NO: 895810 - RNA, 19 nt, Artificial Sequence
  Description of Artificial Sequence: Synthetic oligonucleotide
  Sense strand starting at position 2577 of SEQ ID NO: 588871
guaguaagauaacauugaa

SEQ ID NO: 895811 - RNA, 19 nt, Artificial Sequence
  Description of Artificial Sequence: Synthetic oligonucleotide
  Antisense strand to SEQ ID NO: 895810
uucaauguuaucuuacuac

SEQ ID NO: 895812 - RNA, 19 nt, Artificial Sequence
  Description of Artificial Sequence: Synthetic oligonucleotide
  Sense strand starting at position 2748 of SEQ ID NO: 588871
gccuuuguugcugaguauu

SEQ ID NO: 895813 - RNA, 19 nt, Artificial Sequence
  Description of Artificial Sequence: Synthetic oligonucleotide
  Antisense strand to SEQ ID NO: 895812
aauacucagcaacaaaggc

SEQ ID NO: 895814 - RNA, 19 nt, Artificial Sequence
  Description of Artificial Sequence: Synthetic oligonucleotide
  Sense strand starting at position 2785 of SEQ ID NO: 588871
agcuauuaacaugguaaag

SEQ ID NO: 895815 - RNA, 19 nt, Artificial Sequence
  Description of Artificial Sequence: Synthetic oligonucleotide
  Antisense strand to SEQ ID NO: 895814
cuuuaccauguuaauagcu

SEQ ID NO: 895816 - RNA, 19 nt, Artificial Sequence
  Description of Artificial Sequence: Synthetic oligonucleotide
  Sense strand starting at position 3059 of SEQ ID NO: 588871
cacaguccucguggccaua

SEQ ID NO: 895817 - RNA, 19 nt, Artificial Sequence
  Description of Artificial Sequence: Synthetic oligonucleotide
  Antisense strand to SEQ ID NO: 895816
uauggccacgaggacugug

SEQ ID NO: 895818 - RNA, 19 nt, Artificial Sequence
  Description of Artificial Sequence: Synthetic oligonucleotide
  Sense strand starting at position 3061 of SEQ ID NO: 588871
caguccucguggccauaua

SEQ ID NO: 895819 - RNA, 19 nt, Artificial Sequence
  Description of Artificial Sequence: Synthetic oligonucleotide
  Antisense strand to SEQ ID NO: 895818
uauauggccacgaggacug

SEQ ID NO: 895820 - RNA, 19 nt, Artificial Sequence
  Description of Artificial Sequence: Synthetic oligonucleotide
  Sense strand starting at position 3062 of SEQ ID NO: 588871
aguccucguggccauauau

SEQ ID NO: 895821 - RNA, 19 nt, Artificial Sequence
  Description of Artificial Sequence: Synthetic oligonucleotide
  Antisense strand to SEQ ID NO: 895820
auauauggccacgaggacu

SEQ ID NO: 895822 - RNA, 19 nt, Artificial Sequence
  Description of Artificial Sequence: Synthetic oligonucleotide
  Sense strand starting at position 3361 of SEQ ID NO: 588871
ccuugugauccuuccgcuu

SEQ ID NO: 895823 - RNA, 19 nt, Artificial Sequence
  Description of Artificial Sequence: Synthetic oligonucleotide
  Antisense strand to SEQ ID NO: 895822
aagcggaaggaucacaagg

SEQ ID NO: 895824 - RNA, 19 nt, Artificial Sequence
  Description of Artificial Sequence: Synthetic oligonucleotide
  Sense strand starting at position 3525 of SEQ ID NO: 588871
guaggagaauugcuugaug

SEQ ID NO: 895825 - RNA, 19 nt, Artificial Sequence
  Description of Artificial Sequence: Synthetic oligonucleotide
  Antisense strand to SEQ ID NO: 895824
caucaagcaauucuccuac

SEQ ID NO: 895826 - RNA, 19 nt, Artificial Sequence
  Description of Artificial Sequence: Synthetic oligonucleotide
  Sense strand starting at position 101 of SEQ ID NO: 588872
uguguuucugcccaguuaa

SEQ ID NO: 895827 - RNA, 19 nt, Artificial Sequence
  Description of Artificial Sequence: Synthetic oligonucleotide
  Antisense strand to SEQ ID NO: 895826
uuaacugggcagaaacaca

SEQ ID NO: 895828 - RNA, 19 nt, Artificial Sequence
  Description of Artificial Sequence: Synthetic oligonucleotide
  Sense strand starting at position 186 of SEQ ID NO: 588872
uuagcaaacguuggugaaa

SEQ ID NO: 895829 - RNA, 19 nt, Artificial Sequence
  Description of Artificial Sequence: Synthetic oligonucleotide
  Antisense strand to SEQ ID NO: 895828
uuucaccaacguuugcuaa

SEQ ID NO: 895830 - RNA, 19 nt, Artificial Sequence
  Description of Artificial Sequence: Synthetic oligonucleotide
  Sense strand starting at position 187 of SEQ ID NO: 588872
uagcaaacguuggugaaau

SEQ ID NO: 895831 - RNA, 19 nt, Artificial Sequence
  Description of Artificial Sequence: Synthetic oligonucleotide
  Antisense strand to SEQ ID NO: 895830
auuucaccaacguuugcua

SEQ ID NO: 895832 - RNA, 19 nt, Artificial Sequence
  Description of Artificial Sequence: Synthetic oligonucleotide
  Sense strand starting at position 189 of SEQ ID NO: 588872
gcaaacguuggugaaauga

SEQ ID NO: 895833 - RNA, 19 nt, Artificial Sequence
  Description of Artificial Sequence: Synthetic oligonucleotide
  Antisense strand to SEQ ID NO: 895832
ucauuucaccaacguuugc

SEQ ID NO: 895834 - RNA, 19 nt, Artificial Sequence
  Description of Artificial Sequence: Synthetic oligonucleotide
  Sense strand starting at position 307 of SEQ ID NO: 588872
aggauccaguccucuacaa

SEQ ID NO: 895835 - RNA, 19 nt, Artificial Sequence
  Description of Artificial Sequence: Synthetic oligonucleotide
  Antisense strand to SEQ ID NO: 895834
uuguagaggacuggauccu

SEQ ID NO: 895836 - RNA, 19 nt, Artificial Sequence
  Description of Artificial Sequence: Synthetic oligonucleotide
  Sense strand starting at position 685 of SEQ ID NO: 588872
guggaucauccgcagguuu

SEQ ID NO: 895837 - RNA, 19 nt, Artificial Sequence
  Description of Artificial Sequence: Synthetic oligonucleotide
  Antisense strand to SEQ ID NO: 895836
aaaccugcggaugauccac

SEQ ID NO: 895838 - RNA, 19 nt, Artificial Sequence
  Description of Artificial Sequence: Synthetic oligonucleotide
  Sense strand starting at position 801 of SEQ ID NO: 588872
ucaccuuuccgagacugca

SEQ ID NO: 895839 - RNA, 19 nt, Artificial Sequence
  Description of Artificial Sequence: Synthetic oligonucleotide
  Antisense strand to SEQ ID NO: 895838
ugcagucucggaaagguga

SEQ ID NO: 895840 - RNA, 19 nt, Artificial Sequence
  Description of Artificial Sequence: Synthetic oligonucleotide
  Sense strand starting at position 819 of SEQ ID NO: 588872
augucaugaccucagugua

SEQ ID NO: 895841 - RNA, 19 nt, Artificial Sequence
  Description of Artificial Sequence: Synthetic oligonucleotide
  Antisense strand to SEQ ID NO: 895840
uacacugaggucaugacau

SEQ ID NO: 895842 - RNA, 19 nt, Artificial Sequence
  Description of Artificial Sequence: Synthetic oligonucleotide
  Sense strand starting at position 2129 of SEQ ID NO: 588872
cauagaaccgauuagcgaa

SEQ ID NO: 895843 - RNA, 19 nt, Artificial Sequence
  Description of Artificial Sequence: Synthetic oligonucleotide
  Antisense strand to SEQ ID NO: 895842
uucgcuaaucgguucuaug

SEQ ID NO: 895844 - RNA, 19 nt, Artificial Sequence
  Description of Artificial Sequence: Synthetic oligonucleotide
  Sense strand starting at position 2198 of SEQ ID NO: 588872
ggaguuuccgucugggaga

SEQ ID NO: 895845 - RNA, 19 nt, Artificial Sequence
  Description of Artificial Sequence: Synthetic oligonucleotide
  Antisense strand to SEQ ID NO: 895844
ucucccagacggaaacucc

SEQ ID NO: 895846 - RNA, 19 nt, Artificial Sequence
  Description of Artificial Sequence: Synthetic oligonucleotide
  Sense strand starting at position 2233 of SEQ ID NO: 588872
aguguagugcgagcccaua

SEQ ID NO: 895847 - RNA, 19 nt, Artificial Sequence
  Description of Artificial Sequence: Synthetic oligonucleotide
  Antisense strand to SEQ ID NO: 895846
uaugggcucgcacuacacu

SEQ ID NO: 895848 - RNA, 19 nt, Artificial Sequence
  Description of Artificial Sequence: Synthetic oligonucleotide
  Sense strand starting at position 2452 of SEQ ID NO: 588872
guuccugcuccgcuuuaau

SEQ ID NO: 895849 - RNA, 19 nt, Artificial Sequence
  Description of Artificial Sequence: Synthetic oligonucleotide
  Antisense strand to SEQ ID NO: 895848
auuaaagcggagcaggaac

SEQ ID NO: 895850 - RNA, 19 nt, Artificial Sequence
  Description of Artificial Sequence: Synthetic oligonucleotide
  Sense strand starting at position 2654 of SEQ ID NO: 588872
ucaugcuucccagauugcu

SEQ ID NO: 895851 - RNA, 19 nt, Artificial Sequence
  Description of Artificial Sequence: Synthetic oligonucleotide
  Antisense strand to SEQ ID NO: 895850
agcaaucugggaagcauga

SEQ ID NO: 895852 - RNA, 19 nt, Artificial Sequence
  Description of Artificial Sequence: Synthetic oligonucleotide
  Sense strand starting at position 2760 of SEQ ID NO: 588872
ucuuaagugucacucacuu

SEQ ID NO: 895853 - RNA, 19 nt, Artificial Sequence
  Description of Artificial Sequence: Synthetic oligonucleotide
  Antisense strand to SEQ ID NO: 895852
aagugagugacacuuaaga

SEQ ID NO: 895854 - RNA, 19 nt, Artificial Sequence
  Description of Artificial Sequence: Synthetic oligonucleotide
  Sense strand starting at position 2892 of SEQ ID NO: 588872
guuggaucucaccaguugu

SEQ ID NO: 895855 - RNA, 19 nt, Artificial Sequence
  Description of Artificial Sequence: Synthetic oligonucleotide
  Antisense strand to SEQ ID NO: 895854
acaacuggugagauccaac

SEQ ID NO: 895856 - RNA, 19 nt, Artificial Sequence
  Description of Artificial Sequence: Synthetic oligonucleotide
  Sense strand starting at position 2996 of SEQ ID NO: 588872
agaggcuuggcuuguaauc

SEQ ID NO: 895857 - RNA, 19 nt, Artificial Sequence
  Description of Artificial Sequence: Synthetic oligonucleotide
  Antisense strand to SEQ ID NO: 895856
gauuacaagccaagccucu

SEQ ID NO: 895858 - RNA, 19 nt, Artificial Sequence
  Description of Artificial Sequence: Synthetic oligonucleotide
  Sense strand starting at position 3028 of SEQ ID NO: 588872
uguguuuccucaucucuaa

SEQ ID NO: 895859 - RNA, 19 nt, Artificial Sequence
  Description of Artificial Sequence: Synthetic oligonucleotide
  Antisense strand to SEQ ID NO: 895858
uuagagaugaggaaacaca

SEQ ID NO: 895860 - RNA, 19 nt, Artificial Sequence
  Description of Artificial Sequence: Synthetic oligonucleotide
  Sense strand starting at position 3054 of SEQ ID NO: 588872
ugaccauuaucuuccagga

SEQ ID NO: 895861 - RNA, 19 nt, Artificial Sequence
  Description of Artificial Sequence: Synthetic oligonucleotide
  Antisense strand to SEQ ID NO: 895860
uccuggaagauaaugguca

SEQ ID NO: 895862 - RNA, 19 nt, Artificial Sequence
  Description of Artificial Sequence: Synthetic oligonucleotide
  Sense strand starting at position 3058 of SEQ ID NO: 588872
cauuaucuuccaggagagu

SEQ ID NO: 895863 - RNA, 19 nt, Artificial Sequence
  Description of Artificial Sequence: Synthetic oligonucleotide
  Antisense strand to SEQ ID NO: 895862
acucuccuggaagauaaug

SEQ ID NO: 895864 - RNA, 19 nt, Artificial Sequence
  Description of Artificial Sequence: Synthetic oligonucleotide
  Sense strand starting at position 3072 of SEQ ID NO: 588872
agaguugugaagcaaggua

SEQ ID NO: 895865 - RNA, 19 nt, Artificial Sequence
  Description of Artificial Sequence: Synthetic oligonucleotide
  Antisense strand to SEQ ID NO: 895864
uaccuugcuucacaacucu

SEQ ID NO: 895866 - RNA, 19 nt, Artificial Sequence
  Description of Artificial Sequence: Synthetic oligonucleotide
  Sense strand starting at position 3118 of SEQ ID NO: 588872
aaggcuaaccgguaugaug

SEQ ID NO: 895867 - RNA, 19 nt, Artificial Sequence
  Description of Artificial Sequence: Synthetic oligonucleotide
  Antisense strand to SEQ ID NO: 895866
caucauaccgguuagccuu

SEQ ID NO: 895868 - RNA, 19 nt, Artificial Sequence
  Description of Artificial Sequence: Synthetic oligonucleotide
  Sense strand starting at position 3120 of SEQ ID NO: 588872
ggcuaaccgguaugaugaa

SEQ ID NO: 895869 - RNA, 19 nt, Artificial Sequence
  Description of Artificial Sequence: Synthetic oligonucleotide
  Antisense strand to SEQ ID NO: 895868
uucaucauaccgguuagcc

SEQ ID NO: 895870 - RNA, 19 nt, Artificial Sequence
  Description of Artificial Sequence: Synthetic oligonucleotide
  Sense strand starting at position 3135 of SEQ ID NO: 588872
ugaagacagucaucugaua

SEQ ID NO: 895871 - RNA, 19 nt, Artificial Sequence
  Description of Artificial Sequence: Synthetic oligonucleotide
  Antisense strand to SEQ ID NO: 895870
uaucagaugacugucuuca

SEQ ID NO: 895872 - RNA, 19 nt, Artificial Sequence
  Description of Artificial Sequence: Synthetic oligonucleotide
  Sense strand starting at position 3252 of SEQ ID NO: 588872
agcaucuaaugcuugauaa

SEQ ID NO: 895873 - RNA, 19 nt, Artificial Sequence
  Description of Artificial Sequence: Synthetic oligonucleotide
  Antisense strand to SEQ ID NO: 895872
uuaucaagcauuagaugcu

SEQ ID NO: 895874 - RNA, 19 nt, Artificial Sequence
  Description of Artificial Sequence: Synthetic oligonucleotide
  Sense strand starting at position 3253 of SEQ ID NO: 588872
gcaucuaaugcuugauaac

SEQ ID NO: 895875 - RNA, 19 nt, Artificial Sequence
  Description of Artificial Sequence: Synthetic oligonucleotide
  Antisense strand to SEQ ID NO: 895874
guuaucaagcauuagaugc

SEQ ID NO: 895876 - RNA, 19 nt, Artificial Sequence
  Description of Artificial Sequence: Synthetic oligonucleotide
  Sense strand starting at position 3262 of SEQ ID NO: 588872
gcuugauaacucgagcacu

SEQ ID NO: 895877 - RNA, 19 nt, Artificial Sequence
  Description of Artificial Sequence: Synthetic oligonucleotide
  Antisense strand to SEQ ID NO: 895876
agugcucgaguuaucaagc

SEQ ID NO: 895878 - RNA, 19 nt, Artificial Sequence
  Description of Artificial Sequence: Synthetic oligonucleotide
  Sense strand starting at position 3265 of SEQ ID NO: 588872
ugauaacucgagcacuaga

SEQ ID NO: 895879 - RNA, 19 nt, Artificial Sequence
  Description of Artificial Sequence: Synthetic oligonucleotide
  Antisense strand to SEQ ID NO: 895878
ucuagugcucgaguuauca

SEQ ID NO: 895880 - RNA, 19 nt, Artificial Sequence
  Description of Artificial Sequence: Synthetic oligonucleotide
  Sense strand starting at position 3272 of SEQ ID NO: 588872
ucgagcacuagauguguau

SEQ ID NO: 895881 - RNA, 19 nt, Artificial Sequence
  Description of Artificial Sequence: Synthetic oligonucleotide
  Antisense strand to SEQ ID NO: 895880
auacacaucuagugcucga

SEQ ID NO: 895882 - RNA, 19 nt, Artificial Sequence
  Description of Artificial Sequence: Synthetic oligonucleotide
  Sense strand starting at position 3276 of SEQ ID NO: 588872
gcacuagauguguauucuu

SEQ ID NO: 895883 - RNA, 19 nt, Artificial Sequence
  Description of Artificial Sequence: Synthetic oligonucleotide
  Antisense strand to SEQ ID NO: 895882
aagaauacacaucuagugc

SEQ ID NO: 895884 - RNA, 19 nt, Artificial Sequence
  Description of Artificial Sequence: Synthetic oligonucleotide
  Sense strand starting at position 3279 of SEQ ID NO: 588872
cuagauguguauucuuauc

SEQ ID NO: 895885 - RNA, 19 nt, Artificial Sequence
  Description of Artificial Sequence: Synthetic oligonucleotide
  Antisense strand to SEQ ID NO: 895884
gauaagaauacacaucuag

SEQ ID NO: 895886 - RNA, 19 nt, Artificial Sequence
  Description of Artificial Sequence: Synthetic oligonucleotide
  Sense strand starting at position 3281 of SEQ ID NO: 588872
agauguguauucuuaucac

SEQ ID NO: 895887 - RNA, 19 nt, Artificial Sequence
  Description of Artificial Sequence: Synthetic oligonucleotide
  Antisense strand to SEQ ID NO: 895886
gugauaagaauacacaucu

SEQ ID NO: 895888 - RNA, 19 nt, Artificial Sequence
  Description of Artificial Sequence: Synthetic oligonucleotide
  Sense strand starting at position 3284 of SEQ ID NO: 588872
uguguauucuuaucacagc

SEQ ID NO: 895889 - RNA, 19 nt, Artificial Sequence
  Description of Artificial Sequence: Synthetic oligonucleotide
  Antisense strand to SEQ ID NO: 895888
gcugugauaagaauacaca

SEQ ID NO: 895890 - RNA, 19 nt, Artificial Sequence
  Description of Artificial Sequence: Synthetic oligonucleotide
  Sense strand starting at position 3303 of SEQ ID NO: 588872
auuuaucacugcuuuguga

SEQ ID NO: 895891 - RNA, 19 nt, Artificial Sequence
  Description of Artificial Sequence: Synthetic oligonucleotide
  Antisense strand to SEQ ID NO: 895890
ucacaaagcagugauaaau

SEQ ID NO: 895892 - RNA, 19 nt, Artificial Sequence
  Description of Artificial Sequence: Synthetic oligonucleotide
  Sense strand starting at position 3305 of SEQ ID NO: 588872
uuaucacugcuuugugauc

SEQ ID NO: 895893 - RNA, 19 nt, Artificial Sequence
  Description of Artificial Sequence: Synthetic oligonucleotide
  Antisense strand to SEQ ID NO: 895892
gaucacaaagcagugauaa

SEQ ID NO: 895894 - RNA, 19 nt, Artificial Sequence
  Description of Artificial Sequence: Synthetic oligonucleotide
  Sense strand starting at position 3317 of SEQ ID NO: 588872
ugugaucccuuguuuacuu

SEQ ID NO: 895895 - RNA, 19 nt, Artificial Sequence
  Description of Artificial Sequence: Synthetic oligonucleotide
  Antisense strand to SEQ ID NO: 895894
aaguaaacaagggaucaca

SEQ ID NO: 895896 - RNA, 19 nt, Artificial Sequence
  Description of Artificial Sequence: Synthetic oligonucleotide
  Sense strand starting at position 3386 of SEQ ID NO: 588872
gugugcagaguggaucaau

SEQ ID NO: 895897 - RNA, 19 nt, Artificial Sequence
  Description of Artificial Sequence: Synthetic oligonucleotide
  Antisense strand to SEQ ID NO: 895896
auugauccacucugcacac

SEQ ID NO: 895898 - RNA, 19 nt, Artificial Sequence
  Description of Artificial Sequence: Synthetic oligonucleotide
  Sense strand starting at position 3551 of SEQ ID NO: 588872
uuggccuuuguagacaaau

SEQ ID NO: 895899 - RNA, 19 nt, Artificial Sequence
  Description of Artificial Sequence: Synthetic oligonucleotide
  Antisense strand to SEQ ID NO: 895898
auuugucuacaaaggccaa

SEQ ID NO: 895900 - RNA, 19 nt, Artificial Sequence
  Description of Artificial Sequence: Synthetic oligonucleotide
  Sense strand starting at position 3671 of SEQ ID NO: 588872
cugugacucuugucaaauu

SEQ ID NO: 895901 - RNA, 19 nt, Artificial Sequence
  Description of Artificial Sequence: Synthetic oligonucleotide
  Antisense strand to SEQ ID NO: 895900
aauuugacaagagucacag

SEQ ID NO: 895902 - RNA, 19 nt, Artificial Sequence
  Description of Artificial Sequence: Synthetic oligonucleotide
  Sense strand starting at position 3686 of SEQ ID NO: 588872
aauuguggguggcucuaau

SEQ ID NO: 895903 - RNA, 19 nt, Artificial Sequence
  Description of Artificial Sequence: Synthetic oligonucleotide
  Antisense strand to SEQ ID NO: 895902
auuagagccacccacaauu

SEQ ID NO: 895904 - RNA, 19 nt, Artificial Sequence
  Description of Artificial Sequence: Synthetic oligonucleotide
  Sense strand starting at position 3705 of SEQ ID NO: 588872
gcugcugauuuggaagaau

SEQ ID NO: 895905 - RNA, 19 nt, Artificial Sequence
  Description of Artificial Sequence: Synthetic oligonucleotide
  Antisense strand to SEQ ID NO: 895904
auucuuccaaaucagcagc

SEQ ID NO: 895906 - RNA, 19 nt, Artificial Sequence
  Description of Artificial Sequence: Synthetic oligonucleotide
  Sense strand starting at position 27 of SEQ ID NO: 588874
gaugguaugaauggaaugu

SEQ ID NO: 895907 - RNA, 19 nt, Artificial Sequence
  Description of Artificial Sequence: Synthetic oligonucleotide
  Antisense strand to SEQ ID NO: 895906
acauuccauucauaccauc

SEQ ID NO: 895908 - RNA, 19 nt, Artificial Sequence
  Description of Artificial Sequence: Synthetic oligonucleotide
  Sense strand starting at position 44 of SEQ ID NO: 588874
gucccuaguggcuaauuaa

SEQ ID NO: 895909 - RNA, 19 nt, Artificial Sequence
  Description of Artificial Sequence: Synthetic oligonucleotide
  Antisense strand to SEQ ID NO: 895908
uuaauuagccacuagggac

SEQ ID NO: 895910 - RNA, 19 nt, Artificial Sequence
  Description of Artificial Sequence: Synthetic oligonucleotide
  Sense strand starting at position 47 of SEQ ID NO: 588874
ccuaguggcuaauuaauca

SEQ ID NO: 895911 - RNA, 19 nt, Artificial Sequence
  Description of Artificial Sequence: Synthetic oligonucleotide
  Antisense strand to SEQ ID NO: 895910
ugauuaauuagccacuagg

SEQ ID NO: 895912 - RNA, 19 nt, Artificial Sequence
  Description of Artificial Sequence: Synthetic oligonucleotide
  Sense strand starting at position 325 of SEQ ID NO: 588874
cagguuguaggucagagaa

SEQ ID NO: 895913 - RNA, 19 nt, Artificial Sequence
  Description of Artificial Sequence: Synthetic oligonucleotide
  Antisense strand to SEQ ID NO: 895912
uucucugaccuacaaccug

SEQ ID NO: 895914 - RNA, 19 nt, Artificial Sequence
  Description of Artificial Sequence: Synthetic oligonucleotide
  Sense strand starting at position 423 of SEQ ID NO: 588874
uggcuaggaugguucugaa

SEQ ID NO: 895915 - RNA, 19 nt, Artificial Sequence
  Description of Artificial Sequence: Synthetic oligonucleotide
  Antisense strand to SEQ ID NO: 895914
uucagaaccauccuagcca

SEQ ID NO: 895916 - RNA, 19 nt, Artificial Sequence
  Description of Artificial Sequence: Synthetic oligonucleotide
  Sense strand starting at position 612 of SEQ ID NO: 588874
agagaagcgaucugggcua

SEQ ID NO: 895917 - RNA, 19 nt, Artificial Sequence
  Description of Artificial Sequence: Synthetic oligonucleotide
  Antisense strand to SEQ ID NO: 895916
uagcccagaucgcuucucu

SEQ ID NO: 895918 - RNA, 19 nt, Artificial Sequence
  Description of Artificial Sequence: Synthetic oligonucleotide
  Sense strand starting at position 646 of SEQ ID NO: 588874
gggcuuuguggucagauag

SEQ ID NO: 895919 - RNA, 19 nt, Artificial Sequence
  Description of Artificial Sequence: Synthetic oligonucleotide
  Antisense strand to SEQ ID NO: 895918
cuaucugaccacaaagccc

SEQ ID NO: 895920 - RNA, 19 nt, Artificial Sequence
  Description of Artificial Sequence: Synthetic oligonucleotide
  Sense strand starting at position 692 of SEQ ID NO: 588874
uccuacuugggaugaaucu

SEQ ID NO: 895921 - RNA, 19 nt, Artificial Sequence
  Description of Artificial Sequence: Synthetic oligonucleotide
  Antisense strand to SEQ ID NO: 895920
agauucaucccaaguagga

SEQ ID NO: 895922 - RNA, 19 nt, Artificial Sequence
  Description of Artificial Sequence: Synthetic oligonucleotide
  Sense strand starting at position 701 of SEQ ID NO: 588874
ggaugaaucuuggccucug

SEQ ID NO: 895923 - RNA, 19 nt, Artificial Sequence
  Description of Artificial Sequence: Synthetic oligonucleotide
  Antisense strand to SEQ ID NO: 895922
cagaggccaagauucaucc

SEQ ID NO: 895924 - RNA, 19 nt, Artificial Sequence
  Description of Artificial Sequence: Synthetic oligonucleotide
  Sense strand starting at position 769 of SEQ ID NO: 588874
gggagcaaucccuggaacu

SEQ ID NO: 895925 - RNA, 19 nt, Artificial Sequence
  Description of Artificial Sequence: Synthetic oligonucleotide
  Antisense strand to SEQ ID NO: 895924
aguuccagggauugcuccc

SEQ ID NO: 895926 - RNA, 19 nt, Artificial Sequence
  Description of Artificial Sequence: Synthetic oligonucleotide
  Sense strand starting at position 770 of SEQ ID NO: 588874
ggagcaaucccuggaacuu

SEQ ID NO: 895927 - RNA, 19 nt, Artificial Sequence
  Description of Artificial Sequence: Synthetic oligonucleotide
  Antisense strand to SEQ ID NO: 895926
aaguuccagggauugcucc

SEQ ID NO: 895928 - RNA, 19 nt, Artificial Sequence
  Description of Artificial Sequence: Synthetic oligonucleotide
  Sense strand starting at position 1192 of SEQ ID NO: 588874
cugagcuuccuguaucuua

SEQ ID NO: 895929 - RNA, 19 nt, Artificial Sequence
  Description of Artificial Sequence: Synthetic oligonucleotide
  Antisense strand to SEQ ID NO: 895928
uaagauacaggaagcucag

SEQ ID NO: 895930 - RNA, 19 nt, Artificial Sequence
  Description of Artificial Sequence: Synthetic oligonucleotide
  Sense strand starting at position 1496 of SEQ ID NO: 588874
guggaagccuuccuggaau

SEQ ID NO: 895931 - RNA, 19 nt, Artificial Sequence
  Description of Artificial Sequence: Synthetic oligonucleotide
  Antisense strand to SEQ ID NO: 895930
auuccaggaaggcuuccac

SEQ ID NO: 895932 - RNA, 19 nt, Artificial Sequence
  Description of Artificial Sequence: Synthetic oligonucleotide
  Sense strand starting at position 1498 of SEQ ID NO: 588874
ggaagccuuccuggaaucu

SEQ ID NO: 895933 - RNA, 19 nt, Artificial Sequence
  Description of Artificial Sequence: Synthetic oligonucleotide
  Antisense strand to SEQ ID NO: 895932
agauuccaggaaggcuucc

SEQ ID NO: 895934 - RNA, 19 nt, Artificial Sequence
  Description of Artificial Sequence: Synthetic oligonucleotide
  Sense strand starting at position 2211 of SEQ ID NO: 588874
ugucuuggcgauuaugaga

SEQ ID NO: 895935 - RNA, 19 nt, Artificial Sequence
  Description of Artificial Sequence: Synthetic oligonucleotide
  Antisense strand to SEQ ID NO: 895934
ucucauaaucgccaagaca

SEQ ID NO: 895936 - RNA, 19 nt, Artificial Sequence
  Description of Artificial Sequence: Synthetic oligonucleotide
  Sense strand starting at position 2219 of SEQ ID NO: 588874
cgauuaugagaauguuuau

SEQ ID NO: 895937 - RNA, 19 nt, Artificial Sequence
  Description of Artificial Sequence: Synthetic oligonucleotide
  Antisense strand to SEQ ID NO: 895936
auaaacauucucauaaucg

SEQ ID NO: 895938 - RNA, 19 nt, Artificial Sequence
  Description of Artificial Sequence: Synthetic oligonucleotide
  Sense strand starting at position 2225 of SEQ ID NO: 588874
ugagaauguuuauugcuca

SEQ ID NO: 895939 - RNA, 19 nt, Artificial Sequence
  Description of Artificial Sequence: Synthetic oligonucleotide
  Antisense strand to SEQ ID NO: 895938
ugagcaauaaacauucuca

SEQ ID NO: 895940 - RNA, 19 nt, Artificial Sequence
  Description of Artificial Sequence: Synthetic oligonucleotide
  Sense strand starting at position 2314 of SEQ ID NO: 588874
gcaacacauuuggaguaaa

SEQ ID NO: 895941 - RNA, 19 nt, Artificial Sequence
  Description of Artificial Sequence: Synthetic oligonucleotide
  Antisense strand to SEQ ID NO: 895940
uuuacuccaaauguguugc

SEQ ID NO: 895942 - RNA, 19 nt, Artificial Sequence
  Description of Artificial Sequence: Synthetic oligonucleotide
  Sense strand starting at position 2325 of SEQ ID NO: 588874
ggaguaaauuaagucaauu

SEQ ID NO: 895943 - RNA, 19 nt, Artificial Sequence
  Description of Artificial Sequence: Synthetic oligonucleotide
  Antisense strand to SEQ ID NO: 895942
aauugacuuaauuuacucc

SEQ ID NO: 895944 - RNA, 19 nt, Artificial Sequence
  Description of Artificial Sequence: Synthetic oligonucleotide
  Sense strand starting at position 2336 of SEQ ID NO: 588874
agucaauuaugcccuagau

SEQ ID NO: 895945 - RNA, 19 nt, Artificial Sequence
  Description of Artificial Sequence: Synthetic oligonucleotide
  Antisense strand to SEQ ID NO: 895944
aucuagggcauaauugacu

SEQ ID NO: 895946 - RNA, 19 nt, Artificial Sequence
  Description of Artificial Sequence: Synthetic oligonucleotide
  Sense strand starting at position 2358 of SEQ ID NO: 588874
uaguguagucauuacaaga

SEQ ID NO: 895947 - RNA, 19 nt, Artificial Sequence
  Description of Artificial Sequence: Synthetic oligonucleotide
  Antisense strand to SEQ ID NO: 895946
ucuuguaaugacuacacua

SEQ ID NO: 895948 - RNA, 19 nt, Artificial Sequence
  Description of Artificial Sequence: Synthetic oligonucleotide
  Sense strand starting at position 2428 of SEQ ID NO: 588874
ggaauacacccguguaauu

SEQ ID NO: 895949 - RNA, 19 nt, Artificial Sequence
  Description of Artificial Sequence: Synthetic oligonucleotide
  Antisense strand to SEQ ID NO: 895948
aauuacacggguguauucc

SEQ ID NO: 895950 - RNA, 19 nt, Artificial Sequence
  Description of Artificial Sequence: Synthetic oligonucleotide
  Sense strand starting at position 2455 of SEQ ID NO: 588874
cuuugauuacuaggguagu

SEQ ID NO: 895951 - RNA, 19 nt, Artificial Sequence
  Description of Artificial Sequence: Synthetic oligonucleotide
  Antisense strand to SEQ ID NO: 895950
acuacccuaguaaucaaag

SEQ ID NO: 895952 - RNA, 19 nt, Artificial Sequence
  Description of Artificial Sequence: Synthetic oligonucleotide
  Sense strand starting at position 2492 of SEQ ID NO: 588874
guacuuccauuucugugua

SEQ ID NO: 895953 - RNA, 19 nt, Artificial Sequence
  Description of Artificial Sequence: Synthetic oligonucleotide
  Antisense strand to SEQ ID NO: 895952
uacacagaaauggaaguac

SEQ ID NO: 895954 - RNA, 19 nt, Artificial Sequence
  Description of Artificial Sequence: Synthetic oligonucleotide
  Sense strand starting at position 2494 of SEQ ID NO: 588874
acuuccauuucuguguauu

SEQ ID NO: 895955 - RNA, 19 nt, Artificial Sequence
  Description of Artificial Sequence: Synthetic oligonucleotide
  Antisense strand to SEQ ID NO: 895954
aauacacagaaauggaagu

SEQ ID NO: 895956 - RNA, 19 nt, Artificial Sequence
  Description of Artificial Sequence: Synthetic oligonucleotide
  Sense strand starting at position 2495 of SEQ ID NO: 588874
cuuccauuucuguguauug

SEQ ID NO: 895957 - RNA, 19 nt, Artificial Sequence
  Description of Artificial Sequence: Synthetic oligonucleotide
  Antisense strand to SEQ ID NO: 895956
caauacacagaaauggaag

SEQ ID NO: 895958 - RNA, 19 nt, Artificial Sequence
  Description of Artificial Sequence: Synthetic oligonucleotide
  Sense strand starting at position 2578 of SEQ ID NO: 588874
gguuauugauucuuaagca

SEQ ID NO: 895959 - RNA, 19 nt, Artificial Sequence
  Description of Artificial Sequence: Synthetic oligonucleotide
  Antisense strand to SEQ ID NO: 895958
ugcuuaagaaucaauaacc

SEQ ID NO: 895960 - RNA, 19 nt, Artificial Sequence
  Description of Artificial Sequence: Synthetic oligonucleotide
  Sense strand starting at position 2600 of SEQ ID NO: 588874
uuaggaacccuuugcuaau

SEQ ID NO: 895961 - RNA, 19 nt, Artificial Sequence
  Description of Artificial Sequence: Synthetic oligonucleotide
  Antisense strand to SEQ ID NO: 895960
auuagcaaaggguuccuaa

SEQ ID NO: 895962 - RNA, 19 nt, Artificial Sequence
  Description of Artificial Sequence: Synthetic oligonucleotide
  Sense strand starting at position 2612 of SEQ ID NO: 588874
ugcuaaucagccuaugagu

SEQ ID NO: 895963 - RNA, 19 nt, Artificial Sequence
  Description of Artificial Sequence: Synthetic oligonucleotide
  Antisense strand to SEQ ID NO: 895962
acucauaggcugauuagca

SEQ ID NO: 895964 - RNA, 19 nt, Artificial Sequence
  Description of Artificial Sequence: Synthetic oligonucleotide
  Sense strand starting at position 2614 of SEQ ID NO: 588874
cuaaucagccuaugaguaa

SEQ ID NO: 895965 - RNA, 19 nt, Artificial Sequence
  Description of Artificial Sequence: Synthetic oligonucleotide
  Antisense strand to SEQ ID NO: 895964
uuacucauaggcugauuag

SEQ ID NO: 895966 - RNA, 19 nt, Artificial Sequence
  Description of Artificial Sequence: Synthetic oligonucleotide
  Sense strand starting at position 2662 of SEQ ID NO: 588874
acaguauuagcagagaccu

SEQ ID NO: 895967 - RNA, 19 nt, Artificial Sequence
  Description of Artificial Sequence: Synthetic oligonucleotide
  Antisense strand to SEQ ID NO: 895966
aggucucugcuaauacugu

SEQ ID NO: 895968 - RNA, 19 nt, Artificial Sequence
  Description of Artificial Sequence: Synthetic oligonucleotide
  Sense strand starting at position 2741 of SEQ ID NO: 588874
aggcaaauagcuuacaucu

SEQ ID NO: 895969 - RNA, 19 nt, Artificial Sequence
  Description of Artificial Sequence: Synthetic oligonucleotide
  Antisense strand to SEQ ID NO: 895968
agauguaagcuauuugccu

SEQ ID NO: 895970 - RNA, 19 nt, Artificial Sequence
  Description of Artificial Sequence: Synthetic oligonucleotide
  Sense strand starting at position 2881 of SEQ ID NO: 588874
augguagaauccucagggu

SEQ ID NO: 895971 - RNA, 19 nt, Artificial Sequence
  Description of Artificial Sequence: Synthetic oligonucleotide
  Antisense strand to SEQ ID NO: 895970
acccugaggauucuaccau

SEQ ID NO: 895972 - RNA, 19 nt, Artificial Sequence
  Description of Artificial Sequence: Synthetic oligonucleotide
  Sense strand starting at position 2885 of SEQ ID NO: 588874
uagaauccucagggucaca

SEQ ID NO: 895973 - RNA, 19 nt, Artificial Sequence
  Description of Artificial Sequence: Synthetic oligonucleotide
  Antisense strand to SEQ ID NO: 895972
ugugacccugaggauucua

SEQ ID NO: 895974 - RNA, 19 nt, Artificial Sequence
  Description of Artificial Sequence: Synthetic oligonucleotide
  Sense strand starting at position 3222 of SEQ ID NO: 588874
uuaagauucucagucugaa

SEQ ID NO: 895975 - RNA, 19 nt, Artificial Sequence
  Description of Artificial Sequence: Synthetic oligonucleotide
  Antisense strand to SEQ ID NO: 895974
uucagacugagaaucuuaa

SEQ ID NO: 895976 - RNA, 19 nt, Artificial Sequence
  Description of Artificial Sequence: Synthetic oligonucleotide
  Sense strand starting at position 3310 of SEQ ID NO: 588874
gcugcugucaugguuuacu

SEQ ID NO: 895977 - RNA, 19 nt, Artificial Sequence
  Description of Artificial Sequence: Synthetic oligonucleotide
  Antisense strand to SEQ ID NO: 895976
aguaaaccaugacagcagc

SEQ ID NO: 895978 - RNA, 19 nt, Artificial Sequence
  Description of Artificial Sequence: Synthetic oligonucleotide
  Sense strand starting at position 3356 of SEQ ID NO: 588874
ggcuaaggguaucucugaa

SEQ ID NO: 895979 - RNA, 19 nt, Artificial Sequence
  Description of Artificial Sequence: Synthetic oligonucleotide
  Antisense strand to SEQ ID NO: 895978
uucagagauacccuuagcc

SEQ ID NO: 895980 - RNA, 19 nt, Artificial Sequence
  Description of Artificial Sequence: Synthetic oligonucleotide
  Sense strand starting at position 3371 of SEQ ID NO: 588874
ugaagcaucuggguuccaa

SEQ ID NO: 895981 - RNA, 19 nt, Artificial Sequence
  Description of Artificial Sequence: Synthetic oligonucleotide
  Antisense strand to SEQ ID NO: 895980
uuggaacccagaugcuuca

SEQ ID NO: 895982 - RNA, 19 nt, Artificial Sequence
  Description of Artificial Sequence: Synthetic oligonucleotide
  Sense strand starting at position 3938 of SEQ ID NO: 588874
gcucauuuguagucaguug

SEQ ID NO: 895983 - RNA, 19 nt, Artificial Sequence
  Description of Artificial Sequence: Synthetic oligonucleotide
  Antisense strand to SEQ ID NO: 895982
caacugacuacaaaugagc

SEQ ID NO: 895984 - RNA, 19 nt, Artificial Sequence
  Description of Artificial Sequence: Synthetic oligonucleotide
  Sense strand starting at position 3952 of SEQ ID NO: 588874
aguugauagagcggaaauc

SEQ ID NO: 895985 - RNA, 19 nt, Artificial Sequence
  Description of Artificial Sequence: Synthetic oligonucleotide
  Antisense strand to SEQ ID NO: 895984
gauuuccgcucuaucaacu

SEQ ID NO: 895986 - RNA, 19 nt, Artificial Sequence
  Description of Artificial Sequence: Synthetic oligonucleotide
  Sense strand starting at position 694 of SEQ ID NO: 588875
gguagaauugaguacggcu

SEQ ID NO: 895987 - RNA, 19 nt, Artificial Sequence
  Description of Artificial Sequence: Synthetic oligonucleotide
  Antisense strand to SEQ ID NO: 895986
agccguacucaauucuacc

SEQ ID NO: 895988 - RNA, 19 nt, Artificial Sequence
  Description of Artificial Sequence: Synthetic oligonucleotide
  Sense strand starting at position 925 of SEQ ID NO: 588875
ggguggucagacuggugaa

SEQ ID NO: 895989 - RNA, 19 nt, Artificial Sequence
  Description of Artificial Sequence: Synthetic oligonucleotide
  Antisense strand to SEQ ID NO: 895988
uucaccagucugaccaccc

SEQ ID NO: 895990 - RNA, 19 nt, Artificial Sequence
  Description of Artificial Sequence: Synthetic oligonucleotide
  Sense strand starting at position 1109 of SEQ ID NO: 588875
gcgcgugucagagacauuu

SEQ ID NO: 895991 - RNA, 19 nt, Artificial Sequence
  Description of Artificial Sequence: Synthetic oligonucleotide
  Antisense strand to SEQ ID NO: 895990
aaaugucucugacacgcgc

SEQ ID NO: 895992 - RNA, 19 nt, Artificial Sequence
  Description of Artificial Sequence: Synthetic oligonucleotide
  Sense strand starting at position 1442 of SEQ ID NO: 588875
uguggauggucccgacuua

SEQ ID NO: 895993 - RNA, 19 nt, Artificial Sequence
  Description of Artificial Sequence: Synthetic oligonucleotide
  Antisense strand to SEQ ID NO: 895992
uaagucgggaccauccaca

SEQ ID NO: 895994 - RNA, 19 nt, Artificial Sequence
  Description of Artificial Sequence: Synthetic oligonucleotide
  Sense strand starting at position 1454 of SEQ ID NO: 588875
cgacuuagacuuuggcauu

SEQ ID NO: 895995 - RNA, 19 nt, Artificial Sequence
  Description of Artificial Sequence: Synthetic oligonucleotide
  Antisense strand to SEQ ID NO: 895994
aaugccaaagucuaagucg

SEQ ID NO: 895996 - RNA, 19 nt, Artificial Sequence
  Description of Artificial Sequence: Synthetic oligonucleotide
  Sense strand starting at position 1455 of SEQ ID NO: 588875
gacuuagacuuuggcauuu

SEQ ID NO: 895997 - RNA, 19 nt, Artificial Sequence
  Description of Artificial Sequence: Synthetic oligonucleotide
  Antisense strand to SEQ ID NO: 895996
aaaugccaaagucuaaguc

SEQ ID NO: 895998 - RNA, 19 nt, Artificial Sequence
  Description of Artificial Sequence: Synthetic oligonucleotide
  Sense strand starting at position 1457 of SEQ ID NO: 588875
cuuagacuuuggcauuuga

SEQ ID NO: 895999 - RNA, 19 nt, Artificial Sequence
  Description of Artificial Sequence: Synthetic oligonucleotide
  Antisense strand to SEQ ID NO: 895998
ucaaaugccaaagucuaag

SEQ ID NO: 896000 - RNA, 19 nt, Artificial Sequence
  Description of Artificial Sequence: Synthetic oligonucleotide
  Sense strand starting at position 1464 of SEQ ID NO: 588875
uuuggcauuugauacuaaa

SEQ ID NO: 896001 - RNA, 19 nt, Artificial Sequence
  Description of Artificial Sequence: Synthetic oligonucleotide
  Antisense strand to SEQ ID NO: 896000
uuuaguaucaaaugccaaa

SEQ ID NO: 896002 - RNA, 19 nt, Artificial Sequence
  Description of Artificial Sequence: Synthetic oligonucleotide
  Sense strand starting at position 1467 of SEQ ID NO: 588875
ggcauuugauacuaaacag

SEQ ID NO: 896003 - RNA, 19 nt, Artificial Sequence
  Description of Artificial Sequence: Synthetic oligonucleotide
  Antisense strand to SEQ ID NO: 896002
cuguuuaguaucaaaugcc

SEQ ID NO: 896004 - RNA, 19 nt, Artificial Sequence
  Description of Artificial Sequence: Synthetic oligonucleotide
  Sense strand starting at position 1484 of SEQ ID NO: 588875
agugacgucucggcuugau

SEQ ID NO: 896005 - RNA, 19 nt, Artificial Sequence
  Description of Artificial Sequence: Synthetic oligonucleotide
  Antisense strand to SEQ ID NO: 896004
aucaagccgagacgucacu

SEQ ID NO: 896006 - RNA, 19 nt, Artificial Sequence
  Description of Artificial Sequence: Synthetic oligonucleotide
  Sense strand starting at position 1487 of SEQ ID NO: 588875
gacgucucggcuugauaag

SEQ ID NO: 896007 - RNA, 19 nt, Artificial Sequence
  Description of Artificial Sequence: Synthetic oligonucleotide
  Antisense strand to SEQ ID NO: 896006
cuuaucaagccgagacguc

SEQ ID NO: 896008 - RNA, 19 nt, Artificial Sequence
  Description of Artificial Sequence: Synthetic oligonucleotide
  Sense strand starting at position 2143 of SEQ ID NO: 588875
auccgugugacccaagaga

SEQ ID NO: 896009 - RNA, 19 nt, Artificial Sequence
  Description of Artificial Sequence: Synthetic oligonucleotide
  Antisense strand to SEQ ID NO: 896008
ucucuugggucacacggau

SEQ ID NO: 896010 - RNA, 19 nt, Artificial Sequence
  Description of Artificial Sequence: Synthetic oligonucleotide
  Sense strand starting at position 2430 of SEQ ID NO: 588875
cgggcucggcccugguaua

SEQ ID NO: 896011 - RNA, 19 nt, Artificial Sequence
  Description of Artificial Sequence: Synthetic oligonucleotide
  Antisense strand to SEQ ID NO: 896010
uauaccagggccgagcccg

SEQ ID NO: 896012 - RNA, 19 nt, Artificial Sequence
  Description of Artificial Sequence: Synthetic oligonucleotide
  Sense strand starting at position 2709 of SEQ ID NO: 588875
gggacuuugcccuggagaa

SEQ ID NO: 896013 - RNA, 19 nt, Artificial Sequence
  Description of Artificial Sequence: Synthetic oligonucleotide
  Antisense strand to SEQ ID NO: 896012
uucuccagggcaaaguccc

SEQ ID NO: 896014 - RNA, 19 nt, Artificial Sequence
  Description of Artificial Sequence: Synthetic oligonucleotide
  Sense strand starting at position 2710 of SEQ ID NO: 588875
ggacuuugcccuggagaag

SEQ ID NO: 896015 - RNA, 19 nt, Artificial Sequence
  Description of Artificial Sequence: Synthetic oligonucleotide
  Antisense strand to SEQ ID NO: 896014
cuucuccagggcaaagucc

SEQ ID NO: 896016 - RNA, 19 nt, Artificial Sequence
  Description of Artificial Sequence: Synthetic oligonucleotide
  Sense strand starting at position 2728 of SEQ ID NO: 588875
gguagaagcuucugagugu

SEQ ID NO: 896017 - RNA, 19 nt, Artificial Sequence
  Description of Artificial Sequence: Synthetic oligonucleotide
  Antisense strand to SEQ ID NO: 896016
acacucagaagcuucuacc

SEQ ID NO: 896018 - RNA, 19 nt, Artificial Sequence
  Description of Artificial Sequence: Synthetic oligonucleotide
  Sense strand starting at position 2739 of SEQ ID NO: 588875
cugaguguccgcucagcaa

SEQ ID NO: 896019 - RNA, 19 nt, Artificial Sequence
  Description of Artificial Sequence: Synthetic oligonucleotide
  Antisense strand to SEQ ID NO: 896018
uugcugagcggacacucag

SEQ ID NO: 896020 - RNA, 19 nt, Artificial Sequence
  Description of Artificial Sequence: Synthetic oligonucleotide
  Sense strand starting at position 2742 of SEQ ID NO: 588875
aguguccgcucagcaaauu

SEQ ID NO: 896021 - RNA, 19 nt, Artificial Sequence
  Description of Artificial Sequence: Synthetic oligonucleotide
  Antisense strand to SEQ ID NO: 896020
aauuugcugagcggacacu

SEQ ID NO: 896022 - RNA, 19 nt, Artificial Sequence
  Description of Artificial Sequence: Synthetic oligonucleotide
  Sense strand starting at position 2829 of SEQ ID NO: 588875
agugacagcucguuccagu

SEQ ID NO: 896023 - RNA, 19 nt, Artificial Sequence
  Description of Artificial Sequence: Synthetic oligonucleotide
  Antisense strand to SEQ ID NO: 896022
acuggaacgagcugucacu

SEQ ID NO: 896024 - RNA, 19 nt, Artificial Sequence
  Description of Artificial Sequence: Synthetic oligonucleotide
  Sense strand starting at position 2955 of SEQ ID NO: 588875
ccaggaaagguucagcgaa

SEQ ID NO: 896025 - RNA, 19 nt, Artificial Sequence
  Description of Artificial Sequence: Synthetic oligonucleotide
  Antisense strand to SEQ ID NO: 896024
uucgcugaaccuuuccugg

SEQ ID NO: 896026 - RNA, 19 nt, Artificial Sequence
  Description of Artificial Sequence: Synthetic oligonucleotide
  Sense strand starting at position 3117 of SEQ ID NO: 588875
gugggaacuccaugagcuu

SEQ ID NO: 896027 - RNA, 19 nt, Artificial Sequence
  Description of Artificial Sequence: Synthetic oligonucleotide
  Antisense strand to SEQ ID NO: 896026
aagcucauggaguucccac

SEQ ID NO: 896028 - RNA, 19 nt, Artificial Sequence
  Description of Artificial Sequence: Synthetic oligonucleotide
  Sense strand starting at position 870 of SEQ ID NO: 588876
gguagaauugaguacggcu

SEQ ID NO: 896029 - RNA, 19 nt, Artificial Sequence
  Description of Artificial Sequence: Synthetic oligonucleotide
  Antisense strand to SEQ ID NO: 896028
agccguacucaauucuacc

SEQ ID NO: 896030 - RNA, 19 nt, Artificial Sequence
  Description of Artificial Sequence: Synthetic oligonucleotide
  Sense strand starting at position 1101 of SEQ ID NO: 588876
ggguggucagacuggugaa

SEQ ID NO: 896031 - RNA, 19 nt, Artificial Sequence
  Description of Artificial Sequence: Synthetic oligonucleotide
  Antisense strand to SEQ ID NO: 896030
uucaccagucugaccaccc

SEQ ID NO: 896032 - RNA, 19 nt, Artificial Sequence
  Description of Artificial Sequence: Synthetic oligonucleotide
  Sense strand starting at position 1285 of SEQ ID NO: 588876
gcgcgugucagagacauuu

SEQ ID NO: 896033 - RNA, 19 nt, Artificial Sequence
  Description of Artificial Sequence: Synthetic oligonucleotide
  Antisense strand to SEQ ID NO: 896032
aaaugucucugacacgcgc

SEQ ID NO: 896034 - RNA, 19 nt, Artificial Sequence
  Description of Artificial Sequence: Synthetic oligonucleotide
  Sense strand starting at position 1618 of SEQ ID NO: 588876
uguggauggucccgacuua

SEQ ID NO: 896035 - RNA, 19 nt, Artificial Sequence
  Description of Artificial Sequence: Synthetic oligonucleotide
  Antisense strand to SEQ ID NO: 896034
uaagucgggaccauccaca

SEQ ID NO: 896036 - RNA, 19 nt, Artificial Sequence
  Description of Artificial Sequence: Synthetic oligonucleotide
  Sense strand starting at position 1630 of SEQ ID NO: 588876
cgacuuagacuuuggcauu

SEQ ID NO: 896037 - RNA, 19 nt, Artificial Sequence
  Description of Artificial Sequence: Synthetic oligonucleotide
  Antisense strand to SEQ ID NO: 896036
aaugccaaagucuaagucg

SEQ ID NO: 896038 - RNA, 19 nt, Artificial Sequence
  Description of Artificial Sequence: Synthetic oligonucleotide
  Sense strand starting at position 1631 of SEQ ID NO: 588876
gacuuagacuuuggcauuu

SEQ ID NO: 896039 - RNA, 19 nt, Artificial Sequence
  Description of Artificial Sequence: Synthetic oligonucleotide
  Antisense strand to SEQ ID NO: 896038
aaaugccaaagucuaaguc

SEQ ID NO: 896040 - RNA, 19 nt, Artificial Sequence
  Description of Artificial Sequence: Synthetic oligonucleotide
  Sense strand starting at position 1633 of SEQ ID NO: 588876
cuuagacuuuggcauuuga

SEQ ID NO: 896041 - RNA, 19 nt, Artificial Sequence
  Description of Artificial Sequence: Synthetic oligonucleotide
  Antisense strand to SEQ ID NO: 896040
ucaaaugccaaagucuaag

SEQ ID NO: 896042 - RNA, 19 nt, Artificial Sequence
  Description of Artificial Sequence: Synthetic oligonucleotide
  Sense strand starting at position 1640 of SEQ ID NO: 588876
uuuggcauuugauacuaaa

SEQ ID NO: 896043 - RNA, 19 nt, Artificial Sequence
  Description of Artificial Sequence: Synthetic oligonucleotide
  Antisense strand to SEQ ID NO: 896042
uuuaguaucaaaugccaaa

SEQ ID NO: 896044 - RNA, 19 nt, Artificial Sequence
  Description of Artificial Sequence: Synthetic oligonucleotide
  Sense strand starting at position 1643 of SEQ ID NO: 588876
ggcauuugauacuaaacag

SEQ ID NO: 896045 - RNA, 19 nt, Artificial Sequence
  Description of Artificial Sequence: Synthetic oligonucleotide
  Antisense strand to SEQ ID NO: 896044
cuguuuaguaucaaaugcc

SEQ ID NO: 896046 - RNA, 19 nt, Artificial Sequence
  Description of Artificial Sequence: Synthetic oligonucleotide
  Sense strand starting at position 1660 of SEQ ID NO: 588876
agugacgucucggcuugau

SEQ ID NO: 896047 - RNA, 19 nt, Artificial Sequence
  Description of Artificial Sequence: Synthetic oligonucleotide
  Antisense strand to SEQ ID NO: 896046
aucaagccgagacgucacu

SEQ ID NO: 896048 - RNA, 19 nt, Artificial Sequence
  Description of Artificial Sequence: Synthetic oligonucleotide
  Sense strand starting at position 1663 of SEQ ID NO: 588876
gacgucucggcuugauaag

SEQ ID NO: 896049 - RNA, 19 nt, Artificial Sequence
  Description of Artificial Sequence: Synthetic oligonucleotide
  Antisense strand to SEQ ID NO: 896048
cuuaucaagccgagacguc

SEQ ID NO: 896050 - RNA, 19 nt, Artificial Sequence
  Description of Artificial Sequence: Synthetic oligonucleotide
  Sense strand starting at position 2319 of SEQ ID NO: 588876
auccgugugacccaagaga

SEQ ID NO: 896051 - RNA, 19 nt, Artificial Sequence
  Description of Artificial Sequence: Synthetic oligonucleotide
  Antisense strand to SEQ ID NO: 896050
ucucuugggucacacggau

SEQ ID NO: 896052 - RNA, 19 nt, Artificial Sequence
  Description of Artificial Sequence: Synthetic oligonucleotide
  Sense strand starting at position 2606 of SEQ ID NO: 588876
cgggcucggcccugguaua

SEQ ID NO: 896053 - RNA, 19 nt, Artificial Sequence
  Description of Artificial Sequence: Synthetic oligonucleotide
  Antisense strand to SEQ ID NO: 896052
uauaccagggccgagcccg

SEQ ID NO: 896054 - RNA, 19 nt, Artificial Sequence
  Description of Artificial Sequence: Synthetic oligonucleotide
  Sense strand starting at position 2885 of SEQ ID NO: 588876
gggacuuugcccuggagaa

SEQ ID NO: 896055 - RNA, 19 nt, Artificial Sequence
  Description of Artificial Sequence: Synthetic oligonucleotide
  Antisense strand to SEQ ID NO: 896054
uucuccagggcaaaguccc

SEQ ID NO: 896056 - RNA, 19 nt, Artificial Sequence
  Description of Artificial Sequence: Synthetic oligonucleotide
  Sense strand starting at position 2886 of SEQ ID NO: 588876
ggacuuugcccuggagaag

SEQ ID NO: 896057 - RNA, 19 nt, Artificial Sequence
  Description of Artificial Sequence: Synthetic oligonucleotide
  Antisense strand to SEQ ID NO: 896056
cuucuccagggcaaagucc

SEQ ID NO: 896058 - RNA, 19 nt, Artificial Sequence
  Description of Artificial Sequence: Synthetic oligonucleotide
  Sense strand starting at position 2904 of SEQ ID NO: 588876
gguagaagcuucugagugu

SEQ ID NO: 896059 - RNA, 19 nt, Artificial Sequence
  Description of Artificial Sequence: Synthetic oligonucleotide
  Antisense strand to SEQ ID NO: 896058
acacucagaagcuucuacc

SEQ ID NO: 896060 - RNA, 19 nt, Artificial Sequence
  Description of Artificial Sequence: Synthetic oligonucleotide
  Sense strand starting at position 2915 of SEQ ID NO: 588876
cugaguguccgcucagcaa

SEQ ID NO: 896061 - RNA, 19 nt, Artificial Sequence
  Description of Artificial Sequence: Synthetic oligonucleotide
  Antisense strand to SEQ ID NO: 896060
uugcugagcggacacucag

SEQ ID NO: 896062 - RNA, 19 nt, Artificial Sequence
  Description of Artificial Sequence: Synthetic oligonucleotide
  Sense strand starting at position 2918 of SEQ ID NO: 588876
aguguccgcucagcaaauu

SEQ ID NO: 896063 - RNA, 19 nt, Artificial Sequence
  Description of Artificial Sequence: Synthetic oligonucleotide
  Antisense strand to SEQ ID NO: 896062
aauuugcugagcggacacu

SEQ ID NO: 896064 - RNA, 19 nt, Artificial Sequence
  Description of Artificial Sequence: Synthetic oligonucleotide
  Sense strand starting at position 3005 of SEQ ID NO: 588876
agugacagcucguuccagu

SEQ ID NO: 896065 - RNA, 19 nt, Artificial Sequence
  Description of Artificial Sequence: Synthetic oligonucleotide
  Antisense strand to SEQ ID NO: 896064
acuggaacgagcugucacu

SEQ ID NO: 896066 - RNA, 19 nt, Artificial Sequence
  Description of Artificial Sequence: Synthetic oligonucleotide
  Sense strand starting at position 3131 of SEQ ID NO: 588876
ccaggaaagguucagcgaa

SEQ ID NO: 896067 - RNA, 19 nt, Artificial Sequence
  Description of Artificial Sequence: Synthetic oligonucleotide
  Antisense strand to SEQ ID NO: 896066
uucgcugaaccuuuccugg

SEQ ID NO: 896068 - RNA, 19 nt, Artificial Sequence
  Description of Artificial Sequence: Synthetic oligonucleotide
  Sense strand starting at position 3293 of SEQ ID NO: 588876
gugggaacuccaugagcuu

SEQ ID NO: 896069 - RNA, 19 nt, Artificial Sequence
  Description of Artificial Sequence: Synthetic oligonucleotide
  Antisense strand to SEQ ID NO: 896068
aagcucauggaguucccac

SEQ ID NO: 896070 - RNA, 19 nt, Artificial Sequence
  Description of Artificial Sequence: Synthetic oligonucleotide
  Sense strand starting at position 5 of SEQ ID NO: 588877
ucccaagaacggugggaaa

SEQ ID NO: 896071 - RNA, 19 nt, Artificial Sequence
  Description of Artificial Sequence: Synthetic oligonucleotide
  Antisense strand to SEQ ID NO: 896070
uuucccaccguucuuggga

SEQ ID NO: 896072 - RNA, 19 nt, Artificial Sequence
  Description of Artificial Sequence: Synthetic oligonucleotide
  Sense strand starting at position 26 of SEQ ID NO: 588877
acuguucuccucgaacagu

SEQ ID NO: 896073 - RNA, 19 nt, Artificial Sequence
  Description of Artificial Sequence: Synthetic oligonucleotide
  Antisense strand to SEQ ID NO: 896072
acuguucgaggagaacagu

SEQ ID NO: 896074 - RNA, 19 nt, Artificial Sequence
  Description of Artificial Sequence: Synthetic oligonucleotide
  Sense strand starting at position 52 of SEQ ID NO: 588877
caucacaagugcuuaguga

SEQ ID NO: 896075 - RNA, 19 nt, Artificial Sequence
  Description of Artificial Sequence: Synthetic oligonucleotide
  Antisense strand to SEQ ID NO: 896074
ucacuaagcacuugugaug

SEQ ID NO: 896076 - RNA, 19 nt, Artificial Sequence
  Description of Artificial Sequence: Synthetic oligonucleotide
  Sense strand starting at position 53 of SEQ ID NO: 588877
aucacaagugcuuagugaa

SEQ ID NO: 896077 - RNA, 19 nt, Artificial Sequence
  Description of Artificial Sequence: Synthetic oligonucleotide
  Antisense strand to SEQ ID NO: 896076
uucacuaagcacuugugau

SEQ ID NO: 896078 - RNA, 19 nt, Artificial Sequence
  Description of Artificial Sequence: Synthetic oligonucleotide
  Sense strand starting at position 202 of SEQ ID NO: 588877
gcucacuucuaccuggaau

SEQ ID NO: 896079 - RNA, 19 nt, Artificial Sequence
  Description of Artificial Sequence: Synthetic oligonucleotide
  Antisense strand to SEQ ID NO: 896078
auuccagguagaagugagc

SEQ ID NO: 896080 - RNA, 19 nt, Artificial Sequence
  Description of Artificial Sequence: Synthetic oligonucleotide
  Sense strand starting at position 213 of SEQ ID NO: 588877
ccuggaaugcucugugaca

SEQ ID NO: 896081 - RNA, 19 nt, Artificial Sequence
  Description of Artificial Sequence: Synthetic oligonucleotide
  Antisense strand to SEQ ID NO: 896080
ugucacagagcauuccagg

SEQ ID NO: 896082 - RNA, 19 nt, Artificial Sequence
  Description of Artificial Sequence: Synthetic oligonucleotide
  Sense strand starting at position 214 of SEQ ID NO: 588877
cuggaaugcucugugacag

SEQ ID NO: 896083 - RNA, 19 nt, Artificial Sequence
  Description of Artificial Sequence: Synthetic oligonucleotide
  Antisense strand to SEQ ID NO: 896082
cugucacagagcauuccag

SEQ ID NO: 896084 - RNA, 19 nt, Artificial Sequence
  Description of Artificial Sequence: Synthetic oligonucleotide
  Sense strand starting at position 376 of SEQ ID NO: 588877
uugcaaugggcucaguauu

SEQ ID NO: 896085 - RNA, 19 nt, Artificial Sequence
  Description of Artificial Sequence: Synthetic oligonucleotide
  Antisense strand to SEQ ID NO: 896084
aauacugagcccauugcaa

SEQ ID NO: 896086 - RNA, 19 nt, Artificial Sequence
  Description of Artificial Sequence: Synthetic oligonucleotide
  Sense strand starting at position 389 of SEQ ID NO: 588877
aguauuuaguaggugcuua

SEQ ID NO: 896087 - RNA, 19 nt, Artificial Sequence
  Description of Artificial Sequence: Synthetic oligonucleotide
  Antisense strand to SEQ ID NO: 896086
uaagcaccuacuaaauacu

SEQ ID NO: 896088 - RNA, 19 nt, Artificial Sequence
  Description of Artificial Sequence: Synthetic oligonucleotide
  Sense strand starting at position 406 of SEQ ID NO: 588877
uaauaaauaucuguuggag

SEQ ID NO: 896089 - RNA, 19 nt, Artificial Sequence
  Description of Artificial Sequence: Synthetic oligonucleotide
  Antisense strand to SEQ ID NO: 896088
cuccaacagauauuuauua

SEQ ID NO: 896090 - RNA, 19 nt, Artificial Sequence
  Description of Artificial Sequence: Synthetic oligonucleotide
  Sense strand starting at position 412 of SEQ ID NO: 588877
auaucuguuggagguacaa

SEQ ID NO: 896091 - RNA, 19 nt, Artificial Sequence
  Description of Artificial Sequence: Synthetic oligonucleotide
  Antisense strand to SEQ ID NO: 896090
uuguaccuccaacagauau

SEQ ID NO: 896092 - RNA, 19 nt, Artificial Sequence
  Description of Artificial Sequence: Synthetic oligonucleotide
  Sense strand starting at position 859 of SEQ ID NO: 588877
cagccucagcuuucguauu

SEQ ID NO: 896093 - RNA, 19 nt, Artificial Sequence
  Description of Artificial Sequence: Synthetic oligonucleotide
  Antisense strand to SEQ ID NO: 896092
aauacgaaagcugaggcug

SEQ ID NO: 896094 - RNA, 19 nt, Artificial Sequence
  Description of Artificial Sequence: Synthetic oligonucleotide
  Sense strand starting at position 905 of SEQ ID NO: 588877
uaagcugaaucuguaugua

SEQ ID NO: 896095 - RNA, 19 nt, Artificial Sequence
  Description of Artificial Sequence: Synthetic oligonucleotide
  Antisense strand to SEQ ID NO: 896094
uacauacagauucagcuua

SEQ ID NO: 896096 - RNA, 19 nt, Artificial Sequence
  Description of Artificial Sequence: Synthetic oligonucleotide
  Sense strand starting at position 909 of SEQ ID NO: 588877
cugaaucuguauguauaua

SEQ ID NO: 896097 - RNA, 19 nt, Artificial Sequence
  Description of Artificial Sequence: Synthetic oligonucleotide
  Antisense strand to SEQ ID NO: 896096
uauauacauacagauucag

SEQ ID NO: 896098 - RNA, 19 nt, Artificial Sequence
  Description of Artificial Sequence: Synthetic oligonucleotide
  Sense strand starting at position 1015 of SEQ ID NO: 588877
uguaacauaguagaguuua

SEQ ID NO: 896099 - RNA, 19 nt, Artificial Sequence
  Description of Artificial Sequence: Synthetic oligonucleotide
  Antisense strand to SEQ ID NO: 896098
uaaacucuacuauguuaca

SEQ ID NO: 896100 - RNA, 19 nt, Artificial Sequence
  Description of Artificial Sequence: Synthetic oligonucleotide
  Sense strand starting at position 1075 of SEQ ID NO: 588877
ggguaauuaacacgauugu

SEQ ID NO: 896101 - RNA, 19 nt, Artificial Sequence
  Description of Artificial Sequence: Synthetic oligonucleotide
  Antisense strand to SEQ ID NO: 896100
acaaucguguuaauuaccc

SEQ ID NO: 896102 - RNA, 19 nt, Artificial Sequence
  Description of Artificial Sequence: Synthetic oligonucleotide
  Sense strand starting at position 1076 of SEQ ID NO: 588877
gguaauuaacacgauugua

SEQ ID NO: 896103 - RNA, 19 nt, Artificial Sequence
  Description of Artificial Sequence: Synthetic oligonucleotide
  Antisense strand to SEQ ID NO: 896102
uacaaucguguuaauuacc

SEQ ID NO: 896104 - RNA, 19 nt, Artificial Sequence
  Description of Artificial Sequence: Synthetic oligonucleotide
  Sense strand starting at position 1123 of SEQ ID NO: 588877
aauugcugacugugagacu

SEQ ID NO: 896105 - RNA, 19 nt, Artificial Sequence
  Description of Artificial Sequence: Synthetic oligonucleotide
  Antisense strand to SEQ ID NO: 896104
agucucacagucagcaauu

SEQ ID NO: 896106 - RNA, 19 nt, Artificial Sequence
  Description of Artificial Sequence: Synthetic oligonucleotide
  Sense strand starting at position 1130 of SEQ ID NO: 588877
gacugugagacugguccaa

SEQ ID NO: 896107 - RNA, 19 nt, Artificial Sequence
  Description of Artificial Sequence: Synthetic oligonucleotide
  Antisense strand to SEQ ID NO: 896106
uuggaccagucucacaguc

SEQ ID NO: 896108 - RNA, 19 nt, Artificial Sequence
  Description of Artificial Sequence: Synthetic oligonucleotide
  Sense strand starting at position 1263 of SEQ ID NO: 588877
gcacaaauuugcguuuacu

SEQ ID NO: 896109 - RNA, 19 nt, Artificial Sequence
  Description of Artificial Sequence: Synthetic oligonucleotide
  Antisense strand to SEQ ID NO: 896108
aguaaacgcaaauuugugc

SEQ ID NO: 896110 - RNA, 19 nt, Artificial Sequence
  Description of Artificial Sequence: Synthetic oligonucleotide
  Sense strand starting at position 1383 of SEQ ID NO: 588877
gacuuacuggcucaggagu

SEQ ID NO: 896111 - RNA, 19 nt, Artificial Sequence
  Description of Artificial Sequence: Synthetic oligonucleotide
  Antisense strand to SEQ ID NO: 896110
acuccugagccaguaaguc

SEQ ID NO: 896112 - RNA, 19 nt, Artificial Sequence
  Description of Artificial Sequence: Synthetic oligonucleotide
  Sense strand starting at position 1397 of SEQ ID NO: 588877
ggaguaccugaccguugaa

SEQ ID NO: 896113 - RNA, 19 nt, Artificial Sequence
  Description of Artificial Sequence: Synthetic oligonucleotide
  Antisense strand to SEQ ID NO: 896112
uucaacggucagguacucc

SEQ ID NO: 896114 - RNA, 19 nt, Artificial Sequence
  Description of Artificial Sequence: Synthetic oligonucleotide
  Sense strand starting at position 1406 of SEQ ID NO: 588877
gaccguugaacauggagau

SEQ ID NO: 896115 - RNA, 19 nt, Artificial Sequence
  Description of Artificial Sequence: Synthetic oligonucleotide
  Antisense strand to SEQ ID NO: 896114
aucuccauguucaacgguc

SEQ ID NO: 896116 - RNA, 19 nt, Artificial Sequence
  Description of Artificial Sequence: Synthetic oligonucleotide
  Sense strand starting at position 1416 of SEQ ID NO: 588877
cauggagaucuguguaagg

SEQ ID NO: 896117 - RNA, 19 nt, Artificial Sequence
  Description of Artificial Sequence: Synthetic oligonucleotide
  Antisense strand to SEQ ID NO: 896116
ccuuacacagaucuccaug

SEQ ID NO: 896118 - RNA, 19 nt, Artificial Sequence
  Description of Artificial Sequence: Synthetic oligonucleotide
  Sense strand starting at position 1491 of SEQ ID NO: 588877
gaaagaaucugucugagcu

SEQ ID NO: 896119 - RNA, 19 nt, Artificial Sequence
  Description of Artificial Sequence: Synthetic oligonucleotide
  Antisense strand to SEQ ID NO: 896118
agcucagacagauucuuuc

SEQ ID NO: 896120 - RNA, 19 nt, Artificial Sequence
  Description of Artificial Sequence: Synthetic oligonucleotide
  Sense strand starting at position 1492 of SEQ ID NO: 588877
aaagaaucugucugagcuc

SEQ ID NO: 896121 - RNA, 19 nt, Artificial Sequence
  Description of Artificial Sequence: Synthetic oligonucleotide
  Antisense strand to SEQ ID NO: 896120
gagcucagacagauucuuu

SEQ ID NO: 896122 - RNA, 19 nt, Artificial Sequence
  Description of Artificial Sequence: Synthetic oligonucleotide
  Sense strand starting at position 2177 of SEQ ID NO: 588877
ccaggcuuuccuggaaaga

SEQ ID NO: 896123 - RNA, 19 nt, Artificial Sequence
  Description of Artificial Sequence: Synthetic oligonucleotide
  Antisense strand to SEQ ID NO: 896122
ucuuuccaggaaagccugg

SEQ ID NO: 896124 - RNA, 19 nt, Artificial Sequence
  Description of Artificial Sequence: Synthetic oligonucleotide
  Sense strand starting at position 2312 of SEQ ID NO: 588877
ugagaugagcuucgacaaa

SEQ ID NO: 896125 - RNA, 19 nt, Artificial Sequence
  Description of Artificial Sequence: Synthetic oligonucleotide
  Antisense strand to SEQ ID NO: 896124
uuugucgaagcucaucuca

SEQ ID NO: 896126 - RNA, 19 nt, Artificial Sequence
  Description of Artificial Sequence: Synthetic oligonucleotide
  Sense strand starting at position 2425 of SEQ ID NO: 588877
ugacuauugcuguagguua

SEQ ID NO: 896127 - RNA, 19 nt, Artificial Sequence
  Description of Artificial Sequence: Synthetic oligonucleotide
  Antisense strand to SEQ ID NO: 896126
uaaccuacagcaauaguca

SEQ ID NO: 896128 - RNA, 19 nt, Artificial Sequence
  Description of Artificial Sequence: Synthetic oligonucleotide
  Sense strand starting at position 2483 of SEQ ID NO: 588877
ucuagaauuuaugaaugag

SEQ ID NO: 896129 - RNA, 19 nt, Artificial Sequence
  Description of Artificial Sequence: Synthetic oligonucleotide
  Antisense strand to SEQ ID NO: 896128
cucauucauaaauucuaga

SEQ ID NO: 896130 - RNA, 19 nt, Artificial Sequence
  Description of Artificial Sequence: Synthetic oligonucleotide
  Sense strand starting at position 2553 of SEQ ID NO: 588877
uguuuaaucguugaauagu

SEQ ID NO: 896131 - RNA, 19 nt, Artificial Sequence
  Description of Artificial Sequence: Synthetic oligonucleotide
  Antisense strand to SEQ ID NO: 896130
acuauucaacgauuaaaca

SEQ ID NO: 896132 - RNA, 19 nt, Artificial Sequence
  Description of Artificial Sequence: Synthetic oligonucleotide
  Sense strand starting at position 2573 of SEQ ID NO: 588877
ucacaaauuguguauccau

SEQ ID NO: 896133 - RNA, 19 nt, Artificial Sequence
  Description of Artificial Sequence: Synthetic oligonucleotide
  Antisense strand to SEQ ID NO: 896132
auggauacacaauuuguga

SEQ ID NO: 896134 - RNA, 19 nt, Artificial Sequence
  Description of Artificial Sequence: Synthetic oligonucleotide
  Sense strand starting at position 2716 of SEQ ID NO: 588877
gggugaagccuugggacuu

SEQ ID NO: 896135 - RNA, 19 nt, Artificial Sequence
  Description of Artificial Sequence: Synthetic oligonucleotide
  Antisense strand to SEQ ID NO: 896134
aagucccaaggcuucaccc

SEQ ID NO: 896136 - RNA, 19 nt, Artificial Sequence
  Description of Artificial Sequence: Synthetic oligonucleotide
  Sense strand starting at position 3265 of SEQ ID NO: 588877
cuauauagaugcccagaga

SEQ ID NO: 896137 - RNA, 19 nt, Artificial Sequence
  Description of Artificial Sequence: Synthetic oligonucleotide
  Antisense strand to SEQ ID NO: 896136
ucucugggcaucuauauag

SEQ ID NO: 896138 - RNA, 19 nt, Artificial Sequence
  Description of Artificial Sequence: Synthetic oligonucleotide
  Sense strand starting at position 3397 of SEQ ID NO: 588877
accagaagugcccaaguua

SEQ ID NO: 896139 - RNA, 19 nt, Artificial Sequence
  Description of Artificial Sequence: Synthetic oligonucleotide
  Antisense strand to SEQ ID NO: 896138
uaacuugggcacuucuggu

SEQ ID NO: 896140 - RNA, 19 nt, Artificial Sequence
  Description of Artificial Sequence: Synthetic oligonucleotide
  Sense strand starting at position 3531 of SEQ ID NO: 588877
ucuugugagucuccaaaug

SEQ ID NO: 896141 - RNA, 19 nt, Artificial Sequence
  Description of Artificial Sequence: Synthetic oligonucleotide
  Antisense strand to SEQ ID NO: 896140
cauuuggagacucacaaga

SEQ ID NO: 896142 - RNA, 19 nt, Artificial Sequence
  Description of Artificial Sequence: Synthetic oligonucleotide
  Sense strand starting at position 3697 of SEQ ID NO: 588877
uaaggaguugcuugugaua

SEQ ID NO: 896143 - RNA, 19 nt, Artificial Sequence
  Description of Artificial Sequence: Synthetic oligonucleotide
  Antisense strand to SEQ ID NO: 896142
uaucacaagcaacuccuua

SEQ ID NO: 896144 - RNA, 19 nt, Artificial Sequence
  Description of Artificial Sequence: Synthetic oligonucleotide
  Sense strand starting at position 3711 of SEQ ID NO: 588877
ugauauucuucugcacaag

SEQ ID NO: 896145 - RNA, 19 nt, Artificial Sequence
  Description of Artificial Sequence: Synthetic oligonucleotide
  Antisense strand to SEQ ID NO: 896144
cuugugcagaagaauauca

SEQ ID NO: 896146 - RNA, 19 nt, Artificial Sequence
  Description of Artificial Sequence: Synthetic oligonucleotide
  Sense strand starting at position 3881 of SEQ ID NO: 588877
uccuaaauguaagugaaau

SEQ ID NO: 896147 - RNA, 19 nt, Artificial Sequence
  Description of Artificial Sequence: Synthetic oligonucleotide
  Antisense strand to SEQ ID NO: 896146
auuucacuuacauuuagga

SEQ ID NO: 896148 - RNA, 19 nt, Artificial Sequence
  Description of Artificial Sequence: Synthetic oligonucleotide
  Sense strand starting at position 3961 of SEQ ID NO: 588877
acuuauccacagcaguaua

SEQ ID NO: 896149 - RNA, 19 nt, Artificial Sequence
  Description of Artificial Sequence: Synthetic oligonucleotide
  Antisense strand to SEQ ID NO: 896148
uauacugcuguggauaagu

SEQ ID NO: 896150 - RNA, 19 nt, Artificial Sequence
  Description of Artificial Sequence: Synthetic oligonucleotide
  Sense strand starting at position 34 of SEQ ID NO: 588878
gaaaguuaugugcaauucu

SEQ ID NO: 896151 - RNA, 19 nt, Artificial Sequence
  Description of Artificial Sequence: Synthetic oligonucleotide
  Antisense strand to SEQ ID NO: 896150
agaauugcacauaacuuuc

SEQ ID NO: 896152 - RNA, 19 nt, Artificial Sequence
  Description of Artificial Sequence: Synthetic oligonucleotide
  Sense strand starting at position 427 of SEQ ID NO: 588878
gcuagcuuucuggaggaau

SEQ ID NO: 896153 - RNA, 19 nt, Artificial Sequence
  Description of Artificial Sequence: Synthetic oligonucleotide
  Antisense strand to SEQ ID NO: 896152
auuccuccagaaagcuagc

SEQ ID NO: 896154 - RNA, 19 nt, Artificial Sequence
  Description of Artificial Sequence: Synthetic oligonucleotide
  Sense strand starting at position 566 of SEQ ID NO: 588878
cgcuaaugaaacugugaga

SEQ ID NO: 896155 - RNA, 19 nt, Artificial Sequence
  Description of Artificial Sequence: Synthetic oligonucleotide
  Antisense strand to SEQ ID NO: 896154
ucucacaguuucauuagcg

SEQ ID NO: 896156 - RNA, 19 nt, Artificial Sequence
  Description of Artificial Sequence: Synthetic oligonucleotide
  Sense strand starting at position 595 of SEQ ID NO: 588878
ggcguugucagagccuauu

SEQ ID NO: 896157 - RNA, 19 nt, Artificial Sequence
  Description of Artificial Sequence: Synthetic oligonucleotide
  Antisense strand to SEQ ID NO: 896156
aauaggcucugacaacgcc

SEQ ID NO: 896158 - RNA, 19 nt, Artificial Sequence
  Description of Artificial Sequence: Synthetic oligonucleotide
  Sense strand starting at position 770 of SEQ ID NO: 588878
cguacaguugucuaaacau

SEQ ID NO: 896159 - RNA, 19 nt, Artificial Sequence
  Description of Artificial Sequence: Synthetic oligonucleotide
  Antisense strand to SEQ ID NO: 896158
auguuuagacaacuguacg

SEQ ID NO: 896160 - RNA, 19 nt, Artificial Sequence
  Description of Artificial Sequence: Synthetic oligonucleotide
  Sense strand starting at position 863 of SEQ ID NO: 588878
agagaaaucucugcaucuc

SEQ ID NO: 896161 - RNA, 19 nt, Artificial Sequence
  Description of Artificial Sequence: Synthetic oligonucleotide
  Antisense strand to SEQ ID NO: 896160
gagaugcagagauuucucu

SEQ ID NO: 896162 - RNA, 19 nt, Artificial Sequence
  Description of Artificial Sequence: Synthetic oligonucleotide
  Sense strand starting at position 882 of SEQ ID NO: 588878
agcccucagcgacaacauu

SEQ ID NO: 896163 - RNA, 19 nt, Artificial Sequence
  Description of Artificial Sequence: Synthetic oligonucleotide
  Antisense strand to SEQ ID NO: 896162
aauguugucgcugagggcu

SEQ ID NO: 896164 - RNA, 19 nt, Artificial Sequence
  Description of Artificial Sequence: Synthetic oligonucleotide
  Sense strand starting at position 1225 of SEQ ID NO: 588878
acuggaauucggugggaga

SEQ ID NO: 896165 - RNA, 19 nt, Artificial Sequence
  Description of Artificial Sequence: Synthetic oligonucleotide
  Antisense strand to SEQ ID NO: 896164
ucucccaccgaauuccagu

SEQ ID NO: 896166 - RNA, 19 nt, Artificial Sequence
  Description of Artificial Sequence: Synthetic oligonucleotide
  Sense strand starting at position 2115 of SEQ ID NO: 588878
gcgcgucucccaucagacu

SEQ ID NO: 896167 - RNA, 19 nt, Artificial Sequence
  Description of Artificial Sequence: Synthetic oligonucleotide
  Antisense strand to SEQ ID NO: 896166
agucugaugggagacgcgc

SEQ ID NO: 896168 - RNA, 19 nt, Artificial Sequence
  Description of Artificial Sequence: Synthetic oligonucleotide
  Sense strand starting at position 2229 of SEQ ID NO: 588878
ggcuuauuuagcuguggca

SEQ ID NO: 896169 - RNA, 19 nt, Artificial Sequence
  Description of Artificial Sequence: Synthetic oligonucleotide
  Antisense strand to SEQ ID NO: 896168
ugccacagcuaaauaagcc

SEQ ID NO: 896170 - RNA, 19 nt, Artificial Sequence
  Description of Artificial Sequence: Synthetic oligonucleotide
  Sense strand starting at position 2398 of SEQ ID NO: 588878
ggauccugauggcuucuua

SEQ ID NO: 896171 - RNA, 19 nt, Artificial Sequence
  Description of Artificial Sequence: Synthetic oligonucleotide
  Antisense strand to SEQ ID NO: 896170
uaagaagccaucaggaucc

SEQ ID NO: 896172 - RNA, 19 nt, Artificial Sequence
  Description of Artificial Sequence: Synthetic oligonucleotide
  Sense strand starting at position 2479 of SEQ ID NO: 588878
aggaauaggugauaagaag

SEQ ID NO: 896173 - RNA, 19 nt, Artificial Sequence
  Description of Artificial Sequence: Synthetic oligonucleotide
  Antisense strand to SEQ ID NO: 896172
cuucuuaucaccuauuccu

SEQ ID NO: 896174 - RNA, 19 nt, Artificial Sequence
  Description of Artificial Sequence: Synthetic oligonucleotide
  Sense strand starting at position 2578 of SEQ ID NO: 588878
aaugaaauguucccaaggu

SEQ ID NO: 896175 - RNA, 19 nt, Artificial Sequence
  Description of Artificial Sequence: Synthetic oligonucleotide
  Antisense strand to SEQ ID NO: 896174
accuugggaacauuucauu

SEQ ID NO: 896176 - RNA, 19 nt, Artificial Sequence
  Description of Artificial Sequence: Synthetic oligonucleotide
  Sense strand starting at position 2582 of SEQ ID NO: 588878
aaauguucccaagguugaa

SEQ ID NO: 896177 - RNA, 19 nt, Artificial Sequence
  Description of Artificial Sequence: Synthetic oligonucleotide
  Antisense strand to SEQ ID NO: 896176
uucaaccuugggaacauuu

SEQ ID NO: 896178 - RNA, 19 nt, Artificial Sequence
  Description of Artificial Sequence: Synthetic oligonucleotide
  Sense strand starting at position 2774 of SEQ ID NO: 588878
gugacuaguacugggaaua

SEQ ID NO: 896179 - RNA, 19 nt, Artificial Sequence
  Description of Artificial Sequence: Synthetic oligonucleotide
  Antisense strand to SEQ ID NO: 896178
uauucccaguacuagucac

SEQ ID NO: 896180 - RNA, 19 nt, Artificial Sequence
  Description of Artificial Sequence: Synthetic oligonucleotide
  Sense strand starting at position 2826 of SEQ ID NO: 588878
guugcuaaaucaguaagac

SEQ ID NO: 896181 - RNA, 19 nt, Artificial Sequence
  Description of Artificial Sequence: Synthetic oligonucleotide
  Antisense strand to SEQ ID NO: 896180
gucuuacugauuuagcaac

SEQ ID NO: 896182 - RNA, 19 nt, Artificial Sequence
  Description of Artificial Sequence: Synthetic oligonucleotide
  Sense strand starting at position 2827 of SEQ ID NO: 588878
uugcuaaaucaguaagacu

SEQ ID NO: 896183 - RNA, 19 nt, Artificial Sequence
  Description of Artificial Sequence: Synthetic oligonucleotide
  Antisense strand to SEQ ID NO: 896182
agucuuacugauuuagcaa

SEQ ID NO: 896184 - RNA, 19 nt, Artificial Sequence
  Description of Artificial Sequence: Synthetic oligonucleotide
  Sense strand starting at position 2853 of SEQ ID NO: 588878
guagcaacaaguuagagua

SEQ ID NO: 896185 - RNA, 19 nt, Artificial Sequence
  Description of Artificial Sequence: Synthetic oligonucleotide
  Antisense strand to SEQ ID NO: 896184
uacucuaacuuguugcuac

SEQ ID NO: 896186 - RNA, 19 nt, Artificial Sequence
  Description of Artificial Sequence: Synthetic oligonucleotide
  Sense strand starting at position 2905 of SEQ ID NO: 588878
ccaaacgagucguuaggaa

SEQ ID NO: 896187 - RNA, 19 nt, Artificial Sequence
  Description of Artificial Sequence: Synthetic oligonucleotide
  Antisense strand to SEQ ID NO: 896186
uuccuaacgacucguuugg

SEQ ID NO: 896188 - RNA, 19 nt, Artificial Sequence
  Description of Artificial Sequence: Synthetic oligonucleotide
  Sense strand starting at position 2913 of SEQ ID NO: 588878
gucguuaggaaauacagua

SEQ ID NO: 896189 - RNA, 19 nt, Artificial Sequence
  Description of Artificial Sequence: Synthetic oligonucleotide
  Antisense strand to SEQ ID NO: 896188
uacuguauuuccuaacgac

SEQ ID NO: 896190 - RNA, 19 nt, Artificial Sequence
  Description of Artificial Sequence: Synthetic oligonucleotide
  Sense strand starting at position 2999 of SEQ ID NO: 588878
auuaucaggcacuguuaua

SEQ ID NO: 896191 - RNA, 19 nt, Artificial Sequence
  Description of Artificial Sequence: Synthetic oligonucleotide
  Antisense strand to SEQ ID NO: 896190
uauaacagugccugauaau

SEQ ID NO: 896192 - RNA, 19 nt, Artificial Sequence
  Description of Artificial Sequence: Synthetic oligonucleotide
  Sense strand starting at position 3247 of SEQ ID NO: 588878
uuggaaugguagccuguaa

SEQ ID NO: 896193 - RNA, 19 nt, Artificial Sequence
  Description of Artificial Sequence: Synthetic oligonucleotide
  Antisense strand to SEQ ID NO: 896192
uuacaggcuaccauuccaa

SEQ ID NO: 896194 - RNA, 19 nt, Artificial Sequence
  Description of Artificial Sequence: Synthetic oligonucleotide
  Sense strand starting at position 3336 of SEQ ID NO: 588878
ucgugacuguggacgaguu

SEQ ID NO: 896195 - RNA, 19 nt, Artificial Sequence
  Description of Artificial Sequence: Synthetic oligonucleotide
  Antisense strand to SEQ ID NO: 896194
aacucguccacagucacga

SEQ ID NO: 896196 - RNA, 19 nt, Artificial Sequence
  Description of Artificial Sequence: Synthetic oligonucleotide
  Sense strand starting at position 3338 of SEQ ID NO: 588878
gugacuguggacgaguuau

SEQ ID NO: 896197 - RNA, 19 nt, Artificial Sequence
  Description of Artificial Sequence: Synthetic oligonucleotide
  Antisense strand to SEQ ID NO: 896196
auaacucguccacagucac

SEQ ID NO: 896198 - RNA, 19 nt, Artificial Sequence
  Description of Artificial Sequence: Synthetic oligonucleotide
  Sense strand starting at position 3411 of SEQ ID NO: 588878
aaaggcuuguggucaagau

SEQ ID NO: 896199 - RNA, 19 nt, Artificial Sequence
  Description of Artificial Sequence: Synthetic oligonucleotide
  Antisense strand to SEQ ID NO: 896198
aucuugaccacaagccuuu

SEQ ID NO: 896200 - RNA, 19 nt, Artificial Sequence
  Description of Artificial Sequence: Synthetic oligonucleotide
  Sense strand starting at position 3412 of SEQ ID NO: 588878
aaggcuuguggucaagauu

SEQ ID NO: 896201 - RNA, 19 nt, Artificial Sequence
  Description of Artificial Sequence: Synthetic oligonucleotide
  Antisense strand to SEQ ID NO: 896200
aaucuugaccacaagccuu

SEQ ID NO: 896202 - RNA, 19 nt, Artificial Sequence
  Description of Artificial Sequence: Synthetic oligonucleotide
  Sense strand starting at position 3415 of SEQ ID NO: 588878
gcuuguggucaagauuaaa

SEQ ID NO: 896203 - RNA, 19 nt, Artificial Sequence
  Description of Artificial Sequence: Synthetic oligonucleotide
  Antisense strand to SEQ ID NO: 896202
uuuaaucuugaccacaagc

SEQ ID NO: 896204 - RNA, 19 nt, Artificial Sequence
  Description of Artificial Sequence: Synthetic oligonucleotide
  Sense strand starting at position 3464 of SEQ ID NO: 588878
guacucaacugauugagau

SEQ ID NO: 896205 - RNA, 19 nt, Artificial Sequence
  Description of Artificial Sequence: Synthetic oligonucleotide
  Antisense strand to SEQ ID NO: 896204
aucucaaucaguugaguac

SEQ ID NO: 896206 - RNA, 19 nt, Artificial Sequence
  Description of Artificial Sequence: Synthetic oligonucleotide
  Sense strand starting at position 3518 of SEQ ID NO: 588878
agguuaaucagagggucca

SEQ ID NO: 896207 - RNA, 19 nt, Artificial Sequence
  Description of Artificial Sequence: Synthetic oligonucleotide
  Antisense strand to SEQ ID NO: 896206
uggacccucugauuaaccu

SEQ ID NO: 896208 - RNA, 19 nt, Artificial Sequence
  Description of Artificial Sequence: Synthetic oligonucleotide
  Sense strand starting at position 3560 of SEQ ID NO: 588878
cuacauguguuucccauaa

SEQ ID NO: 896209 - RNA, 19 nt, Artificial Sequence
  Description of Artificial Sequence: Synthetic oligonucleotide
  Antisense strand to SEQ ID NO: 896208
uuaugggaaacacauguag

SEQ ID NO: 896210 - RNA, 19 nt, Artificial Sequence
  Description of Artificial Sequence: Synthetic oligonucleotide
  Sense strand starting at position 3564 of SEQ ID NO: 588878
auguguuucccauaaccau

SEQ ID NO: 896211 - RNA, 19 nt, Artificial Sequence
  Description of Artificial Sequence: Synthetic oligonucleotide
  Antisense strand to SEQ ID NO: 896210
augguuaugggaaacacau

SEQ ID NO: 896212 - RNA, 19 nt, Artificial Sequence
  Description of Artificial Sequence: Synthetic oligonucleotide
  Sense strand starting at position 3627 of SEQ ID NO: 588878
ucccaauucugguuguaaa

SEQ ID NO: 896213 - RNA, 19 nt, Artificial Sequence
  Description of Artificial Sequence: Synthetic oligonucleotide
  Antisense strand to SEQ ID NO: 896212
uuuacaaccagaauuggga

SEQ ID NO: 896214 - RNA, 19 nt, Artificial Sequence
  Description of Artificial Sequence: Synthetic oligonucleotide
  Sense strand starting at position 3628 of SEQ ID NO: 588878
cccaauucugguuguaaac

SEQ ID NO: 896215 - RNA, 19 nt, Artificial Sequence
  Description of Artificial Sequence: Synthetic oligonucleotide
  Antisense strand to SEQ ID NO: 896214
guuuacaaccagaauuggg

SEQ ID NO: 896216 - RNA, 19 nt, Artificial Sequence
  Description of Artificial Sequence: Synthetic oligonucleotide
  Sense strand starting at position 3637 of SEQ ID NO: 588878
gguuguaaacuccagaauu

SEQ ID NO: 896217 - RNA, 19 nt, Artificial Sequence
  Description of Artificial Sequence: Synthetic oligonucleotide
  Antisense strand to SEQ ID NO: 896216
aauucuggaguuuacaacc

SEQ ID NO: 896218 - RNA, 19 nt, Artificial Sequence
  Description of Artificial Sequence: Synthetic oligonucleotide
  Sense strand starting at position 3658 of SEQ ID NO: 588878
auuguaaacucccugagaa

SEQ ID NO: 896219 - RNA, 19 nt, Artificial Sequence
  Description of Artificial Sequence: Synthetic oligonucleotide
  Antisense strand to SEQ ID NO: 896218
uucucagggaguuuacaau

SEQ ID NO: 896220 - RNA, 19 nt, Artificial Sequence
  Description of Artificial Sequence: Synthetic oligonucleotide
  Sense strand starting at position 3659 of SEQ ID NO: 588878
uuguaaacucccugagaac

SEQ ID NO: 896221 - RNA, 19 nt, Artificial Sequence
  Description of Artificial Sequence: Synthetic oligonucleotide
  Antisense strand to SEQ ID NO: 896220
guucucagggaguuuacaa

SEQ ID NO: 896222 - RNA, 19 nt, Artificial Sequence
  Description of Artificial Sequence: Synthetic oligonucleotide
  Sense strand starting at position 3715 of SEQ ID NO: 588878
cucucaaauguuuguugaa

SEQ ID NO: 896223 - RNA, 19 nt, Artificial Sequence
  Description of Artificial Sequence: Synthetic oligonucleotide
  Antisense strand to SEQ ID NO: 896222
uucaacaaacauuugagag

SEQ ID NO: 896224 - RNA, 19 nt, Artificial Sequence
  Description of Artificial Sequence: Synthetic oligonucleotide
  Sense strand starting at position 3868 of SEQ ID NO: 588878
ccuucuuuauagucaagga

SEQ ID NO: 896225 - RNA, 19 nt, Artificial Sequence
  Description of Artificial Sequence: Synthetic oligonucleotide
  Antisense strand to SEQ ID NO: 896224
uccuugacuauaaagaagg

SEQ ID NO: 896226 - RNA, 19 nt, Artificial Sequence
  Description of Artificial Sequence: Synthetic oligonucleotide
  Sense strand starting at position 3898 of SEQ ID NO: 588878
uuucucuuugcagagucaa

SEQ ID NO: 896227 - RNA, 19 nt, Artificial Sequence
  Description of Artificial Sequence: Synthetic oligonucleotide
  Antisense strand to SEQ ID NO: 896226
uugacucugcaaagagaaa

SEQ ID NO: 896228 - RNA, 19 nt, Artificial Sequence
  Description of Artificial Sequence: Synthetic oligonucleotide
  Sense strand starting at position 3974 of SEQ ID NO: 588878
guaguagcuagugcuuauu

SEQ ID NO: 896229 - RNA, 19 nt, Artificial Sequence
  Description of Artificial Sequence: Synthetic oligonucleotide
  Antisense strand to SEQ ID NO: 896228
aauaagcacuagcuacuac

SEQ ID NO: 896230 - RNA, 19 nt, Artificial Sequence
  Description of Artificial Sequence: Synthetic oligonucleotide
  Sense strand starting at position 264 of SEQ ID NO: 588879
cugcgcucggccuuugaaa

SEQ ID NO: 896231 - RNA, 19 nt, Artificial Sequence
  Description of Artificial Sequence: Synthetic oligonucleotide
  Antisense strand to SEQ ID NO: 896230
uuucaaaggccgagcgcag

SEQ ID NO: 896232 - RNA, 19 nt, Artificial Sequence
  Description of Artificial Sequence: Synthetic oligonucleotide
  Sense strand starting at position 265 of SEQ ID NO: 588879
ugcgcucggccuuugaaau

SEQ ID NO: 896233 - RNA, 19 nt, Artificial Sequence
  Description of Artificial Sequence: Synthetic oligonucleotide
  Antisense strand to SEQ ID NO: 896232
auuucaaaggccgagcgca

SEQ ID NO: 896234 - RNA, 19 nt, Artificial Sequence
  Description of Artificial Sequence: Synthetic oligonucleotide
  Sense strand starting at position 591 of SEQ ID NO: 588879
gaugcagagggcuagcaau

SEQ ID NO: 896235 - RNA, 19 nt, Artificial Sequence
  Description of Artificial Sequence: Synthetic oligonucleotide
  Antisense strand to SEQ ID NO: 896234
auugcuagcccucugcauc

SEQ ID NO: 896236 - RNA, 19 nt, Artificial Sequence
  Description of Artificial Sequence: Synthetic oligonucleotide
  Sense strand starting at position 609 of SEQ ID NO: 588879
uguccugccuccucaagaa

SEQ ID NO: 896237 - RNA, 19 nt, Artificial Sequence
  Description of Artificial Sequence: Synthetic oligonucleotide
  Antisense strand to SEQ ID NO: 896236
uucuugaggaggcaggaca

SEQ ID NO: 896238 - RNA, 19 nt, Artificial Sequence
  Description of Artificial Sequence: Synthetic oligonucleotide
  Sense strand starting at position 769 of SEQ ID NO: 588879
uggugaugaagauggugua

SEQ ID NO: 896239 - RNA, 19 nt, Artificial Sequence
  Description of Artificial Sequence: Synthetic oligonucleotide
  Antisense strand to SEQ ID NO: 896238
uacaccaucuucaucacca

SEQ ID NO: 896240 - RNA, 19 nt, Artificial Sequence
  Description of Artificial Sequence: Synthetic oligonucleotide
  Sense strand starting at position 1170 of SEQ ID NO: 588879
ccagccaucugcuugaaga

SEQ ID NO: 896241 - RNA, 19 nt, Artificial Sequence
  Description of Artificial Sequence: Synthetic oligonucleotide
  Antisense strand to SEQ ID NO: 896240
ucuucaagcagauggcugg

SEQ ID NO: 896242 - RNA, 19 nt, Artificial Sequence
  Description of Artificial Sequence: Synthetic oligonucleotide
  Sense strand starting at position 1171 of SEQ ID NO: 588879
cagccaucugcuugaagag

SEQ ID NO: 896243 - RNA, 19 nt, Artificial Sequence
  Description of Artificial Sequence: Synthetic oligonucleotide
  Antisense strand to SEQ ID NO: 896242
cucuucaagcagauggcug

SEQ ID NO: 896244 - RNA, 19 nt, Artificial Sequence
  Description of Artificial Sequence: Synthetic oligonucleotide
  Sense strand starting at position 1172 of SEQ ID NO: 588879
agccaucugcuugaagaga

SEQ ID NO: 896245 - RNA, 19 nt, Artificial Sequence
  Description of Artificial Sequence: Synthetic oligonucleotide
  Antisense strand to SEQ ID NO: 896244
ucucuucaagcagauggcu

SEQ ID NO: 896246 - RNA, 19 nt, Artificial Sequence
  Description of Artificial Sequence: Synthetic oligonucleotide
  Sense strand starting at position 1231 of SEQ ID NO: 588879
gcaucaggucaaugaggau

SEQ ID NO: 896247 - RNA, 19 nt, Artificial Sequence
  Description of Artificial Sequence: Synthetic oligonucleotide
  Antisense strand to SEQ ID NO: 896246
auccucauugaccugaugc

SEQ ID NO: 896248 - RNA, 19 nt, Artificial Sequence
  Description of Artificial Sequence: Synthetic oligonucleotide
  Sense strand starting at position 1445 of SEQ ID NO: 588879
ggagaucuuucggugguag

SEQ ID NO: 896249 - RNA, 19 nt, Artificial Sequence
  Description of Artificial Sequence: Synthetic oligonucleotide
  Antisense strand to SEQ ID NO: 896248
cuaccaccgaaagaucucc

SEQ ID NO: 896250 - RNA, 19 nt, Artificial Sequence
  Description of Artificial Sequence: Synthetic oligonucleotide
  Sense strand starting at position 2292 of SEQ ID NO: 588879
cagggagcguuuccaaauu

SEQ ID NO: 896251 - RNA, 19 nt, Artificial Sequence
  Description of Artificial Sequence: Synthetic oligonucleotide
  Antisense strand to SEQ ID NO: 896250
aauuuggaaacgcucccug

SEQ ID NO: 896252 - RNA, 19 nt, Artificial Sequence
  Description of Artificial Sequence: Synthetic oligonucleotide
  Sense strand starting at position 2342 of SEQ ID NO: 588879
gggugggacgccuaggauu

SEQ ID NO: 896253 - RNA, 19 nt, Artificial Sequence
  Description of Artificial Sequence: Synthetic oligonucleotide
  Antisense strand to SEQ ID NO: 896252
aauccuaggcgucccaccc

SEQ ID NO: 896254 - RNA, 19 nt, Artificial Sequence
  Description of Artificial Sequence: Synthetic oligonucleotide
  Sense strand starting at position 2353 of SEQ ID NO: 588879
cuaggauucugccuaggau

SEQ ID NO: 896255 - RNA, 19 nt, Artificial Sequence
  Description of Artificial Sequence: Synthetic oligonucleotide
  Antisense strand to SEQ ID NO: 896254
auccuaggcagaauccuag

SEQ ID NO: 896256 - RNA, 19 nt, Artificial Sequence
  Description of Artificial Sequence: Synthetic oligonucleotide
  Sense strand starting at position 2356 of SEQ ID NO: 588879
ggauucugccuaggauaag

SEQ ID NO: 896257 - RNA, 19 nt, Artificial Sequence
  Description of Artificial Sequence: Synthetic oligonucleotide
  Antisense strand to SEQ ID NO: 896256
cuuauccuaggcagaaucc

SEQ ID NO: 896258 - RNA, 19 nt, Artificial Sequence
  Description of Artificial Sequence: Synthetic oligonucleotide
  Sense strand starting at position 2438 of SEQ ID NO: 588879
uggguagcacuuugagaga

SEQ ID NO: 896259 - RNA, 19 nt, Artificial Sequence
  Description of Artificial Sequence: Synthetic oligonucleotide
  Antisense strand to SEQ ID NO: 896258
ucucucaaagugcuaccca

SEQ ID NO: 896260 - RNA, 19 nt, Artificial Sequence
  Description of Artificial Sequence: Synthetic oligonucleotide
  Sense strand starting at position 2516 of SEQ ID NO: 588879
aagaguccuguuugguaca

SEQ ID NO: 896261 - RNA, 19 nt, Artificial Sequence
  Description of Artificial Sequence: Synthetic oligonucleotide
  Antisense strand to SEQ ID NO: 896260
uguaccaaacaggacucuu

SEQ ID NO: 896262 - RNA, 19 nt, Artificial Sequence
  Description of Artificial Sequence: Synthetic oligonucleotide
  Sense strand starting at position 2559 of SEQ ID NO: 588879
gggccuugucuagaaggcu

SEQ ID NO: 896263 - RNA, 19 nt, Artificial Sequence
  Description of Artificial Sequence: Synthetic oligonucleotide
  Antisense strand to SEQ ID NO: 896262
agccuucuagacaaggccc

SEQ ID NO: 896264 - RNA, 19 nt, Artificial Sequence
  Description of Artificial Sequence: Synthetic oligonucleotide
  Sense strand starting at position 2822 of SEQ ID NO: 588879
cuucuuguuuagguacaua

SEQ ID NO: 896265 - RNA, 19 nt, Artificial Sequence
  Description of Artificial Sequence: Synthetic oligonucleotide
  Antisense strand to SEQ ID NO: 896264
uauguaccuaaacaagaag

SEQ ID NO: 896266 - RNA, 19 nt, Artificial Sequence
  Description of Artificial Sequence: Synthetic oligonucleotide
  Sense strand starting at position 2834 of SEQ ID NO: 588879
guacauacuucugcaaaga

SEQ ID NO: 896267 - RNA, 19 nt, Artificial Sequence
  Description of Artificial Sequence: Synthetic oligonucleotide
  Antisense strand to SEQ ID NO: 896266
ucuuugcagaaguauguac

SEQ ID NO: 896268 - RNA, 19 nt, Artificial Sequence
  Description of Artificial Sequence: Synthetic oligonucleotide
  Sense strand starting at position 3060 of SEQ ID NO: 588879
uggauaauauacucaugua

SEQ ID NO: 896269 - RNA, 19 nt, Artificial Sequence
  Description of Artificial Sequence: Synthetic oligonucleotide
  Antisense strand to SEQ ID NO: 896268
uacaugaguauauuaucca

SEQ ID NO: 896270 - RNA, 19 nt, Artificial Sequence
  Description of Artificial Sequence: Synthetic oligonucleotide
  Sense strand starting at position 3086 of SEQ ID NO: 588879
gggacuggauuccaaauga

SEQ ID NO: 896271 - RNA, 19 nt, Artificial Sequence
  Description of Artificial Sequence: Synthetic oligonucleotide
  Antisense strand to SEQ ID NO: 896270
ucauuuggaauccaguccc

SEQ ID NO: 896272 - RNA, 19 nt, Artificial Sequence
  Description of Artificial Sequence: Synthetic oligonucleotide
  Sense strand starting at position 3468 of SEQ ID NO: 588879
ggugguauuccacaaucaa

SEQ ID NO: 896273 - RNA, 19 nt, Artificial Sequence
  Description of Artificial Sequence: Synthetic oligonucleotide
  Antisense strand to SEQ ID NO: 896272
uugauuguggaauaccacc

SEQ ID NO: 896274 - RNA, 19 nt, Artificial Sequence
  Description of Artificial Sequence: Synthetic oligonucleotide
  Sense strand starting at position 3529 of SEQ ID NO: 588879
ccacuugaucaaggagucu

SEQ ID NO: 896275 - RNA, 19 nt, Artificial Sequence
  Description of Artificial Sequence: Synthetic oligonucleotide
  Antisense strand to SEQ ID NO: 896274
agacuccuugaucaagugg

SEQ ID NO: 896276 - RNA, 19 nt, Artificial Sequence
  Description of Artificial Sequence: Synthetic oligonucleotide
  Sense strand starting at position 3535 of SEQ ID NO: 588879
gaucaaggagucugugcau

SEQ ID NO: 896277 - RNA, 19 nt, Artificial Sequence
  Description of Artificial Sequence: Synthetic oligonucleotide
  Antisense strand to SEQ ID NO: 896276
augcacagacuccuugauc

SEQ ID NO: 896278 - RNA, 19 nt, Artificial Sequence
  Description of Artificial Sequence: Synthetic oligonucleotide
  Sense strand starting at position 3584 of SEQ ID NO: 588879
uugucaucucugggagggu

SEQ ID NO: 896279 - RNA, 19 nt, Artificial Sequence
  Description of Artificial Sequence: Synthetic oligonucleotide
  Antisense strand to SEQ ID NO: 896278
acccucccagagaugacaa

SEQ ID NO: 896280 - RNA, 19 nt, Artificial Sequence
  Description of Artificial Sequence: Synthetic oligonucleotide
  Sense strand starting at position 3593 of SEQ ID NO: 588879
cugggagggucugugguau

SEQ ID NO: 896281 - RNA, 19 nt, Artificial Sequence
  Description of Artificial Sequence: Synthetic oligonucleotide
  Antisense strand to SEQ ID NO: 896280
auaccacagacccucccag

SEQ ID NO: 896282 - RNA, 19 nt, Artificial Sequence
  Description of Artificial Sequence: Synthetic oligonucleotide
  Sense strand starting at position 3594 of SEQ ID NO: 588879
ugggagggucugugguauu

SEQ ID NO: 896283 - RNA, 19 nt, Artificial Sequence
  Description of Artificial Sequence: Synthetic oligonucleotide
  Antisense strand to SEQ ID NO: 896282
aauaccacagacccuccca

SEQ ID NO: 896284 - RNA, 19 nt, Artificial Sequence
  Description of Artificial Sequence: Synthetic oligonucleotide
  Sense strand starting at position 3621 of SEQ ID NO: 588879
ucccauugucuugggaaac

SEQ ID NO: 896285 - RNA, 19 nt, Artificial Sequence
  Description of Artificial Sequence: Synthetic oligonucleotide
  Antisense strand to SEQ ID NO: 896284
guuucccaagacaauggga

SEQ ID NO: 896286 - RNA, 19 nt, Artificial Sequence
  Description of Artificial Sequence: Synthetic oligonucleotide
  Sense strand starting at position 3690 of SEQ ID NO: 588879
ucuaguaggagcuggguua

SEQ ID NO: 896287 - RNA, 19 nt, Artificial Sequence
  Description of Artificial Sequence: Synthetic oligonucleotide
  Antisense strand to SEQ ID NO: 896286
uaacccagcuccuacuaga

SEQ ID NO: 896288 - RNA, 19 nt, Artificial Sequence
  Description of Artificial Sequence: Synthetic oligonucleotide
  Sense strand starting at position 3691 of SEQ ID NO: 588879
cuaguaggagcuggguuau

SEQ ID NO: 896289 - RNA, 19 nt, Artificial Sequence
  Description of Artificial Sequence: Synthetic oligonucleotide
  Antisense strand to SEQ ID NO: 896288
auaacccagcuccuacuag

SEQ ID NO: 896290 - RNA, 19 nt, Artificial Sequence
  Description of Artificial Sequence: Synthetic oligonucleotide
  Sense strand starting at position 3697 of SEQ ID NO: 588879
ggagcuggguuauuaggau

SEQ ID NO: 896291 - RNA, 19 nt, Artificial Sequence
  Description of Artificial Sequence: Synthetic oligonucleotide
  Antisense strand to SEQ ID NO: 896290
auccuaauaacccagcucc

SEQ ID NO: 896292 - RNA, 19 nt, Artificial Sequence
  Description of Artificial Sequence: Synthetic oligonucleotide
  Sense strand starting at position 3703 of SEQ ID NO: 588879
ggguuauuaggaugcuagu

SEQ ID NO: 896293 - RNA, 19 nt, Artificial Sequence
  Description of Artificial Sequence: Synthetic oligonucleotide
  Antisense strand to SEQ ID NO: 896292
acuagcauccuaauaaccc

SEQ ID NO: 896294 - RNA, 19 nt, Artificial Sequence
  Description of Artificial Sequence: Synthetic oligonucleotide
  Sense strand starting at position 3746 of SEQ ID NO: 588879
ugaguucucuggccuggaa

SEQ ID NO: 896295 - RNA, 19 nt, Artificial Sequence
  Description of Artificial Sequence: Synthetic oligonucleotide
  Antisense strand to SEQ ID NO: 896294
uuccaggccagagaacuca

SEQ ID NO: 896296 - RNA, 19 nt, Artificial Sequence
  Description of Artificial Sequence: Synthetic oligonucleotide
  Sense strand starting at position 3749 of SEQ ID NO: 588879
guucucuggccuggaaaug

SEQ ID NO: 896297 - RNA, 19 nt, Artificial Sequence
  Description of Artificial Sequence: Synthetic oligonucleotide
  Antisense strand to SEQ ID NO: 896296
cauuuccaggccagagaac

SEQ ID NO: 896298 - RNA, 19 nt, Artificial Sequence
  Description of Artificial Sequence: Synthetic oligonucleotide
  Sense strand starting at position 3750 of SEQ ID NO: 588879
uucucuggccuggaaauga

SEQ ID NO: 896299 - RNA, 19 nt, Artificial Sequence
  Description of Artificial Sequence: Synthetic oligonucleotide
  Antisense strand to SEQ ID NO: 896298
ucauuuccaggccagagaa

SEQ ID NO: 896300 - RNA, 19 nt, Artificial Sequence
  Description of Artificial Sequence: Synthetic oligonucleotide
  Sense strand starting at position 3806 of SEQ ID NO: 588879
gcuacuguggguuggauua

SEQ ID NO: 896301 - RNA, 19 nt, Artificial Sequence
  Description of Artificial Sequence: Synthetic oligonucleotide
  Antisense strand to SEQ ID NO: 896300
uaauccaacccacaguagc

SEQ ID NO: 896302 - RNA, 19 nt, Artificial Sequence
  Description of Artificial Sequence: Synthetic oligonucleotide
  Sense strand starting at position 3816 of SEQ ID NO: 588879
guuggauuauauucucauc

SEQ ID NO: 896303 - RNA, 19 nt, Artificial Sequence
  Description of Artificial Sequence: Synthetic oligonucleotide
  Antisense strand to SEQ ID NO: 896302
gaugagaauauaauccaac

SEQ ID NO: 896304 - RNA, 19 nt, Artificial Sequence
  Description of Artificial Sequence: Synthetic oligonucleotide
  Sense strand starting at position 3918 of SEQ ID NO: 588879
caaguagagcccugaccuu

SEQ ID NO: 896305 - RNA, 19 nt, Artificial Sequence
  Description of Artificial Sequence: Synthetic oligonucleotide
  Antisense strand to SEQ ID NO: 896304
aaggucagggcucuacuug

SEQ ID NO: 896306 - RNA, 19 nt, Artificial Sequence
  Description of Artificial Sequence: Synthetic oligonucleotide
  Sense strand starting at position 3947 of SEQ ID NO: 588879
gauagaaucuagucuccag

SEQ ID NO: 896307 - RNA, 19 nt, Artificial Sequence
  Description of Artificial Sequence: Synthetic oligonucleotide
  Antisense strand to SEQ ID NO: 896306
cuggagacuagauucuauc

SEQ ID NO: 896308 - RNA, 19 nt, Artificial Sequence
  Description of Artificial Sequence: Synthetic oligonucleotide
  Sense strand starting at position 3951 of SEQ ID NO: 588879
gaaucuagucuccagugca

SEQ ID NO: 896309 - RNA, 19 nt, Artificial Sequence
  Description of Artificial Sequence: Synthetic oligonucleotide
  Antisense strand to SEQ ID NO: 896308
ugcacuggagacuagauuc

SEQ ID NO: 896310 - RNA, 19 nt, Artificial Sequence
  Description of Artificial Sequence: Synthetic oligonucleotide
  Sense strand starting at position 62 of SEQ ID NO: 588882
cuuauuauuccaggcagca

SEQ ID NO: 896311 - RNA, 19 nt, Artificial Sequence
  Description of Artificial Sequence: Synthetic oligonucleotide
  Antisense strand to SEQ ID NO: 896310
ugcugccuggaauaauaag

SEQ ID NO: 896312 - RNA, 19 nt, Artificial Sequence
  Description of Artificial Sequence: Synthetic oligonucleotide
  Sense strand starting at position 75 of SEQ ID NO: 588882
gcagcagaauuagagauuu

SEQ ID NO: 896313 - RNA, 19 nt, Artificial Sequence
  Description of Artificial Sequence: Synthetic oligonucleotide
  Antisense strand to SEQ ID NO: 896312
aaaucucuaauucugcugc

SEQ ID NO: 896314 - RNA, 19 nt, Artificial Sequence
  Description of Artificial Sequence: Synthetic oligonucleotide
  Sense strand starting at position 94 of SEQ ID NO: 588882
uagcucagaugguuucuga

SEQ ID NO: 896315 - RNA, 19 nt, Artificial Sequence
  Description of Artificial Sequence: Synthetic oligonucleotide
  Antisense strand to SEQ ID NO: 896314
ucagaaaccaucugagcua

SEQ ID NO: 896316 - RNA, 19 nt, Artificial Sequence
  Description of Artificial Sequence: Synthetic oligonucleotide
  Sense strand starting at position 109 of SEQ ID NO: 588882
cugagucuugcucgcauuu

SEQ ID NO: 896317 - RNA, 19 nt, Artificial Sequence
  Description of Artificial Sequence: Synthetic oligonucleotide
  Antisense strand to SEQ ID NO: 896316
aaaugcgagcaagacucag

SEQ ID NO: 896318 - RNA, 19 nt, Artificial Sequence
  Description of Artificial Sequence: Synthetic oligonucleotide
  Sense strand starting at position 237 of SEQ ID NO: 588882
caugguuuggagcagucua

SEQ ID NO: 896319 - RNA, 19 nt, Artificial Sequence
  Description of Artificial Sequence: Synthetic oligonucleotide
  Antisense strand to SEQ ID NO: 896318
uagacugcuccaaaccaug

SEQ ID NO: 896320 - RNA, 19 nt, Artificial Sequence
  Description of Artificial Sequence: Synthetic oligonucleotide
  Sense strand starting at position 242 of SEQ ID NO: 588882
uuuggagcagucuaaauga

SEQ ID NO: 896321 - RNA, 19 nt, Artificial Sequence
  Description of Artificial Sequence: Synthetic oligonucleotide
  Antisense strand to SEQ ID NO: 896320
ucauuuagacugcuccaaa

SEQ ID NO: 896322 - RNA, 19 nt, Artificial Sequence
  Description of Artificial Sequence: Synthetic oligonucleotide
  Sense strand starting at position 351 of SEQ ID NO: 588882
auauguuauucugcucuuu

SEQ ID NO: 896323 - RNA, 19 nt, Artificial Sequence
  Description of Artificial Sequence: Synthetic oligonucleotide
  Antisense strand to SEQ ID NO: 896322
aaagagcagaauaacauau

SEQ ID NO: 896324 - RNA, 19 nt, Artificial Sequence
  Description of Artificial Sequence: Synthetic oligonucleotide
  Sense strand starting at position 523 of SEQ ID NO: 588882
aaagcauaagcuugugaua

SEQ ID NO: 896325 - RNA, 19 nt, Artificial Sequence
  Description of Artificial Sequence: Synthetic oligonucleotide
  Antisense strand to SEQ ID NO: 896324
uaucacaagcuuaugcuuu

SEQ ID NO: 896326 - RNA, 19 nt, Artificial Sequence
  Description of Artificial Sequence: Synthetic oligonucleotide
  Sense strand starting at position 555 of SEQ ID NO: 588882
aucucuaaaucugugagua

SEQ ID NO: 896327 - RNA, 19 nt, Artificial Sequence
  Description of Artificial Sequence: Synthetic oligonucleotide
  Antisense strand to SEQ ID NO: 896326
uacucacagauuuagagau

SEQ ID NO: 896328 - RNA, 19 nt, Artificial Sequence
  Description of Artificial Sequence: Synthetic oligonucleotide
  Sense strand starting at position 556 of SEQ ID NO: 588882
ucucuaaaucugugaguag

SEQ ID NO: 896329 - RNA, 19 nt, Artificial Sequence
  Description of Artificial Sequence: Synthetic oligonucleotide
  Antisense strand to SEQ ID NO: 896328
cuacucacagauuuagaga

SEQ ID NO: 896330 - RNA, 19 nt, Artificial Sequence
  Description of Artificial Sequence: Synthetic oligonucleotide
  Sense strand starting at position 559 of SEQ ID NO: 588882
cuaaaucugugaguagcua

SEQ ID NO: 896331 - RNA, 19 nt, Artificial Sequence
  Description of Artificial Sequence: Synthetic oligonucleotide
  Antisense strand to SEQ ID NO: 896330
uagcuacucacagauuuag

SEQ ID NO: 896332 - RNA, 19 nt, Artificial Sequence
  Description of Artificial Sequence: Synthetic oligonucleotide
  Sense strand starting at position 560 of SEQ ID NO: 588882
uaaaucugugaguagcuaa

SEQ ID NO: 896333 - RNA, 19 nt, Artificial Sequence
  Description of Artificial Sequence: Synthetic oligonucleotide
  Antisense strand to SEQ ID NO: 896332
uuagcuacucacagauuua

SEQ ID NO: 896334 - RNA, 19 nt, Artificial Sequence
  Description of Artificial Sequence: Synthetic oligonucleotide
  Sense strand starting at position 563 of SEQ ID NO: 588882
aucugugaguagcuaagaa

SEQ ID NO: 896335 - RNA, 19 nt, Artificial Sequence
  Description of Artificial Sequence: Synthetic oligonucleotide
  Antisense strand to SEQ ID NO: 896334
uucuuagcuacucacagau

SEQ ID NO: 896336 - RNA, 19 nt, Artificial Sequence
  Description of Artificial Sequence: Synthetic oligonucleotide
  Sense strand starting at position 633 of SEQ ID NO: 588882
acugcuaauacgugcagau

SEQ ID NO: 896337 - RNA, 19 nt, Artificial Sequence
  Description of Artificial Sequence: Synthetic oligonucleotide
  Antisense strand to SEQ ID NO: 896336
aucugcacguauuagcagu

SEQ ID NO: 896338 - RNA, 19 nt, Artificial Sequence
  Description of Artificial Sequence: Synthetic oligonucleotide
  Sense strand starting at position 642 of SEQ ID NO: 588882
acgugcagauucuuauuaa

SEQ ID NO: 896339 - RNA, 19 nt, Artificial Sequence
  Description of Artificial Sequence: Synthetic oligonucleotide
  Antisense strand to SEQ ID NO: 896338
uuaauaagaaucugcacgu

SEQ ID NO: 896340 - RNA, 19 nt, Artificial Sequence
  Description of Artificial Sequence: Synthetic oligonucleotide
  Sense strand starting at position 1452 of SEQ ID NO: 588882
cugaaugaagcugggaauu

SEQ ID NO: 896341 - RNA, 19 nt, Artificial Sequence
  Description of Artificial Sequence: Synthetic oligonucleotide
  Antisense strand to SEQ ID NO: 896340
aauucccagcuucauucag

SEQ ID NO: 896342 - RNA, 19 nt, Artificial Sequence
  Description of Artificial Sequence: Synthetic oligonucleotide
  Sense strand starting at position 1454 of SEQ ID NO: 588882
gaaugaagcugggaauuac

SEQ ID NO: 896343 - RNA, 19 nt, Artificial Sequence
  Description of Artificial Sequence: Synthetic oligonucleotide
  Antisense strand to SEQ ID NO: 896342
guaauucccagcuucauuc

SEQ ID NO: 896344 - RNA, 19 nt, Artificial Sequence
  Description of Artificial Sequence: Synthetic oligonucleotide
  Sense strand starting at position 1683 of SEQ ID NO: 588882
aggauuagcuguucuagag

SEQ ID NO: 896345 - RNA, 19 nt, Artificial Sequence
  Description of Artificial Sequence: Synthetic oligonucleotide
  Antisense strand to SEQ ID NO: 896344
cucuagaacagcuaauccu

SEQ ID NO: 896346 - RNA, 19 nt, Artificial Sequence
  Description of Artificial Sequence: Synthetic oligonucleotide
  Sense strand starting at position 1687 of SEQ ID NO: 588882
uuagcuguucuagaggaaa

SEQ ID NO: 896347 - RNA, 19 nt, Artificial Sequence
  Description of Artificial Sequence: Synthetic oligonucleotide
  Antisense strand to SEQ ID NO: 896346
uuuccucuagaacagcuaa

SEQ ID NO: 896348 - RNA, 19 nt, Artificial Sequence
  Description of Artificial Sequence: Synthetic oligonucleotide
  Sense strand starting at position 2015 of SEQ ID NO: 588882
guggcacaguccuuacagu

SEQ ID NO: 896349 - RNA, 19 nt, Artificial Sequence
  Description of Artificial Sequence: Synthetic oligonucleotide
  Antisense strand to SEQ ID NO: 896348
acuguaaggacugugccac

SEQ ID NO: 896350 - RNA, 19 nt, Artificial Sequence
  Description of Artificial Sequence: Synthetic oligonucleotide
  Sense strand starting at position 2021 of SEQ ID NO: 588882
caguccuuacaguggaaca

SEQ ID NO: 896351 - RNA, 19 nt, Artificial Sequence
  Description of Artificial Sequence: Synthetic oligonucleotide
  Antisense strand to SEQ ID NO: 896350
uguuccacuguaaggacug

SEQ ID NO: 896352 - RNA, 19 nt, Artificial Sequence
  Description of Artificial Sequence: Synthetic oligonucleotide
  Sense strand starting at position 2210 of SEQ ID NO: 588882
uaggaacucuaguuggauu

SEQ ID NO: 896353 - RNA, 19 nt, Artificial Sequence
  Description of Artificial Sequence: Synthetic oligonucleotide
  Antisense strand to SEQ ID NO: 896352
aauccaacuagaguuccua

SEQ ID NO: 896354 - RNA, 19 nt, Artificial Sequence
  Description of Artificial Sequence: Synthetic oligonucleotide
  Sense strand starting at position 2282 of SEQ ID NO: 588882
agggcuaagcguuaaagaa

SEQ ID NO: 896355 - RNA, 19 nt, Artificial Sequence
  Description of Artificial Sequence: Synthetic oligonucleotide
  Antisense strand to SEQ ID NO: 896354
uucuuuaacgcuuagcccu

SEQ ID NO: 896356 - RNA, 19 nt, Artificial Sequence
  Description of Artificial Sequence: Synthetic oligonucleotide
  Sense strand starting at position 2291 of SEQ ID NO: 588882
cguuaaagaaugcagguua

SEQ ID NO: 896357 - RNA, 19 nt, Artificial Sequence
  Description of Artificial Sequence: Synthetic oligonucleotide
  Antisense strand to SEQ ID NO: 896356
uaaccugcauucuuuaacg

SEQ ID NO: 896358 - RNA, 19 nt, Artificial Sequence
  Description of Artificial Sequence: Synthetic oligonucleotide
  Sense strand starting at position 2551 of SEQ ID NO: 588882
uagagcucguccucaaaga

SEQ ID NO: 896359 - RNA, 19 nt, Artificial Sequence
  Description of Artificial Sequence: Synthetic oligonucleotide
  Antisense strand to SEQ ID NO: 896358
ucuuugaggacgagcucua

SEQ ID NO: 896360 - RNA, 19 nt, Artificial Sequence
  Description of Artificial Sequence: Synthetic oligonucleotide
  Sense strand starting at position 2552 of SEQ ID NO: 588882
agagcucguccucaaagau

SEQ ID NO: 896361 - RNA, 19 nt, Artificial Sequence
  Description of Artificial Sequence: Synthetic oligonucleotide
  Antisense strand to SEQ ID NO: 896360
aucuuugaggacgagcucu

SEQ ID NO: 896362 - RNA, 19 nt, Artificial Sequence
  Description of Artificial Sequence: Synthetic oligonucleotide
  Sense strand starting at position 2587 of SEQ ID NO: 588882
cgguuuaaugcauacugua

SEQ ID NO: 896363 - RNA, 19 nt, Artificial Sequence
  Description of Artificial Sequence: Synthetic oligonucleotide
  Antisense strand to SEQ ID NO: 896362
uacaguaugcauuaaaccg

SEQ ID NO: 896364 - RNA, 19 nt, Artificial Sequence
  Description of Artificial Sequence: Synthetic oligonucleotide
  Sense strand starting at position 2636 of SEQ ID NO: 588882
ggcuuuggacaguaaguuu

SEQ ID NO: 896365 - RNA, 19 nt, Artificial Sequence
  Description of Artificial Sequence: Synthetic oligonucleotide
  Antisense strand to SEQ ID NO: 896364
aaacuuacuguccaaagcc

SEQ ID NO: 896366 - RNA, 19 nt, Artificial Sequence
  Description of Artificial Sequence: Synthetic oligonucleotide
  Sense strand starting at position 2813 of SEQ ID NO: 588882
gggaguuagugcuuaauga

SEQ ID NO: 896367 - RNA, 19 nt, Artificial Sequence
  Description of Artificial Sequence: Synthetic oligonucleotide
  Antisense strand to SEQ ID NO: 896366
ucauuaagcacuaacuccc

SEQ ID NO: 896368 - RNA, 19 nt, Artificial Sequence
  Description of Artificial Sequence: Synthetic oligonucleotide
  Sense strand starting at position 2814 of SEQ ID NO: 588882
ggaguuagugcuuaaugag

SEQ ID NO: 896369 - RNA, 19 nt, Artificial Sequence
  Description of Artificial Sequence: Synthetic oligonucleotide
  Antisense strand to SEQ ID NO: 896368
cucauuaagcacuaacucc

SEQ ID NO: 896370 - RNA, 19 nt, Artificial Sequence
  Description of Artificial Sequence: Synthetic oligonucleotide
  Sense strand starting at position 2823 of SEQ ID NO: 588882
gcuuaaugaggucagaauu

SEQ ID NO: 896371 - RNA, 19 nt, Artificial Sequence
  Description of Artificial Sequence: Synthetic oligonucleotide
  Antisense strand to SEQ ID NO: 896370
aauucugaccucauuaagc

SEQ ID NO: 896372 - RNA, 19 nt, Artificial Sequence
  Description of Artificial Sequence: Synthetic oligonucleotide
  Sense strand starting at position 3004 of SEQ ID NO: 588882
aggucaaucaccugaggua

SEQ ID NO: 896373 - RNA, 19 nt, Artificial Sequence
  Description of Artificial Sequence: Synthetic oligonucleotide
  Antisense strand to SEQ ID NO: 896372
uaccucaggugauugaccu

SEQ ID NO: 896374 - RNA, 19 nt, Artificial Sequence
  Description of Artificial Sequence: Synthetic oligonucleotide
  Sense strand starting at position 3500 of SEQ ID NO: 588882
ggccaauggcuagaacuuu

SEQ ID NO: 896375 - RNA, 19 nt, Artificial Sequence
  Description of Artificial Sequence: Synthetic oligonucleotide
  Antisense strand to SEQ ID NO: 896374
aaaguucuagccauuggcc

SEQ ID NO: 896376 - RNA, 19 nt, Artificial Sequence
  Description of Artificial Sequence: Synthetic oligonucleotide
  Sense strand starting at position 3582 of SEQ ID NO: 588882
cuguguauagcacauaacu

SEQ ID NO: 896377 - RNA, 19 nt, Artificial Sequence
  Description of Artificial Sequence: Synthetic oligonucleotide
  Antisense strand to SEQ ID NO: 896376
aguuaugugcuauacacag

SEQ ID NO: 896378 - RNA, 19 nt, Artificial Sequence
  Description of Artificial Sequence: Synthetic oligonucleotide
  Sense strand starting at position 3646 of SEQ ID NO: 588882
agagaugaguuggucugaa

SEQ ID NO: 896379 - RNA, 19 nt, Artificial Sequence
  Description of Artificial Sequence: Synthetic oligonucleotide
  Antisense strand to SEQ ID NO: 896378
uucagaccaacucaucucu

SEQ ID NO: 896380 - RNA, 19 nt, Artificial Sequence
  Description of Artificial Sequence: Synthetic oligonucleotide
  Sense strand starting at position 3734 of SEQ ID NO: 588882
aacagacucuguuucguau

SEQ ID NO: 896381 - RNA, 19 nt, Artificial Sequence
  Description of Artificial Sequence: Synthetic oligonucleotide
  Antisense strand to SEQ ID NO: 896380
auacgaaacagagucuguu

SEQ ID NO: 896382 - RNA, 19 nt, Artificial Sequence
  Description of Artificial Sequence: Synthetic oligonucleotide
  Sense strand starting at position 3817 of SEQ ID NO: 588882
guacaaagcugaccauaaa

SEQ ID NO: 896383 - RNA, 19 nt, Artificial Sequence
  Description of Artificial Sequence: Synthetic oligonucleotide
  Antisense strand to SEQ ID NO: 896382
uuuauggucagcuuuguac

SEQ ID NO: 896384 - RNA, 19 nt, Artificial Sequence
  Description of Artificial Sequence: Synthetic oligonucleotide
  Sense strand starting at position 3851 of SEQ ID NO: 588882
gccucagcuuaacugaauu

SEQ ID NO: 896385 - RNA, 19 nt, Artificial Sequence
  Description of Artificial Sequence: Synthetic oligonucleotide
  Antisense strand to SEQ ID NO: 896384
aauucaguuaagcugaggc

SEQ ID NO: 896386 - RNA, 19 nt, Artificial Sequence
  Description of Artificial Sequence: Synthetic oligonucleotide
  Sense strand starting at position 3861 of SEQ ID NO: 588882
aacugaauuucugguacag

SEQ ID NO: 896387 - RNA, 19 nt, Artificial Sequence
  Description of Artificial Sequence: Synthetic oligonucleotide
  Antisense strand to SEQ ID NO: 896386
cuguaccagaaauucaguu

SEQ ID NO: 896388 - RNA, 19 nt, Artificial Sequence
  Description of Artificial Sequence: Synthetic oligonucleotide
  Sense strand starting at position 3863 of SEQ ID NO: 588882
cugaauuucugguacagug

SEQ ID NO: 896389 - RNA, 19 nt, Artificial Sequence
  Description of Artificial Sequence: Synthetic oligonucleotide
  Antisense strand to SEQ ID NO: 896388
cacuguaccagaaauucag

SEQ ID NO: 896390 - RNA, 19 nt, Artificial Sequence
  Description of Artificial Sequence: Synthetic oligonucleotide
  Sense strand starting at position 92 of SEQ ID NO: 588883
cagacagauuccuaaggga

SEQ ID NO: 896391 - RNA, 19 nt, Artificial Sequence
  Description of Artificial Sequence: Synthetic oligonucleotide
  Antisense strand to SEQ ID NO: 896390
ucccuuaggaaucugucug

SEQ ID NO: 896392 - RNA, 19 nt, Artificial Sequence
  Description of Artificial Sequence: Synthetic oligonucleotide
  Sense strand starting at position 191 of SEQ ID NO: 588883
gcgagaucugaugaguuau

SEQ ID NO: 896393 - RNA, 19 nt, Artificial Sequence
  Description of Artificial Sequence: Synthetic oligonucleotide
  Antisense strand to SEQ ID NO: 896392
auaacucaucagaucucgc

SEQ ID NO: 896394 - RNA, 19 nt, Artificial Sequence
  Description of Artificial Sequence: Synthetic oligonucleotide
  Sense strand starting at position 311 of SEQ ID NO: 588883
cagcuaagcgaagauuaag

SEQ ID NO: 896395 - RNA, 19 nt, Artificial Sequence
  Description of Artificial Sequence: Synthetic oligonucleotide
  Antisense strand to SEQ ID NO: 896394
cuuaaucuucgcuuagcug

SEQ ID NO: 896396 - RNA, 19 nt, Artificial Sequence
  Description of Artificial Sequence: Synthetic oligonucleotide
  Sense strand starting at position 331 of SEQ ID NO: 588883
aaaggaaauugucccgcau

SEQ ID NO: 896397 - RNA, 19 nt, Artificial Sequence
  Description of Artificial Sequence: Synthetic oligonucleotide
  Antisense strand to SEQ ID NO: 896396
augcgggacaauuuccuuu

SEQ ID NO: 896398 - RNA, 19 nt, Artificial Sequence
  Description of Artificial Sequence: Synthetic oligonucleotide
  Sense strand starting at position 335 of SEQ ID NO: 588883
gaaauugucccgcauaucu

SEQ ID NO: 896399 - RNA, 19 nt, Artificial Sequence
  Description of Artificial Sequence: Synthetic oligonucleotide
  Antisense strand to SEQ ID NO: 896398
agauaugcgggacaauuuc

SEQ ID NO: 896400 - RNA, 19 nt, Artificial Sequence
  Description of Artificial Sequence: Synthetic oligonucleotide
  Sense strand starting at position 346 of SEQ ID NO: 588883
gcauaucuuggaggcugaa

SEQ ID NO: 896401 - RNA, 19 nt, Artificial Sequence
  Description of Artificial Sequence: Synthetic oligonucleotide
  Antisense strand to SEQ ID NO: 896400
uucagccuccaagauaugc

SEQ ID NO: 896402 - RNA, 19 nt, Artificial Sequence
  Description of Artificial Sequence: Synthetic oligonucleotide
  Sense strand starting at position 389 of SEQ ID NO: 588883
caaggcugucaacaguuaa

SEQ ID NO: 896403 - RNA, 19 nt, Artificial Sequence
  Description of Artificial Sequence: Synthetic oligonucleotide
  Antisense strand to SEQ ID NO: 896402
uuaacuguugacagccuug

SEQ ID NO: 896404 - RNA, 19 nt, Artificial Sequence
  Description of Artificial Sequence: Synthetic oligonucleotide
  Sense strand starting at position 408 of SEQ ID NO: 588883
ugguauugcucuccucaag

SEQ ID NO: 896405 - RNA, 19 nt, Artificial Sequence
  Description of Artificial Sequence: Synthetic oligonucleotide
  Antisense strand to SEQ ID NO: 896404
cuugaggagagcaauacca

SEQ ID NO: 896406 - RNA, 19 nt, Artificial Sequence
  Description of Artificial Sequence: Synthetic oligonucleotide
  Sense strand starting at position 482 of SEQ ID NO: 588883
uacacaugccugggaugua

SEQ ID NO: 896407 - RNA, 19 nt, Artificial Sequence
  Description of Artificial Sequence: Synthetic oligonucleotide
  Antisense strand to SEQ ID NO: 896406
uacaucccaggcaugugua

SEQ ID NO: 896408 - RNA, 19 nt, Artificial Sequence
  Description of Artificial Sequence: Synthetic oligonucleotide
  Sense strand starting at position 726 of SEQ ID NO: 588883
gauuguggauacucaaauc

SEQ ID NO: 896409 - RNA, 19 nt, Artificial Sequence
  Description of Artificial Sequence: Synthetic oligonucleotide
  Antisense strand to SEQ ID NO: 896408
gauuugaguauccacaauc

SEQ ID NO: 896410 - RNA, 19 nt, Artificial Sequence
  Description of Artificial Sequence: Synthetic oligonucleotide
  Sense strand starting at position 834 of SEQ ID NO: 588883
cuuauuauuccaggcagca

SEQ ID NO: 896411 - RNA, 19 nt, Artificial Sequence
  Description of Artificial Sequence: Synthetic oligonucleotide
  Antisense strand to SEQ ID NO: 896410
ugcugccuggaauaauaag

SEQ ID NO: 896412 - RNA, 19 nt, Artificial Sequence
  Description of Artificial Sequence: Synthetic oligonucleotide
  Sense strand starting at position 847 of SEQ ID NO: 588883
gcagcagaauuagagauuu

SEQ ID NO: 896413 - RNA, 19 nt, Artificial Sequence
  Description of Artificial Sequence: Synthetic oligonucleotide
  Antisense strand to SEQ ID NO: 896412
aaaucucuaauucugcugc

SEQ ID NO: 896414 - RNA, 19 nt, Artificial Sequence
  Description of Artificial Sequence: Synthetic oligonucleotide
  Sense strand starting at position 866 of SEQ ID NO: 588883
uagcucagaugguuucuga

SEQ ID NO: 896415 - RNA, 19 nt, Artificial Sequence
  Description of Artificial Sequence: Synthetic oligonucleotide
  Antisense strand to SEQ ID NO: 896414
ucagaaaccaucugagcua

SEQ ID NO: 896416 - RNA, 19 nt, Artificial Sequence
  Description of Artificial Sequence: Synthetic oligonucleotide
  Sense strand starting at position 881 of SEQ ID NO: 588883
cugagucuugcucgcauuu

SEQ ID NO: 896417 - RNA, 19 nt, Artificial Sequence
  Description of Artificial Sequence: Synthetic oligonucleotide
  Antisense strand to SEQ ID NO: 896416
aaaugcgagcaagacucag

SEQ ID NO: 896418 - RNA, 19 nt, Artificial Sequence
  Description of Artificial Sequence: Synthetic oligonucleotide
  Sense strand starting at position 1009 of SEQ ID NO: 588883
caugguuuggagcagucua

SEQ ID NO: 896419 - RNA, 19 nt, Artificial Sequence
  Description of Artificial Sequence: Synthetic oligonucleotide
  Antisense strand to SEQ ID NO: 896418
uagacugcuccaaaccaug

SEQ ID NO: 896420 - RNA, 19 nt, Artificial Sequence
  Description of Artificial Sequence: Synthetic oligonucleotide
  Sense strand starting at position 1014 of SEQ ID NO: 588883
uuuggagcagucuaaauga

SEQ ID NO: 896421 - RNA, 19 nt, Artificial Sequence
  Description of Artificial Sequence: Synthetic oligonucleotide
  Antisense strand to SEQ ID NO: 896420
ucauuuagacugcuccaaa

SEQ ID NO: 896422 - RNA, 19 nt, Artificial Sequence
  Description of Artificial Sequence: Synthetic oligonucleotide
  Sense strand starting at position 1123 of SEQ ID NO: 588883
auauguuauucugcucuuu

SEQ ID NO: 896423 - RNA, 19 nt, Artificial Sequence
  Description of Artificial Sequence: Synthetic oligonucleotide
  Antisense strand to SEQ ID NO: 896422
aaagagcagaauaacauau

SEQ ID NO: 896424 - RNA, 19 nt, Artificial Sequence
  Description of Artificial Sequence: Synthetic oligonucleotide
  Sense strand starting at position 1295 of SEQ ID NO: 588883
aaagcauaagcuugugaua

SEQ ID NO: 896425 - RNA, 19 nt, Artificial Sequence
  Description of Artificial Sequence: Synthetic oligonucleotide
  Antisense strand to SEQ ID NO: 896424
uaucacaagcuuaugcuuu

SEQ ID NO: 896426 - RNA, 19 nt, Artificial Sequence
  Description of Artificial Sequence: Synthetic oligonucleotide
  Sense strand starting at position 1327 of SEQ ID NO: 588883
aucucuaaaucugugagua

SEQ ID NO: 896427 - RNA, 19 nt, Artificial Sequence
  Description of Artificial Sequence: Synthetic oligonucleotide
  Antisense strand to SEQ ID NO: 896426
uacucacagauuuagagau

SEQ ID NO: 896428 - RNA, 19 nt, Artificial Sequence
  Description of Artificial Sequence: Synthetic oligonucleotide
  Sense strand starting at position 1328 of SEQ ID NO: 588883
ucucuaaaucugugaguag

SEQ ID NO: 896429 - RNA, 19 nt, Artificial Sequence
  Description of Artificial Sequence: Synthetic oligonucleotide
  Antisense strand to SEQ ID NO: 896428
cuacucacagauuuagaga

SEQ ID NO: 896430 - RNA, 19 nt, Artificial Sequence
  Description of Artificial Sequence: Synthetic oligonucleotide
  Sense strand starting at position 1331 of SEQ ID NO: 588883
cuaaaucugugaguagcua

SEQ ID NO: 896431 - RNA, 19 nt, Artificial Sequence
  Description of Artificial Sequence: Synthetic oligonucleotide
  Antisense strand to SEQ ID NO: 896430
uagcuacucacagauuuag

SEQ ID NO: 896432 - RNA, 19 nt, Artificial Sequence
  Description of Artificial Sequence: Synthetic oligonucleotide
  Sense strand starting at position 1332 of SEQ ID NO: 588883
uaaaucugugaguagcuaa

SEQ ID NO: 896433 - RNA, 19 nt, Artificial Sequence
  Description of Artificial Sequence: Synthetic oligonucleotide
  Antisense strand to SEQ ID NO: 896432
uuagcuacucacagauuua

SEQ ID NO: 896434 - RNA, 19 nt, Artificial Sequence
  Description of Artificial Sequence: Synthetic oligonucleotide
  Sense strand starting at position 1335 of SEQ ID NO: 588883
aucugugaguagcuaagaa

SEQ ID NO: 896435 - RNA, 19 nt, Artificial Sequence
  Description of Artificial Sequence: Synthetic oligonucleotide
  Antisense strand to SEQ ID NO: 896434
uucuuagcuacucacagau

SEQ ID NO: 896436 - RNA, 19 nt, Artificial Sequence
  Description of Artificial Sequence: Synthetic oligonucleotide
  Sense strand starting at position 1414 of SEQ ID NO: 588883
acgugcagauucuuauuaa

SEQ ID NO: 896437 - RNA, 19 nt, Artificial Sequence
  Description of Artificial Sequence: Synthetic oligonucleotide
  Antisense strand to SEQ ID NO: 896436
uuaauaagaaucugcacgu

SEQ ID NO: 896438 - RNA, 19 nt, Artificial Sequence
  Description of Artificial Sequence: Synthetic oligonucleotide
  Sense strand starting at position 2224 of SEQ ID NO: 588883
cugaaugaagcugggaauu

SEQ ID NO: 896439 - RNA, 19 nt, Artificial Sequence
  Description of Artificial Sequence: Synthetic oligonucleotide
  Antisense strand to SEQ ID NO: 896438
aauucccagcuucauucag

SEQ ID NO: 896440 - RNA, 19 nt, Artificial Sequence
  Description of Artificial Sequence: Synthetic oligonucleotide
  Sense strand starting at position 2226 of SEQ ID NO: 588883
gaaugaagcugggaauuac

SEQ ID NO: 896441 - RNA, 19 nt, Artificial Sequence
  Description of Artificial Sequence: Synthetic oligonucleotide
  Antisense strand to SEQ ID NO: 896440
guaauucccagcuucauuc

SEQ ID NO: 896442 - RNA, 19 nt, Artificial Sequence
  Description of Artificial Sequence: Synthetic oligonucleotide
  Sense strand starting at position 2455 of SEQ ID NO: 588883
aggauuagcuguucuagag

SEQ ID NO: 896443 - RNA, 19 nt, Artificial Sequence
  Description of Artificial Sequence: Synthetic oligonucleotide
  Antisense strand to SEQ ID NO: 896442
cucuagaacagcuaauccu

SEQ ID NO: 896444 - RNA, 19 nt, Artificial Sequence
  Description of Artificial Sequence: Synthetic oligonucleotide
  Sense strand starting at position 2459 of SEQ ID NO: 588883
uuagcuguucuagaggaaa

SEQ ID NO: 896445 - RNA, 19 nt, Artificial Sequence
  Description of Artificial Sequence: Synthetic oligonucleotide
  Antisense strand to SEQ ID NO: 896444
uuuccucuagaacagcuaa

SEQ ID NO: 896446 - RNA, 19 nt, Artificial Sequence
  Description of Artificial Sequence: Synthetic oligonucleotide
  Sense strand starting at position 2793 of SEQ ID NO: 588883
caguccuuacaguggaaca

SEQ ID NO: 896447 - RNA, 19 nt, Artificial Sequence
  Description of Artificial Sequence: Synthetic oligonucleotide
  Antisense strand to SEQ ID NO: 896446
uguuccacuguaaggacug

SEQ ID NO: 896448 - RNA, 19 nt, Artificial Sequence
  Description of Artificial Sequence: Synthetic oligonucleotide
  Sense strand starting at position 2982 of SEQ ID NO: 588883
uaggaacucuaguuggauu

SEQ ID NO: 896449 - RNA, 19 nt, Artificial Sequence
  Description of Artificial Sequence: Synthetic oligonucleotide
  Antisense strand to SEQ ID NO: 896448
aauccaacuagaguuccua

SEQ ID NO: 896450 - RNA, 19 nt, Artificial Sequence
  Description of Artificial Sequence: Synthetic oligonucleotide
  Sense strand starting at position 3054 of SEQ ID NO: 588883
agggcuaagcguuaaagaa

SEQ ID NO: 896451 - RNA, 19 nt, Artificial Sequence
  Description of Artificial Sequence: Synthetic oligonucleotide
  Antisense strand to SEQ ID NO: 896450
uucuuuaacgcuuagcccu

SEQ ID NO: 896452 - RNA, 19 nt, Artificial Sequence
  Description of Artificial Sequence: Synthetic oligonucleotide
  Sense strand starting at position 3063 of SEQ ID NO: 588883
cguuaaagaaugcagguua

SEQ ID NO: 896453 - RNA, 19 nt, Artificial Sequence
  Description of Artificial Sequence: Synthetic oligonucleotide
  Antisense strand to SEQ ID NO: 896452
uaaccugcauucuuuaacg

SEQ ID NO: 896454 - RNA, 19 nt, Artificial Sequence
  Description of Artificial Sequence: Synthetic oligonucleotide
  Sense strand starting at position 3323 of SEQ ID NO: 588883
uagagcucguccucaaaga

SEQ ID NO: 896455 - RNA, 19 nt, Artificial Sequence
  Description of Artificial Sequence: Synthetic oligonucleotide
  Antisense strand to SEQ ID NO: 896454
ucuuugaggacgagcucua

SEQ ID NO: 896456 - RNA, 19 nt, Artificial Sequence
  Description of Artificial Sequence: Synthetic oligonucleotide
  Sense strand starting at position 3324 of SEQ ID NO: 588883
agagcucguccucaaagau

SEQ ID NO: 896457 - RNA, 19 nt, Artificial Sequence
  Description of Artificial Sequence: Synthetic oligonucleotide
  Antisense strand to SEQ ID NO: 896456
aucuuugaggacgagcucu

SEQ ID NO: 896458 - RNA, 19 nt, Artificial Sequence
  Description of Artificial Sequence: Synthetic oligonucleotide
  Sense strand starting at position 3359 of SEQ ID NO: 588883
cgguuuaaugcauacugua

SEQ ID NO: 896459 - RNA, 19 nt, Artificial Sequence
  Description of Artificial Sequence: Synthetic oligonucleotide
  Antisense strand to SEQ ID NO: 896458
uacaguaugcauuaaaccg

SEQ ID NO: 896460 - RNA, 19 nt, Artificial Sequence
  Description of Artificial Sequence: Synthetic oligonucleotide
  Sense strand starting at position 3408 of SEQ ID NO: 588883
ggcuuuggacaguaaguuu

SEQ ID NO: 896461 - RNA, 19 nt, Artificial Sequence
  Description of Artificial Sequence: Synthetic oligonucleotide
  Antisense strand to SEQ ID NO: 896460
aaacuuacuguccaaagcc

SEQ ID NO: 896462 - RNA, 19 nt, Artificial Sequence
  Description of Artificial Sequence: Synthetic oligonucleotide
  Sense strand starting at position 3585 of SEQ ID NO: 588883
gggaguuagugcuuaauga

SEQ ID NO: 896463 - RNA, 19 nt, Artificial Sequence
  Description of Artificial Sequence: Synthetic oligonucleotide
  Antisense strand to SEQ ID NO: 896462
ucauuaagcacuaacuccc

SEQ ID NO: 896464 - RNA, 19 nt, Artificial Sequence
  Description of Artificial Sequence: Synthetic oligonucleotide
  Sense strand starting at position 3586 of SEQ ID NO: 588883
ggaguuagugcuuaaugag

SEQ ID NO: 896465 - RNA, 19 nt, Artificial Sequence
  Description of Artificial Sequence: Synthetic oligonucleotide
  Antisense strand to SEQ ID NO: 896464
cucauuaagcacuaacucc

SEQ ID NO: 896466 - RNA, 19 nt, Artificial Sequence
  Description of Artificial Sequence: Synthetic oligonucleotide
  Sense strand starting at position 3595 of SEQ ID NO: 588883
gcuuaaugaggucagaauu

SEQ ID NO: 896467 - RNA, 19 nt, Artificial Sequence
  Description of Artificial Sequence: Synthetic oligonucleotide
  Antisense strand to SEQ ID NO: 896466
aauucugaccucauuaagc

SEQ ID NO: 896468 - RNA, 19 nt, Artificial Sequence
  Description of Artificial Sequence: Synthetic oligonucleotide
  Sense strand starting at position 3776 of SEQ ID NO: 588883
aggucaaucaccugaggua

SEQ ID NO: 896469 - RNA, 19 nt, Artificial Sequence
  Description of Artificial Sequence: Synthetic oligonucleotide
  Antisense strand to SEQ ID NO: 896468
uaccucaggugauugaccu

SEQ ID NO: 896470 - RNA, 19 nt, Artificial Sequence
  Description of Artificial Sequence: Synthetic oligonucleotide
  Sense strand starting at position 96 of SEQ ID NO: 588884
cagacagauuccuaaggga

SEQ ID NO: 896471 - RNA, 19 nt, Artificial Sequence
  Description of Artificial Sequence: Synthetic oligonucleotide
  Antisense strand to SEQ ID NO: 896470
ucccuuaggaaucugucug

SEQ ID NO: 896472 - RNA, 19 nt, Artificial Sequence
  Description of Artificial Sequence: Synthetic oligonucleotide
  Sense strand starting at position 195 of SEQ ID NO: 588884
gcgagaucugaugaguuau

SEQ ID NO: 896473 - RNA, 19 nt, Artificial Sequence
  Description of Artificial Sequence: Synthetic oligonucleotide
  Antisense strand to SEQ ID NO: 896472
auaacucaucagaucucgc

SEQ ID NO: 896474 - RNA, 19 nt, Artificial Sequence
  Description of Artificial Sequence: Synthetic oligonucleotide
  Sense strand starting at position 315 of SEQ ID NO: 588884
cagcuaagcgaagauuaag

SEQ ID NO: 896475 - RNA, 19 nt, Artificial Sequence
  Description of Artificial Sequence: Synthetic oligonucleotide
  Antisense strand to SEQ ID NO: 896474
cuuaaucuucgcuuagcug

SEQ ID NO: 896476 - RNA, 19 nt, Artificial Sequence
  Description of Artificial Sequence: Synthetic oligonucleotide
  Sense strand starting at position 335 of SEQ ID NO: 588884
aaaggaaauugucccgcau

SEQ ID NO: 896477 - RNA, 19 nt, Artificial Sequence
  Description of Artificial Sequence: Synthetic oligonucleotide
  Antisense strand to SEQ ID NO: 896476
augcgggacaauuuccuuu

SEQ ID NO: 896478 - RNA, 19 nt, Artificial Sequence
  Description of Artificial Sequence: Synthetic oligonucleotide
  Sense strand starting at position 339 of SEQ ID NO: 588884
gaaauugucccgcauaucu

SEQ ID NO: 896479 - RNA, 19 nt, Artificial Sequence
  Description of Artificial Sequence: Synthetic oligonucleotide
  Antisense strand to SEQ ID NO: 896478
agauaugcgggacaauuuc

SEQ ID NO: 896480 - RNA, 19 nt, Artificial Sequence
  Description of Artificial Sequence: Synthetic oligonucleotide
  Sense strand starting at position 350 of SEQ ID NO: 588884
gcauaucuuggaggcugaa

SEQ ID NO: 896481 - RNA, 19 nt, Artificial Sequence
  Description of Artificial Sequence: Synthetic oligonucleotide
  Antisense strand to SEQ ID NO: 896480
uucagccuccaagauaugc

SEQ ID NO: 896482 - RNA, 19 nt, Artificial Sequence
  Description of Artificial Sequence: Synthetic oligonucleotide
  Sense strand starting at position 393 of SEQ ID NO: 588884
caaggcugucaacaguuaa

SEQ ID NO: 896483 - RNA, 19 nt, Artificial Sequence
  Description of Artificial Sequence: Synthetic oligonucleotide
  Antisense strand to SEQ ID NO: 896482
uuaacuguugacagccuug

SEQ ID NO: 896484 - RNA, 19 nt, Artificial Sequence
  Description of Artificial Sequence: Synthetic oligonucleotide
  Sense strand starting at position 412 of SEQ ID NO: 588884
ugguauugcucuccucaag

SEQ ID NO: 896485 - RNA, 19 nt, Artificial Sequence
  Description of Artificial Sequence: Synthetic oligonucleotide
  Antisense strand to SEQ ID NO: 896484
cuugaggagagcaauacca

SEQ ID NO: 896486 - RNA, 19 nt, Artificial Sequence
  Description of Artificial Sequence: Synthetic oligonucleotide
  Sense strand starting at position 486 of SEQ ID NO: 588884
uacacaugccugggaugua

SEQ ID NO: 896487 - RNA, 19 nt, Artificial Sequence
  Description of Artificial Sequence: Synthetic oligonucleotide
  Antisense strand to SEQ ID NO: 896486
uacaucccaggcaugugua

SEQ ID NO: 896488 - RNA, 19 nt, Artificial Sequence
  Description of Artificial Sequence: Synthetic oligonucleotide
  Sense strand starting at position 730 of SEQ ID NO: 588884
gauuguggauacucaaauc

SEQ ID NO: 896489 - RNA, 19 nt, Artificial Sequence
  Description of Artificial Sequence: Synthetic oligonucleotide
  Antisense strand to SEQ ID NO: 896488
gauuugaguauccacaauc

SEQ ID NO: 896490 - RNA, 19 nt, Artificial Sequence
  Description of Artificial Sequence: Synthetic oligonucleotide
  Sense strand starting at position 838 of SEQ ID NO: 588884
cuuauuauuccaggcagca

SEQ ID NO: 896491 - RNA, 19 nt, Artificial Sequence
  Description of Artificial Sequence: Synthetic oligonucleotide
  Antisense strand to SEQ ID NO: 896490
ugcugccuggaauaauaag

SEQ ID NO: 896492 - RNA, 19 nt, Artificial Sequence
  Description of Artificial Sequence: Synthetic oligonucleotide
  Sense strand starting at position 851 of SEQ ID NO: 588884
gcagcagaauuagagauuu

SEQ ID NO: 896493 - RNA, 19 nt, Artificial Sequence
  Description of Artificial Sequence: Synthetic oligonucleotide
  Antisense strand to SEQ ID NO: 896492
aaaucucuaauucugcugc

SEQ ID NO: 896494 - RNA, 19 nt, Artificial Sequence
  Description of Artificial Sequence: Synthetic oligonucleotide
  Sense strand starting at position 870 of SEQ ID NO: 588884
uagcucagaugguuucuga

SEQ ID NO: 896495 - RNA, 19 nt, Artificial Sequence
  Description of Artificial Sequence: Synthetic oligonucleotide
  Antisense strand to SEQ ID NO: 896494
ucagaaaccaucugagcua

SEQ ID NO: 896496 - RNA, 19 nt, Artificial Sequence
  Description of Artificial Sequence: Synthetic oligonucleotide
  Sense strand starting at position 885 of SEQ ID NO: 588884
cugagucuugcucgcauuu

SEQ ID NO: 896497 - RNA, 19 nt, Artificial Sequence
  Description of Artificial Sequence: Synthetic oligonucleotide
  Antisense strand to SEQ ID NO: 896496
aaaugcgagcaagacucag

SEQ ID NO: 896498 - RNA, 19 nt, Artificial Sequence
  Description of Artificial Sequence: Synthetic oligonucleotide
  Sense strand starting at position 1013 of SEQ ID NO: 588884
caugguuuggagcagucua

SEQ ID NO: 896499 - RNA, 19 nt, Artificial Sequence
  Description of Artificial Sequence: Synthetic oligonucleotide
  Antisense strand to SEQ ID NO: 896498
uagacugcuccaaaccaug

SEQ ID NO: 896500 - RNA, 19 nt, Artificial Sequence
  Description of Artificial Sequence: Synthetic oligonucleotide
  Sense strand starting at position 1018 of SEQ ID NO: 588884
uuuggagcagucuaaauga

SEQ ID NO: 896501 - RNA, 19 nt, Artificial Sequence
  Description of Artificial Sequence: Synthetic oligonucleotide
  Antisense strand to SEQ ID NO: 896500
ucauuuagacugcuccaaa

SEQ ID NO: 896502 - RNA, 19 nt, Artificial Sequence
  Description of Artificial Sequence: Synthetic oligonucleotide
  Sense strand starting at position 1127 of SEQ ID NO: 588884
auauguuauucugcucuuu

SEQ ID NO: 896503 - RNA, 19 nt, Artificial Sequence
  Description of Artificial Sequence: Synthetic oligonucleotide
  Antisense strand to SEQ ID NO: 896502
aaagagcagaauaacauau

SEQ ID NO: 896504 - RNA, 19 nt, Artificial Sequence
  Description of Artificial Sequence: Synthetic oligonucleotide
  Sense strand starting at position 1299 of SEQ ID NO: 588884
aaagcauaagcuugugaua

SEQ ID NO: 896505 - RNA, 19 nt, Artificial Sequence
  Description of Artificial Sequence: Synthetic oligonucleotide
  Antisense strand to SEQ ID NO: 896504
uaucacaagcuuaugcuuu

SEQ ID NO: 896506 - RNA, 19 nt, Artificial Sequence
  Description of Artificial Sequence: Synthetic oligonucleotide
  Sense strand starting at position 1331 of SEQ ID NO: 588884
aucucuaaaucugugagua

SEQ ID NO: 896507 - RNA, 19 nt, Artificial Sequence
  Description of Artificial Sequence: Synthetic oligonucleotide
  Antisense strand to SEQ ID NO: 896506
uacucacagauuuagagau

SEQ ID NO: 896508 - RNA, 19 nt, Artificial Sequence
  Description of Artificial Sequence: Synthetic oligonucleotide
  Sense strand starting at position 1332 of SEQ ID NO: 588884
ucucuaaaucugugaguag

SEQ ID NO: 896509 - RNA, 19 nt, Artificial Sequence
  Description of Artificial Sequence: Synthetic oligonucleotide
  Antisense strand to SEQ ID NO: 896508
cuacucacagauuuagaga

SEQ ID NO: 896510 - RNA, 19 nt, Artificial Sequence
  Description of Artificial Sequence: Synthetic oligonucleotide
  Sense strand starting at position 1335 of SEQ ID NO: 588884
cuaaaucugugaguagcua

SEQ ID NO: 896511 - RNA, 19 nt, Artificial Sequence
  Description of Artificial Sequence: Synthetic oligonucleotide
  Antisense strand to SEQ ID NO: 896510
uagcuacucacagauuuag

SEQ ID NO: 896512 - RNA, 19 nt, Artificial Sequence
  Description of Artificial Sequence: Synthetic oligonucleotide
  Sense strand starting at position 1336 of SEQ ID NO: 588884
uaaaucugugaguagcuaa

SEQ ID NO: 896513 - RNA, 19 nt, Artificial Sequence
  Description of Artificial Sequence: Synthetic oligonucleotide
  Antisense strand to SEQ ID NO: 896512
uuagcuacucacagauuua

SEQ ID NO: 896514 - RNA, 19 nt, Artificial Sequence
  Description of Artificial Sequence: Synthetic oligonucleotide
  Sense strand starting at position 1339 of SEQ ID NO: 588884
aucugugaguagcuaagaa

SEQ ID NO: 896515 - RNA, 19 nt, Artificial Sequence
  Description of Artificial Sequence: Synthetic oligonucleotide
  Antisense strand to SEQ ID NO: 896514
uucuuagcuacucacagau

SEQ ID NO: 896516 - RNA, 19 nt, Artificial Sequence
  Description of Artificial Sequence: Synthetic oligonucleotide
  Sense strand starting at position 1418 of SEQ ID NO: 588884
acgugcagauucuuauuaa

SEQ ID NO: 896517 - RNA, 19 nt, Artificial Sequence
  Description of Artificial Sequence: Synthetic oligonucleotide
  Antisense strand to SEQ ID NO: 896516
uuaauaagaaucugcacgu

SEQ ID NO: 896518 - RNA, 19 nt, Artificial Sequence
  Description of Artificial Sequence: Synthetic oligonucleotide
  Sense strand starting at position 2228 of SEQ ID NO: 588884
cugaaugaagcugggaauu

SEQ ID NO: 896519 - RNA, 19 nt, Artificial Sequence
  Description of Artificial Sequence: Synthetic oligonucleotide
  Antisense strand to SEQ ID NO: 896518
aauucccagcuucauucag

SEQ ID NO: 896520 - RNA, 19 nt, Artificial Sequence
  Description of Artificial Sequence: Synthetic oligonucleotide
  Sense strand starting at position 2230 of SEQ ID NO: 588884
gaaugaagcugggaauuac

SEQ ID NO: 896521 - RNA, 19 nt, Artificial Sequence
  Description of Artificial Sequence: Synthetic oligonucleotide
  Antisense strand to SEQ ID NO: 896520
guaauucccagcuucauuc

SEQ ID NO: 896522 - RNA, 19 nt, Artificial Sequence
  Description of Artificial Sequence: Synthetic oligonucleotide
  Sense strand starting at position 2459 of SEQ ID NO: 588884
aggauuagcuguucuagag

SEQ ID NO: 896523 - RNA, 19 nt, Artificial Sequence
  Description of Artificial Sequence: Synthetic oligonucleotide
  Antisense strand to SEQ ID NO: 896522
cucuagaacagcuaauccu

SEQ ID NO: 896524 - RNA, 19 nt, Artificial Sequence
  Description of Artificial Sequence: Synthetic oligonucleotide
  Sense strand starting at position 2463 of SEQ ID NO: 588884
uuagcuguucuagaggaaa

SEQ ID NO: 896525 - RNA, 19 nt, Artificial Sequence
  Description of Artificial Sequence: Synthetic oligonucleotide
  Antisense strand to SEQ ID NO: 896524
uuuccucuagaacagcuaa

SEQ ID NO: 896526 - RNA, 19 nt, Artificial Sequence
  Description of Artificial Sequence: Synthetic oligonucleotide
  Sense strand starting at position 2797 of SEQ ID NO: 588884
caguccuuacaguggaaca

SEQ ID NO: 896527 - RNA, 19 nt, Artificial Sequence
  Description of Artificial Sequence: Synthetic oligonucleotide
  Antisense strand to SEQ ID NO: 896526
uguuccacuguaaggacug

SEQ ID NO: 896528 - RNA, 19 nt, Artificial Sequence
  Description of Artificial Sequence: Synthetic oligonucleotide
  Sense strand starting at position 2986 of SEQ ID NO: 588884
uaggaacucuaguuggauu

SEQ ID NO: 896529 - RNA, 19 nt, Artificial Sequence
  Description of Artificial Sequence: Synthetic oligonucleotide
  Antisense strand to SEQ ID NO: 896528
aauccaacuagaguuccua

SEQ ID NO: 896530 - RNA, 19 nt, Artificial Sequence
  Description of Artificial Sequence: Synthetic oligonucleotide
  Sense strand starting at position 3058 of SEQ ID NO: 588884
agggcuaagcguuaaagaa

SEQ ID NO: 896531 - RNA, 19 nt, Artificial Sequence
  Description of Artificial Sequence: Synthetic oligonucleotide
  Antisense strand to SEQ ID NO: 896530
uucuuuaacgcuuagcccu

SEQ ID NO: 896532 - RNA, 19 nt, Artificial Sequence
  Description of Artificial Sequence: Synthetic oligonucleotide
  Sense strand starting at position 3067 of SEQ ID NO: 588884
cguuaaagaaugcagguua

SEQ ID NO: 896533 - RNA, 19 nt, Artificial Sequence
  Description of Artificial Sequence: Synthetic oligonucleotide
  Antisense strand to SEQ ID NO: 896532
uaaccugcauucuuuaacg

SEQ ID NO: 896534 - RNA, 19 nt, Artificial Sequence
  Description of Artificial Sequence: Synthetic oligonucleotide
  Sense strand starting at position 3327 of SEQ ID NO: 588884
uagagcucguccucaaaga

SEQ ID NO: 896535 - RNA, 19 nt, Artificial Sequence
  Description of Artificial Sequence: Synthetic oligonucleotide
  Antisense strand to SEQ ID NO: 896534
ucuuugaggacgagcucua

SEQ ID NO: 896536 - RNA, 19 nt, Artificial Sequence
  Description of Artificial Sequence: Synthetic oligonucleotide
  Sense strand starting at position 3328 of SEQ ID NO: 588884
agagcucguccucaaagau

SEQ ID NO: 896537 - RNA, 19 nt, Artificial Sequence
  Description of Artificial Sequence: Synthetic oligonucleotide
  Antisense strand to SEQ ID NO: 896536
aucuuugaggacgagcucu

SEQ ID NO: 896538 - RNA, 19 nt, Artificial Sequence
  Description of Artificial Sequence: Synthetic oligonucleotide
  Sense strand starting at position 3363 of SEQ ID NO: 588884
cgguuuaaugcauacugua

SEQ ID NO: 896539 - RNA, 19 nt, Artificial Sequence
  Description of Artificial Sequence: Synthetic oligonucleotide
  Antisense strand to SEQ ID NO: 896538
uacaguaugcauuaaaccg

SEQ ID NO: 896540 - RNA, 19 nt, Artificial Sequence
  Description of Artificial Sequence: Synthetic oligonucleotide
  Sense strand starting at position 3412 of SEQ ID NO: 588884
ggcuuuggacaguaaguuu

SEQ ID NO: 896541 - RNA, 19 nt, Artificial Sequence
  Description of Artificial Sequence: Synthetic oligonucleotide
  Antisense strand to SEQ ID NO: 896540
aaacuuacuguccaaagcc

SEQ ID NO: 896542 - RNA, 19 nt, Artificial Sequence
  Description of Artificial Sequence: Synthetic oligonucleotide
  Sense strand starting at position 3589 of SEQ ID NO: 588884
gggaguuagugcuuaauga

SEQ ID NO: 896543 - RNA, 19 nt, Artificial Sequence
  Description of Artificial Sequence: Synthetic oligonucleotide
  Antisense strand to SEQ ID NO: 896542
ucauuaagcacuaacuccc

SEQ ID NO: 896544 - RNA, 19 nt, Artificial Sequence
  Description of Artificial Sequence: Synthetic oligonucleotide
  Sense strand starting at position 3590 of SEQ ID NO: 588884
ggaguuagugcuuaaugag

SEQ ID NO: 896545 - RNA, 19 nt, Artificial Sequence
  Description of Artificial Sequence: Synthetic oligonucleotide
  Antisense strand to SEQ ID NO: 896544
cucauuaagcacuaacucc

SEQ ID NO: 896546 - RNA, 19 nt, Artificial Sequence
  Description of Artificial Sequence: Synthetic oligonucleotide
  Sense strand starting at position 3599 of SEQ ID NO: 588884
gcuuaaugaggucagaauu

SEQ ID NO: 896547 - RNA, 19 nt, Artificial Sequence
  Description of Artificial Sequence: Synthetic oligonucleotide
  Antisense strand to SEQ ID NO: 896546
aauucugaccucauuaagc

SEQ ID NO: 896548 - RNA, 19 nt, Artificial Sequence
  Description of Artificial Sequence: Synthetic oligonucleotide
  Sense strand starting at position 3780 of SEQ ID NO: 588884
aggucaaucaccugaggua

SEQ ID NO: 896549 - RNA, 19 nt, Artificial Sequence
  Description of Artificial Sequence: Synthetic oligonucleotide
  Antisense strand to SEQ ID NO: 896548
uaccucaggugauugaccu

SEQ ID NO: 896550 - RNA, 19 nt, Artificial Sequence
  Description of Artificial Sequence: Synthetic oligonucleotide
  Sense strand starting at position 25 of SEQ ID NO: 588885
agugcuuauacuggaugaa

SEQ ID NO: 896551 - RNA, 19 nt, Artificial Sequence
  Description of Artificial Sequence: Synthetic oligonucleotide
  Antisense strand to SEQ ID NO: 896550
uucauccaguauaagcacu

SEQ ID NO: 896552 - RNA, 19 nt, Artificial Sequence
  Description of Artificial Sequence: Synthetic oligonucleotide
  Sense strand starting at position 26 of SEQ ID NO: 588885
gugcuuauacuggaugaac

SEQ ID NO: 896553 - RNA, 19 nt, Artificial Sequence
  Description of Artificial Sequence: Synthetic oligonucleotide
  Antisense strand to SEQ ID NO: 896552
guucauccaguauaagcac

SEQ ID NO: 896554 - RNA, 19 nt, Artificial Sequence
  Description of Artificial Sequence: Synthetic oligonucleotide
  Sense strand starting at position 28 of SEQ ID NO: 588885
gcuuauacuggaugaacaa

SEQ ID NO: 896555 - RNA, 19 nt, Artificial Sequence
  Description of Artificial Sequence: Synthetic oligonucleotide
  Antisense strand to SEQ ID NO: 896554
uuguucauccaguauaagc

SEQ ID NO: 896556 - RNA, 19 nt, Artificial Sequence
  Description of Artificial Sequence: Synthetic oligonucleotide
  Sense strand starting at position 62 of SEQ ID NO: 588885
ucaauccucuuagugauag

SEQ ID NO: 896557 - RNA, 19 nt, Artificial Sequence
  Description of Artificial Sequence: Synthetic oligonucleotide
  Antisense strand to SEQ ID NO: 896556
cuaucacuaagaggauuga

SEQ ID NO: 896558 - RNA, 19 nt, Artificial Sequence
  Description of Artificial Sequence: Synthetic oligonucleotide
  Sense strand starting at position 68 of SEQ ID NO: 588885
cucuuagugauagaaugug

SEQ ID NO: 896559 - RNA, 19 nt, Artificial Sequence
  Description of Artificial Sequence: Synthetic oligonucleotide
  Antisense strand to SEQ ID NO: 896558
cacauucuaucacuaagag

SEQ ID NO: 896560 - RNA, 19 nt, Artificial Sequence
  Description of Artificial Sequence: Synthetic oligonucleotide
  Sense strand starting at position 73 of SEQ ID NO: 588885
agugauagaaugugcauga

SEQ ID NO: 896561 - RNA, 19 nt, Artificial Sequence
  Description of Artificial Sequence: Synthetic oligonucleotide
  Antisense strand to SEQ ID NO: 896560
ucaugcacauucuaucacu

SEQ ID NO: 896562 - RNA, 19 nt, Artificial Sequence
  Description of Artificial Sequence: Synthetic oligonucleotide
  Sense strand starting at position 74 of SEQ ID NO: 588885
gugauagaaugugcaugau

SEQ ID NO: 896563 - RNA, 19 nt, Artificial Sequence
  Description of Artificial Sequence: Synthetic oligonucleotide
  Antisense strand to SEQ ID NO: 896562
aucaugcacauucuaucac

SEQ ID NO: 896564 - RNA, 19 nt, Artificial Sequence
  Description of Artificial Sequence: Synthetic oligonucleotide
  Sense strand starting at position 77 of SEQ ID NO: 588885
auagaaugugcaugaucaa

SEQ ID NO: 896565 - RNA, 19 nt, Artificial Sequence
  Description of Artificial Sequence: Synthetic oligonucleotide
  Antisense strand to SEQ ID NO: 896564
uugaucaugcacauucuau

SEQ ID NO: 896566 - RNA, 19 nt, Artificial Sequence
  Description of Artificial Sequence: Synthetic oligonucleotide
  Sense strand starting at position 80 of SEQ ID NO: 588885
gaaugugcaugaucaagau

SEQ ID NO: 896567 - RNA, 19 nt, Artificial Sequence
  Description of Artificial Sequence: Synthetic oligonucleotide
  Antisense strand to SEQ ID NO: 896566
aucuugaucaugcacauuc

SEQ ID NO: 896568 - RNA, 19 nt, Artificial Sequence
  Description of Artificial Sequence: Synthetic oligonucleotide
  Sense strand starting at position 121 of SEQ ID NO: 588885
ggaaucuagucagaauuua

SEQ ID NO: 896569 - RNA, 19 nt, Artificial Sequence
  Description of Artificial Sequence: Synthetic oligonucleotide
  Antisense strand to SEQ ID NO: 896568
uaaauucugacuagauucc

SEQ ID NO: 896570 - RNA, 19 nt, Artificial Sequence
  Description of Artificial Sequence: Synthetic oligonucleotide
  Sense strand starting at position 496 of SEQ ID NO: 588885
caacguaguguccauuaag

SEQ ID NO: 896571 - RNA, 19 nt, Artificial Sequence
  Description of Artificial Sequence: Synthetic oligonucleotide
  Antisense strand to SEQ ID NO: 896570
cuuaauggacacuacguug

SEQ ID NO: 896572 - RNA, 19 nt, Artificial Sequence
  Description of Artificial Sequence: Synthetic oligonucleotide
  Sense strand starting at position 650 of SEQ ID NO: 588885
guuacuuugcaagauauaa

SEQ ID NO: 896573 - RNA, 19 nt, Artificial Sequence
  Description of Artificial Sequence: Synthetic oligonucleotide
  Antisense strand to SEQ ID NO: 896572
uuauaucuugcaaaguaac

SEQ ID NO: 896574 - RNA, 19 nt, Artificial Sequence
  Description of Artificial Sequence: Synthetic oligonucleotide
  Sense strand starting at position 705 of SEQ ID NO: 588885
auccauuaauaggauuuga

SEQ ID NO: 896575 - RNA, 19 nt, Artificial Sequence
  Description of Artificial Sequence: Synthetic oligonucleotide
  Antisense strand to SEQ ID NO: 896574
ucaaauccuauuaauggau

SEQ ID NO: 896576 - RNA, 19 nt, Artificial Sequence
  Description of Artificial Sequence: Synthetic oligonucleotide
  Sense strand starting at position 730 of SEQ ID NO: 588885
aucauuacacaggguugaa

SEQ ID NO: 896577 - RNA, 19 nt, Artificial Sequence
  Description of Artificial Sequence: Synthetic oligonucleotide
  Antisense strand to SEQ ID NO: 896576
uucaacccuguguaaugau

SEQ ID NO: 896578 - RNA, 19 nt, Artificial Sequence
  Description of Artificial Sequence: Synthetic oligonucleotide
  Sense strand starting at position 755 of SEQ ID NO: 588885
cuggaaugagacugcuuua

SEQ ID NO: 896579 - RNA, 19 nt, Artificial Sequence
  Description of Artificial Sequence: Synthetic oligonucleotide
  Antisense strand to SEQ ID NO: 896578
uaaagcagucucauuccag

SEQ ID NO: 896580 - RNA, 19 nt, Artificial Sequence
  Description of Artificial Sequence: Synthetic oligonucleotide
  Sense strand starting at position 758 of SEQ ID NO: 588885
gaaugagacugcuuuacag

SEQ ID NO: 896581 - RNA, 19 nt, Artificial Sequence
  Description of Artificial Sequence: Synthetic oligonucleotide
  Antisense strand to SEQ ID NO: 896580
cuguaaagcagucucauuc

SEQ ID NO: 896582 - RNA, 19 nt, Artificial Sequence
  Description of Artificial Sequence: Synthetic oligonucleotide
  Sense strand starting at position 795 of SEQ ID NO: 588885
gaggcacuguuacuucuaa

SEQ ID NO: 896583 - RNA, 19 nt, Artificial Sequence
  Description of Artificial Sequence: Synthetic oligonucleotide
  Antisense strand to SEQ ID NO: 896582
uuagaaguaacagugccuc

SEQ ID NO: 896584 - RNA, 19 nt, Artificial Sequence
  Description of Artificial Sequence: Synthetic oligonucleotide
  Sense strand starting at position 796 of SEQ ID NO: 588885
aggcacuguuacuucuaaa

SEQ ID NO: 896585 - RNA, 19 nt, Artificial Sequence
  Description of Artificial Sequence: Synthetic oligonucleotide
  Antisense strand to SEQ ID NO: 896584
uuuagaaguaacagugccu

SEQ ID NO: 896586 - RNA, 19 nt, Artificial Sequence
  Description of Artificial Sequence: Synthetic oligonucleotide
  Sense strand starting at position 845 of SEQ ID NO: 588885
ggaguaauauuacuuuccu

SEQ ID NO: 896587 - RNA, 19 nt, Artificial Sequence
  Description of Artificial Sequence: Synthetic oligonucleotide
  Antisense strand to SEQ ID NO: 896586
aggaaaguaauauuacucc

SEQ ID NO: 896588 - RNA, 19 nt, Artificial Sequence
  Description of Artificial Sequence: Synthetic oligonucleotide
  Sense strand starting at position 915 of SEQ ID NO: 588885
agagaauaucgggacgucu

SEQ ID NO: 896589 - RNA, 19 nt, Artificial Sequence
  Description of Artificial Sequence: Synthetic oligonucleotide
  Antisense strand to SEQ ID NO: 896588
agacgucccgauauucucu

SEQ ID NO: 896590 - RNA, 19 nt, Artificial Sequence
  Description of Artificial Sequence: Synthetic oligonucleotide
  Sense strand starting at position 986 of SEQ ID NO: 588885
guuuacacuuuaccugaga

SEQ ID NO: 896591 - RNA, 19 nt, Artificial Sequence
  Description of Artificial Sequence: Synthetic oligonucleotide
  Antisense strand to SEQ ID NO: 896590
ucucagguaaaguguaaac

SEQ ID NO: 896592 - RNA, 19 nt, Artificial Sequence
  Description of Artificial Sequence: Synthetic oligonucleotide
  Sense strand starting at position 1682 of SEQ ID NO: 588885
guacuuaaagcugauauua

SEQ ID NO: 896593 - RNA, 19 nt, Artificial Sequence
  Description of Artificial Sequence: Synthetic oligonucleotide
  Antisense strand to SEQ ID NO: 896592
uaauaucagcuuuaaguac

SEQ ID NO: 896594 - RNA, 19 nt, Artificial Sequence
  Description of Artificial Sequence: Synthetic oligonucleotide
  Sense strand starting at position 1692 of SEQ ID NO: 588885
cugauauuagacggucauu

SEQ ID NO: 896595 - RNA, 19 nt, Artificial Sequence
  Description of Artificial Sequence: Synthetic oligonucleotide
  Antisense strand to SEQ ID NO: 896594
aaugaccgucuaauaucag

SEQ ID NO: 896596 - RNA, 19 nt, Artificial Sequence
  Description of Artificial Sequence: Synthetic oligonucleotide
  Sense strand starting at position 1695 of SEQ ID NO: 588885
auauuagacggucauuacu

SEQ ID NO: 896597 - RNA, 19 nt, Artificial Sequence
  Description of Artificial Sequence: Synthetic oligonucleotide
  Antisense strand to SEQ ID NO: 896596
aguaaugaccgucuaauau

SEQ ID NO: 896598 - RNA, 19 nt, Artificial Sequence
  Description of Artificial Sequence: Synthetic oligonucleotide
  Sense strand starting at position 2334 of SEQ ID NO: 588885
ccuacacucgaaggauuaa

SEQ ID NO: 896599 - RNA, 19 nt, Artificial Sequence
  Description of Artificial Sequence: Synthetic oligonucleotide
  Antisense strand to SEQ ID NO: 896598
uuaauccuucgaguguagg

SEQ ID NO: 896600 - RNA, 19 nt, Artificial Sequence
  Description of Artificial Sequence: Synthetic oligonucleotide
  Sense strand starting at position 2643 of SEQ ID NO: 588885
augaguguucucgucgguu

SEQ ID NO: 896601 - RNA, 19 nt, Artificial Sequence
  Description of Artificial Sequence: Synthetic oligonucleotide
  Antisense strand to SEQ ID NO: 896600
aaccgacgagaacacucau

SEQ ID NO: 896602 - RNA, 19 nt, Artificial Sequence
  Description of Artificial Sequence: Synthetic oligonucleotide
  Sense strand starting at position 2846 of SEQ ID NO: 588885
cguagucuaccgagagcug

SEQ ID NO: 896603 - RNA, 19 nt, Artificial Sequence
  Description of Artificial Sequence: Synthetic oligonucleotide
  Antisense strand to SEQ ID NO: 896602
cagcucucgguagacuacg

SEQ ID NO: 896604 - RNA, 19 nt, Artificial Sequence
  Description of Artificial Sequence: Synthetic oligonucleotide
  Sense strand starting at position 3005 of SEQ ID NO: 588885
ucugaauauuaggcuauau

SEQ ID NO: 896605 - RNA, 19 nt, Artificial Sequence
  Description of Artificial Sequence: Synthetic oligonucleotide
  Antisense strand to SEQ ID NO: 896604
auauagccuaauauucaga

SEQ ID NO: 896606 - RNA, 19 nt, Artificial Sequence
  Description of Artificial Sequence: Synthetic oligonucleotide
  Sense strand starting at position 3048 of SEQ ID NO: 588885
guagcaacccuaugaaauc

SEQ ID NO: 896607 - RNA, 19 nt, Artificial Sequence
  Description of Artificial Sequence: Synthetic oligonucleotide
  Antisense strand to SEQ ID NO: 896606
gauuucauaggguugcuac

SEQ ID NO: 896608 - RNA, 19 nt, Artificial Sequence
  Description of Artificial Sequence: Synthetic oligonucleotide
  Sense strand starting at position 3210 of SEQ ID NO: 588885
guauuauuagccgauccua

SEQ ID NO: 896609 - RNA, 19 nt, Artificial Sequence
  Description of Artificial Sequence: Synthetic oligonucleotide
  Antisense strand to SEQ ID NO: 896608
uaggaucggcuaauaauac

SEQ ID NO: 896610 - RNA, 19 nt, Artificial Sequence
  Description of Artificial Sequence: Synthetic oligonucleotide
  Sense strand starting at position 3238 of SEQ ID NO: 588885
uguauuguucuuuaggaag

SEQ ID NO: 896611 - RNA, 19 nt, Artificial Sequence
  Description of Artificial Sequence: Synthetic oligonucleotide
  Antisense strand to SEQ ID NO: 896610
cuuccuaaagaacaauaca

SEQ ID NO: 896612 - RNA, 19 nt, Artificial Sequence
  Description of Artificial Sequence: Synthetic oligonucleotide
  Sense strand starting at position 3303 of SEQ ID NO: 588885
aagaguuaggaagggcuua

SEQ ID NO: 896613 - RNA, 19 nt, Artificial Sequence
  Description of Artificial Sequence: Synthetic oligonucleotide
  Antisense strand to SEQ ID NO: 896612
uaagcccuuccuaacucuu

SEQ ID NO: 896614 - RNA, 19 nt, Artificial Sequence
  Description of Artificial Sequence: Synthetic oligonucleotide
  Sense strand starting at position 3304 of SEQ ID NO: 588885
agaguuaggaagggcuuaa

SEQ ID NO: 896615 - RNA, 19 nt, Artificial Sequence
  Description of Artificial Sequence: Synthetic oligonucleotide
  Antisense strand to SEQ ID NO: 896614
uuaagcccuuccuaacucu

SEQ ID NO: 896616 - RNA, 19 nt, Artificial Sequence
  Description of Artificial Sequence: Synthetic oligonucleotide
  Sense strand starting at position 3388 of SEQ ID NO: 588885
uuggaauggcuugauccuu

SEQ ID NO: 896617 - RNA, 19 nt, Artificial Sequence
  Description of Artificial Sequence: Synthetic oligonucleotide
  Antisense strand to SEQ ID NO: 896616
aaggaucaagccauuccaa

SEQ ID NO: 896618 - RNA, 19 nt, Artificial Sequence
  Description of Artificial Sequence: Synthetic oligonucleotide
  Sense strand starting at position 3655 of SEQ ID NO: 588885
caguucgggaguuaggauu

SEQ ID NO: 896619 - RNA, 19 nt, Artificial Sequence
  Description of Artificial Sequence: Synthetic oligonucleotide
  Antisense strand to SEQ ID NO: 896618
aauccuaacucccgaacug

SEQ ID NO: 896620 - RNA, 19 nt, Artificial Sequence
  Description of Artificial Sequence: Synthetic oligonucleotide
  Sense strand starting at position 3752 of SEQ ID NO: 588885
uggcaaugcagucaucuga

SEQ ID NO: 896621 - RNA, 19 nt, Artificial Sequence
  Description of Artificial Sequence: Synthetic oligonucleotide
  Antisense strand to SEQ ID NO: 896620
ucagaugacugcauugcca

SEQ ID NO: 896622 - RNA, 19 nt, Artificial Sequence
  Description of Artificial Sequence: Synthetic oligonucleotide
  Sense strand starting at position 3763 of SEQ ID NO: 588885
ucaucugaauuggucuuaa

SEQ ID NO: 896623 - RNA, 19 nt, Artificial Sequence
  Description of Artificial Sequence: Synthetic oligonucleotide
  Antisense strand to SEQ ID NO: 896622
uuaagaccaauucagauga

SEQ ID NO: 896624 - RNA, 19 nt, Artificial Sequence
  Description of Artificial Sequence: Synthetic oligonucleotide
  Sense strand starting at position 3832 of SEQ ID NO: 588885
aaauaaguuguauggguuu

SEQ ID NO: 896625 - RNA, 19 nt, Artificial Sequence
  Description of Artificial Sequence: Synthetic oligonucleotide
  Antisense strand to SEQ ID NO: 896624
aaacccauacaacuuauuu

SEQ ID NO: 896626 - RNA, 19 nt, Artificial Sequence
  Description of Artificial Sequence: Synthetic oligonucleotide
  Sense strand starting at position 3858 of SEQ ID NO: 588885
aagaaaggauuccuuuguu

SEQ ID NO: 896627 - RNA, 19 nt, Artificial Sequence
  Description of Artificial Sequence: Synthetic oligonucleotide
  Antisense strand to SEQ ID NO: 896626
aacaaaggaauccuuucuu

SEQ ID NO: 896628 - RNA, 19 nt, Artificial Sequence
  Description of Artificial Sequence: Synthetic oligonucleotide
  Sense strand starting at position 3915 of SEQ ID NO: 588885
uggguagugaccuaacauu

SEQ ID NO: 896629 - RNA, 19 nt, Artificial Sequence
  Description of Artificial Sequence: Synthetic oligonucleotide
  Antisense strand to SEQ ID NO: 896628
aauguuaggucacuaccca

SEQ ID NO: 896630 - RNA, 19 nt, Artificial Sequence
  Description of Artificial Sequence: Synthetic oligonucleotide
  Sense strand starting at position 206 of SEQ ID NO: 588886
caacguaguguccauuaag

SEQ ID NO: 896631 - RNA, 19 nt, Artificial Sequence
  Description of Artificial Sequence: Synthetic oligonucleotide
  Antisense strand to SEQ ID NO: 896630
cuuaauggacacuacguug

SEQ ID NO: 896632 - RNA, 19 nt, Artificial Sequence
  Description of Artificial Sequence: Synthetic oligonucleotide
  Sense strand starting at position 360 of SEQ ID NO: 588886
guuacuuugcaagauauaa

SEQ ID NO: 896633 - RNA, 19 nt, Artificial Sequence
  Description of Artificial Sequence: Synthetic oligonucleotide
  Antisense strand to SEQ ID NO: 896632
uuauaucuugcaaaguaac

SEQ ID NO: 896634 - RNA, 19 nt, Artificial Sequence
  Description of Artificial Sequence: Synthetic oligonucleotide
  Sense strand starting at position 415 of SEQ ID NO: 588886
auccauuaauaggauuuga

SEQ ID NO: 896635 - RNA, 19 nt, Artificial Sequence
  Description of Artificial Sequence: Synthetic oligonucleotide
  Antisense strand to SEQ ID NO: 896634
ucaaauccuauuaauggau

SEQ ID NO: 896636 - RNA, 19 nt, Artificial Sequence
  Description of Artificial Sequence: Synthetic oligonucleotide
  Sense strand starting at position 440 of SEQ ID NO: 588886
aucauuacacaggguugaa

SEQ ID NO: 896637 - RNA, 19 nt, Artificial Sequence
  Description of Artificial Sequence: Synthetic oligonucleotide
  Antisense strand to SEQ ID NO: 896636
uucaacccuguguaaugau

SEQ ID NO: 896638 - RNA, 19 nt, Artificial Sequence
  Description of Artificial Sequence: Synthetic oligonucleotide
  Sense strand starting at position 465 of SEQ ID NO: 588886
cuggaaugagacugcuuua

SEQ ID NO: 896639 - RNA, 19 nt, Artificial Sequence
  Description of Artificial Sequence: Synthetic oligonucleotide
  Antisense strand to SEQ ID NO: 896638
uaaagcagucucauuccag

SEQ ID NO: 896640 - RNA, 19 nt, Artificial Sequence
  Description of Artificial Sequence: Synthetic oligonucleotide
  Sense strand starting at position 468 of SEQ ID NO: 588886
gaaugagacugcuuuacag

SEQ ID NO: 896641 - RNA, 19 nt, Artificial Sequence
  Description of Artificial Sequence: Synthetic oligonucleotide
  Antisense strand to SEQ ID NO: 896640
cuguaaagcagucucauuc

SEQ ID NO: 896642 - RNA, 19 nt, Artificial Sequence
  Description of Artificial Sequence: Synthetic oligonucleotide
  Sense strand starting at position 505 of SEQ ID NO: 588886
gaggcacuguuacuucuaa

SEQ ID NO: 896643 - RNA, 19 nt, Artificial Sequence
  Description of Artificial Sequence: Synthetic oligonucleotide
  Antisense strand to SEQ ID NO: 896642
uuagaaguaacagugccuc

SEQ ID NO: 896644 - RNA, 19 nt, Artificial Sequence
  Description of Artificial Sequence: Synthetic oligonucleotide
  Sense strand starting at position 506 of SEQ ID NO: 588886
aggcacuguuacuucuaaa

SEQ ID NO: 896645 - RNA, 19 nt, Artificial Sequence
  Description of Artificial Sequence: Synthetic oligonucleotide
  Antisense strand to SEQ ID NO: 896644
uuuagaaguaacagugccu

SEQ ID NO: 896646 - RNA, 19 nt, Artificial Sequence
  Description of Artificial Sequence: Synthetic oligonucleotide
  Sense strand starting at position 555 of SEQ ID NO: 588886
ggaguaauauuacuuuccu

SEQ ID NO: 896647 - RNA, 19 nt, Artificial Sequence
  Description of Artificial Sequence: Synthetic oligonucleotide
  Antisense strand to SEQ ID NO: 896646
aggaaaguaauauuacucc

SEQ ID NO: 896648 - RNA, 19 nt, Artificial Sequence
  Description of Artificial Sequence: Synthetic oligonucleotide
  Sense strand starting at position 625 of SEQ ID NO: 588886
agagaauaucgggacgucu

SEQ ID NO: 896649 - RNA, 19 nt, Artificial Sequence
  Description of Artificial Sequence: Synthetic oligonucleotide
  Antisense strand to SEQ ID NO: 896648
agacgucccgauauucucu

SEQ ID NO: 896650 - RNA, 19 nt, Artificial Sequence
  Description of Artificial Sequence: Synthetic oligonucleotide
  Sense strand starting at position 696 of SEQ ID NO: 588886
guuuacacuuuaccugaga

SEQ ID NO: 896651 - RNA, 19 nt, Artificial Sequence
  Description of Artificial Sequence: Synthetic oligonucleotide
  Antisense strand to SEQ ID NO: 896650
ucucagguaaaguguaaac

SEQ ID NO: 896652 - RNA, 19 nt, Artificial Sequence
  Description of Artificial Sequence: Synthetic oligonucleotide
  Sense strand starting at position 1392 of SEQ ID NO: 588886
guacuuaaagcugauauua

SEQ ID NO: 896653 - RNA, 19 nt, Artificial Sequence
  Description of Artificial Sequence: Synthetic oligonucleotide
  Antisense strand to SEQ ID NO: 896652
uaauaucagcuuuaaguac

SEQ ID NO: 896654 - RNA, 19 nt, Artificial Sequence
  Description of Artificial Sequence: Synthetic oligonucleotide
  Sense strand starting at position 1402 of SEQ ID NO: 588886
cugauauuagacggucauu

SEQ ID NO: 896655 - RNA, 19 nt, Artificial Sequence
  Description of Artificial Sequence: Synthetic oligonucleotide
  Antisense strand to SEQ ID NO: 896654
aaugaccgucuaauaucag

SEQ ID NO: 896656 - RNA, 19 nt, Artificial Sequence
  Description of Artificial Sequence: Synthetic oligonucleotide
  Sense strand starting at position 1405 of SEQ ID NO: 588886
auauuagacggucauuacu

SEQ ID NO: 896657 - RNA, 19 nt, Artificial Sequence
  Description of Artificial Sequence: Synthetic oligonucleotide
  Antisense strand to SEQ ID NO: 896656
aguaaugaccgucuaauau

SEQ ID NO: 896658 - RNA, 19 nt, Artificial Sequence
  Description of Artificial Sequence: Synthetic oligonucleotide
  Sense strand starting at position 1418 of SEQ ID NO: 588886
auuacuugucuguaaguuc

SEQ ID NO: 896659 - RNA, 19 nt, Artificial Sequence
  Description of Artificial Sequence: Synthetic oligonucleotide
  Antisense strand to SEQ ID NO: 896658
gaacuuacagacaaguaau

SEQ ID NO: 896660 - RNA, 19 nt, Artificial Sequence
  Description of Artificial Sequence: Synthetic oligonucleotide
  Sense strand starting at position 2044 of SEQ ID NO: 588886
ccuacacucgaaggauuaa

SEQ ID NO: 896661 - RNA, 19 nt, Artificial Sequence
  Description of Artificial Sequence: Synthetic oligonucleotide
  Antisense strand to SEQ ID NO: 896660
uuaauccuucgaguguagg

SEQ ID NO: 896662 - RNA, 19 nt, Artificial Sequence
  Description of Artificial Sequence: Synthetic oligonucleotide
  Sense strand starting at position 2342 of SEQ ID NO: 588886
agaggcauucuaugagugu

SEQ ID NO: 896663 - RNA, 19 nt, Artificial Sequence
  Description of Artificial Sequence: Synthetic oligonucleotide
  Antisense strand to SEQ ID NO: 896662
acacucauagaaugccucu

SEQ ID NO: 896664 - RNA, 19 nt, Artificial Sequence
  Description of Artificial Sequence: Synthetic oligonucleotide
  Sense strand starting at position 2353 of SEQ ID NO: 588886
augaguguucucgucgguu

SEQ ID NO: 896665 - RNA, 19 nt, Artificial Sequence
  Description of Artificial Sequence: Synthetic oligonucleotide
  Antisense strand to SEQ ID NO: 896664
aaccgacgagaacacucau

SEQ ID NO: 896666 - RNA, 19 nt, Artificial Sequence
  Description of Artificial Sequence: Synthetic oligonucleotide
  Sense strand starting at position 2556 of SEQ ID NO: 588886
cguagucuaccgagagcug

SEQ ID NO: 896667 - RNA, 19 nt, Artificial Sequence
  Description of Artificial Sequence: Synthetic oligonucleotide
  Antisense strand to SEQ ID NO: 896666
cagcucucgguagacuacg

SEQ ID NO: 896668 - RNA, 19 nt, Artificial Sequence
  Description of Artificial Sequence: Synthetic oligonucleotide
  Sense strand starting at position 2701 of SEQ ID NO: 588886
ucauguuauugaguucuga

SEQ ID NO: 896669 - RNA, 19 nt, Artificial Sequence
  Description of Artificial Sequence: Synthetic oligonucleotide
  Antisense strand to SEQ ID NO: 896668
ucagaacucaauaacauga

SEQ ID NO: 896670 - RNA, 19 nt, Artificial Sequence
  Description of Artificial Sequence: Synthetic oligonucleotide
  Sense strand starting at position 2715 of SEQ ID NO: 588886
ucugaauauuaggcuauau

SEQ ID NO: 896671 - RNA, 19 nt, Artificial Sequence
  Description of Artificial Sequence: Synthetic oligonucleotide
  Antisense strand to SEQ ID NO: 896670
auauagccuaauauucaga

SEQ ID NO: 896672 - RNA, 19 nt, Artificial Sequence
  Description of Artificial Sequence: Synthetic oligonucleotide
  Sense strand starting at position 2758 of SEQ ID NO: 588886
guagcaacccuaugaaauc

SEQ ID NO: 896673 - RNA, 19 nt, Artificial Sequence
  Description of Artificial Sequence: Synthetic oligonucleotide
  Antisense strand to SEQ ID NO: 896672
gauuucauaggguugcuac

SEQ ID NO: 896674 - RNA, 19 nt, Artificial Sequence
  Description of Artificial Sequence: Synthetic oligonucleotide
  Sense strand starting at position 2866 of SEQ ID NO: 588886
ggucuagcuccagauugca

SEQ ID NO: 896675 - RNA, 19 nt, Artificial Sequence
  Description of Artificial Sequence: Synthetic oligonucleotide
  Antisense strand to SEQ ID NO: 896674
ugcaaucuggagcuagacc

SEQ ID NO: 896676 - RNA, 19 nt, Artificial Sequence
  Description of Artificial Sequence: Synthetic oligonucleotide
  Sense strand starting at position 2920 of SEQ ID NO: 588886
guauuauuagccgauccua

SEQ ID NO: 896677 - RNA, 19 nt, Artificial Sequence
  Description of Artificial Sequence: Synthetic oligonucleotide
  Antisense strand to SEQ ID NO: 896676
uaggaucggcuaauaauac

SEQ ID NO: 896678 - RNA, 19 nt, Artificial Sequence
  Description of Artificial Sequence: Synthetic oligonucleotide
  Sense strand starting at position 2946 of SEQ ID NO: 588886
uauguauuguucuuuagga

SEQ ID NO: 896679 - RNA, 19 nt, Artificial Sequence
  Description of Artificial Sequence: Synthetic oligonucleotide
  Antisense strand to SEQ ID NO: 896678
uccuaaagaacaauacaua

SEQ ID NO: 896680 - RNA, 19 nt, Artificial Sequence
  Description of Artificial Sequence: Synthetic oligonucleotide
  Sense strand starting at position 2948 of SEQ ID NO: 588886
uguauuguucuuuaggaag

SEQ ID NO: 896681 - RNA, 19 nt, Artificial Sequence
  Description of Artificial Sequence: Synthetic oligonucleotide
  Antisense strand to SEQ ID NO: 896680
cuuccuaaagaacaauaca

SEQ ID NO: 896682 - RNA, 19 nt, Artificial Sequence
  Description of Artificial Sequence: Synthetic oligonucleotide
  Sense strand starting at position 2999 of SEQ ID NO: 588886
gcacguugauacuuaagag

SEQ ID NO: 896683 - RNA, 19 nt, Artificial Sequence
  Description of Artificial Sequence: Synthetic oligonucleotide
  Antisense strand to SEQ ID NO: 896682
cucuuaaguaucaacgugc

SEQ ID NO: 896684 - RNA, 19 nt, Artificial Sequence
  Description of Artificial Sequence: Synthetic oligonucleotide
  Sense strand starting at position 3013 of SEQ ID NO: 588886
aagaguuaggaagggcuua

SEQ ID NO: 896685 - RNA, 19 nt, Artificial Sequence
  Description of Artificial Sequence: Synthetic oligonucleotide
  Antisense strand to SEQ ID NO: 896684
uaagcccuuccuaacucuu

SEQ ID NO: 896686 - RNA, 19 nt, Artificial Sequence
  Description of Artificial Sequence: Synthetic oligonucleotide
  Sense strand starting at position 3014 of SEQ ID NO: 588886
agaguuaggaagggcuuaa

SEQ ID NO: 896687 - RNA, 19 nt, Artificial Sequence
  Description of Artificial Sequence: Synthetic oligonucleotide
  Antisense strand to SEQ ID NO: 896686
uuaagcccuuccuaacucu

SEQ ID NO: 896688 - RNA, 19 nt, Artificial Sequence
  Description of Artificial Sequence: Synthetic oligonucleotide
  Sense strand starting at position 3098 of SEQ ID NO: 588886
uuggaauggcuugauccuu

SEQ ID NO: 896689 - RNA, 19 nt, Artificial Sequence
  Description of Artificial Sequence: Synthetic oligonucleotide
  Antisense strand to SEQ ID NO: 896688
aaggaucaagccauuccaa

SEQ ID NO: 896690 - RNA, 19 nt, Artificial Sequence
  Description of Artificial Sequence: Synthetic oligonucleotide
  Sense strand starting at position 3365 of SEQ ID NO: 588886
caguucgggaguuaggauu

SEQ ID NO: 896691 - RNA, 19 nt, Artificial Sequence
  Description of Artificial Sequence: Synthetic oligonucleotide
  Antisense strand to SEQ ID NO: 896690
aauccuaacucccgaacug

SEQ ID NO: 896692 - RNA, 19 nt, Artificial Sequence
  Description of Artificial Sequence: Synthetic oligonucleotide
  Sense strand starting at position 3462 of SEQ ID NO: 588886
uggcaaugcagucaucuga

SEQ ID NO: 896693 - RNA, 19 nt, Artificial Sequence
  Description of Artificial Sequence: Synthetic oligonucleotide
  Antisense strand to SEQ ID NO: 896692
ucagaugacugcauugcca

SEQ ID NO: 896694 - RNA, 19 nt, Artificial Sequence
  Description of Artificial Sequence: Synthetic oligonucleotide
  Sense strand starting at position 3473 of SEQ ID NO: 588886
ucaucugaauuggucuuaa

SEQ ID NO: 896695 - RNA, 19 nt, Artificial Sequence
  Description of Artificial Sequence: Synthetic oligonucleotide
  Antisense strand to SEQ ID NO: 896694
uuaagaccaauucagauga

SEQ ID NO: 896696 - RNA, 19 nt, Artificial Sequence
  Description of Artificial Sequence: Synthetic oligonucleotide
  Sense strand starting at position 3542 of SEQ ID NO: 588886
aaauaaguuguauggguuu

SEQ ID NO: 896697 - RNA, 19 nt, Artificial Sequence
  Description of Artificial Sequence: Synthetic oligonucleotide
  Antisense strand to SEQ ID NO: 896696
aaacccauacaacuuauuu

SEQ ID NO: 896698 - RNA, 19 nt, Artificial Sequence
  Description of Artificial Sequence: Synthetic oligonucleotide
  Sense strand starting at position 3568 of SEQ ID NO: 588886
aagaaaggauuccuuuguu

SEQ ID NO: 896699 - RNA, 19 nt, Artificial Sequence
  Description of Artificial Sequence: Synthetic oligonucleotide
  Antisense strand to SEQ ID NO: 896698
aacaaaggaauccuuucuu

SEQ ID NO: 896700 - RNA, 19 nt, Artificial Sequence
  Description of Artificial Sequence: Synthetic oligonucleotide
  Sense strand starting at position 3625 of SEQ ID NO: 588886
uggguagugaccuaacauu

SEQ ID NO: 896701 - RNA, 19 nt, Artificial Sequence
  Description of Artificial Sequence: Synthetic oligonucleotide
  Antisense strand to SEQ ID NO: 896700
aauguuaggucacuaccca

SEQ ID NO: 896702 - RNA, 19 nt, Artificial Sequence
  Description of Artificial Sequence: Synthetic oligonucleotide
  Sense strand starting at position 3853 of SEQ ID NO: 588886
auggaaauauguguuaaga

SEQ ID NO: 896703 - RNA, 19 nt, Artificial Sequence
  Description of Artificial Sequence: Synthetic oligonucleotide
  Antisense strand to SEQ ID NO: 896702
ucuuaacacauauuuccau

SEQ ID NO: 896704 - RNA, 19 nt, Artificial Sequence
  Description of Artificial Sequence: Synthetic oligonucleotide
  Sense strand starting at position 3862 of SEQ ID NO: 588886
uguguuaagacagacuguu

SEQ ID NO: 896705 - RNA, 19 nt, Artificial Sequence
  Description of Artificial Sequence: Synthetic oligonucleotide
  Antisense strand to SEQ ID NO: 896704
aacagucugucuuaacaca

SEQ ID NO: 896706 - RNA, 19 nt, Artificial Sequence
  Description of Artificial Sequence: Synthetic oligonucleotide
  Sense strand starting at position 3958 of SEQ ID NO: 588886
uaaggacuccugggugguu

SEQ ID NO: 896707 - RNA, 19 nt, Artificial Sequence
  Description of Artificial Sequence: Synthetic oligonucleotide
  Antisense strand to SEQ ID NO: 896706
aaccacccaggaguccuua

SEQ ID NO: 896708 - RNA, 19 nt, Artificial Sequence
  Description of Artificial Sequence: Synthetic oligonucleotide
  Sense strand starting at position 3974 of SEQ ID NO: 588886
guuagaagaaugugcagau

SEQ ID NO: 896709 - RNA, 19 nt, Artificial Sequence
  Description of Artificial Sequence: Synthetic oligonucleotide
  Antisense strand to SEQ ID NO: 896708
aucugcacauucuucuaac

SEQ ID NO: 896710 - RNA, 19 nt, Artificial Sequence
  Description of Artificial Sequence: Synthetic oligonucleotide
  Sense strand starting at position 224 of SEQ ID NO: 588887
ccuuucucauacucguaga

SEQ ID NO: 896711 - RNA, 19 nt, Artificial Sequence
  Description of Artificial Sequence: Synthetic oligonucleotide
  Antisense strand to SEQ ID NO: 896710
ucuacgaguaugagaaagg

SEQ ID NO: 896712 - RNA, 19 nt, Artificial Sequence
  Description of Artificial Sequence: Synthetic oligonucleotide
  Sense strand starting at position 277 of SEQ ID NO: 588887
ugauauauguuguuauggu

SEQ ID NO: 896713 - RNA, 19 nt, Artificial Sequence
  Description of Artificial Sequence: Synthetic oligonucleotide
  Antisense strand to SEQ ID NO: 896712
accauaacaacauauauca

SEQ ID NO: 896714 - RNA, 19 nt, Artificial Sequence
  Description of Artificial Sequence: Synthetic oligonucleotide
  Sense strand starting at position 418 of SEQ ID NO: 588887
ucaagauagaguuguuaug

SEQ ID NO: 896715 - RNA, 19 nt, Artificial Sequence
  Description of Artificial Sequence: Synthetic oligonucleotide
  Antisense strand to SEQ ID NO: 896714
cauaacaacucuaucuuga

SEQ ID NO: 896716 - RNA, 19 nt, Artificial Sequence
  Description of Artificial Sequence: Synthetic oligonucleotide
  Sense strand starting at position 420 of SEQ ID NO: 588887
aagauagaguuguuaugaa

SEQ ID NO: 896717 - RNA, 19 nt, Artificial Sequence
  Description of Artificial Sequence: Synthetic oligonucleotide
  Antisense strand to SEQ ID NO: 896716
uucauaacaacucuaucuu

SEQ ID NO: 896718 - RNA, 19 nt, Artificial Sequence
  Description of Artificial Sequence: Synthetic oligonucleotide
  Sense strand starting at position 443 of SEQ ID NO: 588887
gaaugagugcacuauguac

SEQ ID NO: 896719 - RNA, 19 nt, Artificial Sequence
  Description of Artificial Sequence: Synthetic oligonucleotide
  Antisense strand to SEQ ID NO: 896718
guacauagugcacucauuc

SEQ ID NO: 896720 - RNA, 19 nt, Artificial Sequence
  Description of Artificial Sequence: Synthetic oligonucleotide
  Sense strand starting at position 490 of SEQ ID NO: 588887
aagguaguauuguuauuac

SEQ ID NO: 896721 - RNA, 19 nt, Artificial Sequence
  Description of Artificial Sequence: Synthetic oligonucleotide
  Antisense strand to SEQ ID NO: 896720
guaauaacaauacuaccuu

SEQ ID NO: 896722 - RNA, 19 nt, Artificial Sequence
  Description of Artificial Sequence: Synthetic oligonucleotide
  Sense strand starting at position 511 of SEQ ID NO: 588887
uucuguuauccuuaugcca

SEQ ID NO: 896723 - RNA, 19 nt, Artificial Sequence
  Description of Artificial Sequence: Synthetic oligonucleotide
  Antisense strand to SEQ ID NO: 896722
uggcauaaggauaacagaa

SEQ ID NO: 896724 - RNA, 19 nt, Artificial Sequence
  Description of Artificial Sequence: Synthetic oligonucleotide
  Sense strand starting at position 824 of SEQ ID NO: 588887
guaugacacuccgucucaa

SEQ ID NO: 896725 - RNA, 19 nt, Artificial Sequence
  Description of Artificial Sequence: Synthetic oligonucleotide
  Antisense strand to SEQ ID NO: 896724
uugagacggagugucauac

SEQ ID NO: 896726 - RNA, 19 nt, Artificial Sequence
  Description of Artificial Sequence: Synthetic oligonucleotide
  Sense strand starting at position 905 of SEQ ID NO: 588887
ccagaagaaucgcuugaaa

SEQ ID NO: 896727 - RNA, 19 nt, Artificial Sequence
  Description of Artificial Sequence: Synthetic oligonucleotide
  Antisense strand to SEQ ID NO: 896726
uuucaagcgauucuucugg

SEQ ID NO: 896728 - RNA, 19 nt, Artificial Sequence
  Description of Artificial Sequence: Synthetic oligonucleotide
  Sense strand starting at position 1108 of SEQ ID NO: 588887
gguaacuaguugucugaag

SEQ ID NO: 896729 - RNA, 19 nt, Artificial Sequence
  Description of Artificial Sequence: Synthetic oligonucleotide
  Antisense strand to SEQ ID NO: 896728
cuucagacaacuaguuacc

SEQ ID NO: 896730 - RNA, 19 nt, Artificial Sequence
  Description of Artificial Sequence: Synthetic oligonucleotide
  Sense strand starting at position 1191 of SEQ ID NO: 588887
aacaauugccaguaagugu

SEQ ID NO: 896731 - RNA, 19 nt, Artificial Sequence
  Description of Artificial Sequence: Synthetic oligonucleotide
  Antisense strand to SEQ ID NO: 896730
acacuuacuggcaauuguu

SEQ ID NO: 896732 - RNA, 19 nt, Artificial Sequence
  Description of Artificial Sequence: Synthetic oligonucleotide
  Sense strand starting at position 1198 of SEQ ID NO: 588887
gccaguaaguguuuaauuu

SEQ ID NO: 896733 - RNA, 19 nt, Artificial Sequence
  Description of Artificial Sequence: Synthetic oligonucleotide
  Antisense strand to SEQ ID NO: 896732
aaauuaaacacuuacuggc

SEQ ID NO: 896734 - RNA, 19 nt, Artificial Sequence
  Description of Artificial Sequence: Synthetic oligonucleotide
  Sense strand starting at position 1276 of SEQ ID NO: 588887
gcaaaugccuacccuaaga

SEQ ID NO: 896735 - RNA, 19 nt, Artificial Sequence
  Description of Artificial Sequence: Synthetic oligonucleotide
  Antisense strand to SEQ ID NO: 896734
ucuuaggguaggcauuugc

SEQ ID NO: 896736 - RNA, 19 nt, Artificial Sequence
  Description of Artificial Sequence: Synthetic oligonucleotide
  Sense strand starting at position 1289 of SEQ ID NO: 588887
cuaagaauccgccacagca

SEQ ID NO: 896737 - RNA, 19 nt, Artificial Sequence
  Description of Artificial Sequence: Synthetic oligonucleotide
  Antisense strand to SEQ ID NO: 896736
ugcuguggcggauucuuag

SEQ ID NO: 896738 - RNA, 19 nt, Artificial Sequence
  Description of Artificial Sequence: Synthetic oligonucleotide
  Sense strand starting at position 1698 of SEQ ID NO: 588887
acaggaaguucuccaucga

SEQ ID NO: 896739 - RNA, 19 nt, Artificial Sequence
  Description of Artificial Sequence: Synthetic oligonucleotide
  Antisense strand to SEQ ID NO: 896738
ucgauggagaacuuccugu

SEQ ID NO: 896740 - RNA, 19 nt, Artificial Sequence
  Description of Artificial Sequence: Synthetic oligonucleotide
  Sense strand starting at position 2169 of SEQ ID NO: 588887
guuucuucuccguauauuu

SEQ ID NO: 896741 - RNA, 19 nt, Artificial Sequence
  Description of Artificial Sequence: Synthetic oligonucleotide
  Antisense strand to SEQ ID NO: 896740
aaauauacggagaagaaac

SEQ ID NO: 896742 - RNA, 19 nt, Artificial Sequence
  Description of Artificial Sequence: Synthetic oligonucleotide
  Sense strand starting at position 2179 of SEQ ID NO: 588887
cguauauuucggcauucag

SEQ ID NO: 896743 - RNA, 19 nt, Artificial Sequence
  Description of Artificial Sequence: Synthetic oligonucleotide
  Antisense strand to SEQ ID NO: 896742
cugaaugccgaaauauacg

SEQ ID NO: 896744 - RNA, 19 nt, Artificial Sequence
  Description of Artificial Sequence: Synthetic oligonucleotide
  Sense strand starting at position 2523 of SEQ ID NO: 588887
ucgugcuaggcguucucaa

SEQ ID NO: 896745 - RNA, 19 nt, Artificial Sequence
  Description of Artificial Sequence: Synthetic oligonucleotide
  Antisense strand to SEQ ID NO: 896744
uugagaacgccuagcacga

SEQ ID NO: 896746 - RNA, 19 nt, Artificial Sequence
  Description of Artificial Sequence: Synthetic oligonucleotide
  Sense strand starting at position 2524 of SEQ ID NO: 588887
cgugcuaggcguucucaaa

SEQ ID NO: 896747 - RNA, 19 nt, Artificial Sequence
  Description of Artificial Sequence: Synthetic oligonucleotide
  Antisense strand to SEQ ID NO: 896746
uuugagaacgccuagcacg

SEQ ID NO: 896748 - RNA, 19 nt, Artificial Sequence
  Description of Artificial Sequence: Synthetic oligonucleotide
  Sense strand starting at position 2525 of SEQ ID NO: 588887
gugcuaggcguucucaaac

SEQ ID NO: 896749 - RNA, 19 nt, Artificial Sequence
  Description of Artificial Sequence: Synthetic oligonucleotide
  Antisense strand to SEQ ID NO: 896748
guuugagaacgccuagcac

SEQ ID NO: 896750 - RNA, 19 nt, Artificial Sequence
  Description of Artificial Sequence: Synthetic oligonucleotide
  Sense strand starting at position 2536 of SEQ ID NO: 588887
ucucaaacucgugaaauga

SEQ ID NO: 896751 - RNA, 19 nt, Artificial Sequence
  Description of Artificial Sequence: Synthetic oligonucleotide
  Antisense strand to SEQ ID NO: 896750
ucauuucacgaguuugaga

SEQ ID NO: 896752 - RNA, 19 nt, Artificial Sequence
  Description of Artificial Sequence: Synthetic oligonucleotide
  Sense strand starting at position 2566 of SEQ ID NO: 588887
agguuaaccucauugcuac

SEQ ID NO: 896753 - RNA, 19 nt, Artificial Sequence
  Description of Artificial Sequence: Synthetic oligonucleotide
  Antisense strand to SEQ ID NO: 896752
guagcaaugagguuaaccu

SEQ ID NO: 896754 - RNA, 19 nt, Artificial Sequence
  Description of Artificial Sequence: Synthetic oligonucleotide
  Sense strand starting at position 2567 of SEQ ID NO: 588887
gguuaaccucauugcuacu

SEQ ID NO: 896755 - RNA, 19 nt, Artificial Sequence
  Description of Artificial Sequence: Synthetic oligonucleotide
  Antisense strand to SEQ ID NO: 896754
aguagcaaugagguuaacc

SEQ ID NO: 896756 - RNA, 19 nt, Artificial Sequence
  Description of Artificial Sequence: Synthetic oligonucleotide
  Sense strand starting at position 2634 of SEQ ID NO: 588887
ucuagaaaucccugagcug

SEQ ID NO: 896757 - RNA, 19 nt, Artificial Sequence
  Description of Artificial Sequence: Synthetic oligonucleotide
  Antisense strand to SEQ ID NO: 896756
cagcucagggauuucuaga

SEQ ID NO: 896758 - RNA, 19 nt, Artificial Sequence
  Description of Artificial Sequence: Synthetic oligonucleotide
  Sense strand starting at position 2637 of SEQ ID NO: 588887
agaaaucccugagcuggaa

SEQ ID NO: 896759 - RNA, 19 nt, Artificial Sequence
  Description of Artificial Sequence: Synthetic oligonucleotide
  Antisense strand to SEQ ID NO: 896758
uuccagcucagggauuucu

SEQ ID NO: 896760 - RNA, 19 nt, Artificial Sequence
  Description of Artificial Sequence: Synthetic oligonucleotide
  Sense strand starting at position 2710 of SEQ ID NO: 588887
uaagcccucucguuaaaga

SEQ ID NO: 896761 - RNA, 19 nt, Artificial Sequence
  Description of Artificial Sequence: Synthetic oligonucleotide
  Antisense strand to SEQ ID NO: 896760
ucuuuaacgagagggcuua

SEQ ID NO: 896762 - RNA, 19 nt, Artificial Sequence
  Description of Artificial Sequence: Synthetic oligonucleotide
  Sense strand starting at position 2884 of SEQ ID NO: 588887
gugaaucaacugugaaauu

SEQ ID NO: 896763 - RNA, 19 nt, Artificial Sequence
  Description of Artificial Sequence: Synthetic oligonucleotide
  Antisense strand to SEQ ID NO: 896762
aauuucacaguugauucac

SEQ ID NO: 896764 - RNA, 19 nt, Artificial Sequence
  Description of Artificial Sequence: Synthetic oligonucleotide
  Sense strand starting at position 2994 of SEQ ID NO: 588887
cugcaaugucugccuuguu

SEQ ID NO: 896765 - RNA, 19 nt, Artificial Sequence
  Description of Artificial Sequence: Synthetic oligonucleotide
  Antisense strand to SEQ ID NO: 896764
aacaaggcagacauugcag

SEQ ID NO: 896766 - RNA, 19 nt, Artificial Sequence
  Description of Artificial Sequence: Synthetic oligonucleotide
  Sense strand starting at position 3089 of SEQ ID NO: 588887
auaguuaucuuccuuggaa

SEQ ID NO: 896767 - RNA, 19 nt, Artificial Sequence
  Description of Artificial Sequence: Synthetic oligonucleotide
  Antisense strand to SEQ ID NO: 896766
uuccaaggaagauaacuau

SEQ ID NO: 896768 - RNA, 19 nt, Artificial Sequence
  Description of Artificial Sequence: Synthetic oligonucleotide
  Sense strand starting at position 3091 of SEQ ID NO: 588887
aguuaucuuccuuggaaug

SEQ ID NO: 896769 - RNA, 19 nt, Artificial Sequence
  Description of Artificial Sequence: Synthetic oligonucleotide
  Antisense strand to SEQ ID NO: 896768
cauuccaaggaagauaacu

SEQ ID NO: 896770 - RNA, 19 nt, Artificial Sequence
  Description of Artificial Sequence: Synthetic oligonucleotide
  Sense strand starting at position 3092 of SEQ ID NO: 588887
guuaucuuccuuggaaugu

SEQ ID NO: 896771 - RNA, 19 nt, Artificial Sequence
  Description of Artificial Sequence: Synthetic oligonucleotide
  Antisense strand to SEQ ID NO: 896770
acauuccaaggaagauaac

SEQ ID NO: 896772 - RNA, 19 nt, Artificial Sequence
  Description of Artificial Sequence: Synthetic oligonucleotide
  Sense strand starting at position 3101 of SEQ ID NO: 588887
cuuggaauguagcuaucua

SEQ ID NO: 896773 - RNA, 19 nt, Artificial Sequence
  Description of Artificial Sequence: Synthetic oligonucleotide
  Antisense strand to SEQ ID NO: 896772
uagauagcuacauuccaag

SEQ ID NO: 896774 - RNA, 19 nt, Artificial Sequence
  Description of Artificial Sequence: Synthetic oligonucleotide
  Sense strand starting at position 3277 of SEQ ID NO: 588887
caagcuuugcguuagaaua

SEQ ID NO: 896775 - RNA, 19 nt, Artificial Sequence
  Description of Artificial Sequence: Synthetic oligonucleotide
  Antisense strand to SEQ ID NO: 896774
uauucuaacgcaaagcuug

SEQ ID NO: 896776 - RNA, 19 nt, Artificial Sequence
  Description of Artificial Sequence: Synthetic oligonucleotide
  Sense strand starting at position 3328 of SEQ ID NO: 588887
acuacuuaaggcugacaca

SEQ ID NO: 896777 - RNA, 19 nt, Artificial Sequence
  Description of Artificial Sequence: Synthetic oligonucleotide
  Antisense strand to SEQ ID NO: 896776
ugugucagccuuaaguagu

SEQ ID NO: 896778 - RNA, 19 nt, Artificial Sequence
  Description of Artificial Sequence: Synthetic oligonucleotide
  Sense strand starting at position 3367 of SEQ ID NO: 588887
cagacugugacagguguua

SEQ ID NO: 896779 - RNA, 19 nt, Artificial Sequence
  Description of Artificial Sequence: Synthetic oligonucleotide
  Antisense strand to SEQ ID NO: 896778
uaacaccugucacagucug

SEQ ID NO: 896780 - RNA, 19 nt, Artificial Sequence
  Description of Artificial Sequence: Synthetic oligonucleotide
  Sense strand starting at position 3440 of SEQ ID NO: 588887
gguggugguguuuaagaua

SEQ ID NO: 896781 - RNA, 19 nt, Artificial Sequence
  Description of Artificial Sequence: Synthetic oligonucleotide
  Antisense strand to SEQ ID NO: 896780
uaucuuaaacaccaccacc

SEQ ID NO: 896782 - RNA, 19 nt, Artificial Sequence
  Description of Artificial Sequence: Synthetic oligonucleotide
  Sense strand starting at position 3600 of SEQ ID NO: 588887
agagcagaaccuuguccau

SEQ ID NO: 896783 - RNA, 19 nt, Artificial Sequence
  Description of Artificial Sequence: Synthetic oligonucleotide
  Antisense strand to SEQ ID NO: 896782
auggacaagguucugcucu

SEQ ID NO: 896784 - RNA, 19 nt, Artificial Sequence
  Description of Artificial Sequence: Synthetic oligonucleotide
  Sense strand starting at position 3607 of SEQ ID NO: 588887
aaccuuguccaucguggaa

SEQ ID NO: 896785 - RNA, 19 nt, Artificial Sequence
  Description of Artificial Sequence: Synthetic oligonucleotide
  Antisense strand to SEQ ID NO: 896784
uuccacgauggacaagguu

SEQ ID NO: 896786 - RNA, 19 nt, Artificial Sequence
  Description of Artificial Sequence: Synthetic oligonucleotide
  Sense strand starting at position 3687 of SEQ ID NO: 588887
ccauguucugacuaaagcu

SEQ ID NO: 896787 - RNA, 19 nt, Artificial Sequence
  Description of Artificial Sequence: Synthetic oligonucleotide
  Antisense strand to SEQ ID NO: 896786
agcuuuagucagaacaugg

SEQ ID NO: 896788 - RNA, 19 nt, Artificial Sequence
  Description of Artificial Sequence: Synthetic oligonucleotide
  Sense strand starting at position 3780 of SEQ ID NO: 588887
gcaguagugccaccucagu

SEQ ID NO: 896789 - RNA, 19 nt, Artificial Sequence
  Description of Artificial Sequence: Synthetic oligonucleotide
  Antisense strand to SEQ ID NO: 896788
acugagguggcacuacugc

SEQ ID NO: 896790 - RNA, 19 nt, Artificial Sequence
  Description of Artificial Sequence: Synthetic oligonucleotide
  Sense strand starting at position 22 of SEQ ID NO: 588888
gagcauguauuccugagga

SEQ ID NO: 896791 - RNA, 19 nt, Artificial Sequence
  Description of Artificial Sequence: Synthetic oligonucleotide
  Antisense strand to SEQ ID NO: 896790
uccucaggaauacaugcuc

SEQ ID NO: 896792 - RNA, 19 nt, Artificial Sequence
  Description of Artificial Sequence: Synthetic oligonucleotide
  Sense strand starting at position 24 of SEQ ID NO: 588888
gcauguauuccugaggaga

SEQ ID NO: 896793 - RNA, 19 nt, Artificial Sequence
  Description of Artificial Sequence: Synthetic oligonucleotide
  Antisense strand to SEQ ID NO: 896792
ucuccucaggaauacaugc

SEQ ID NO: 896794 - RNA, 19 nt, Artificial Sequence
  Description of Artificial Sequence: Synthetic oligonucleotide
  Sense strand starting at position 75 of SEQ ID NO: 588888
gagaaauggucacuugcau

SEQ ID NO: 896795 - RNA, 19 nt, Artificial Sequence
  Description of Artificial Sequence: Synthetic oligonucleotide
  Antisense strand to SEQ ID NO: 896794
augcaagugaccauuucuc

SEQ ID NO: 896796 - RNA, 19 nt, Artificial Sequence
  Description of Artificial Sequence: Synthetic oligonucleotide
  Sense strand starting at position 108 of SEQ ID NO: 588888
agaauaguggcgugauugu

SEQ ID NO: 896797 - RNA, 19 nt, Artificial Sequence
  Description of Artificial Sequence: Synthetic oligonucleotide
  Antisense strand to SEQ ID NO: 896796
acaaucacgccacuauucu

SEQ ID NO: 896798 - RNA, 19 nt, Artificial Sequence
  Description of Artificial Sequence: Synthetic oligonucleotide
  Sense strand starting at position 722 of SEQ ID NO: 588888
uuaugagguaugcagguau

SEQ ID NO: 896799 - RNA, 19 nt, Artificial Sequence
  Description of Artificial Sequence: Synthetic oligonucleotide
  Antisense strand to SEQ ID NO: 896798
auaccugcauaccucauaa

SEQ ID NO: 896800 - RNA, 19 nt, Artificial Sequence
  Description of Artificial Sequence: Synthetic oligonucleotide
  Sense strand starting at position 753 of SEQ ID NO: 588888
cccuguuauucugcuauga

SEQ ID NO: 896801 - RNA, 19 nt, Artificial Sequence
  Description of Artificial Sequence: Synthetic oligonucleotide
  Antisense strand to SEQ ID NO: 896800
ucauagcagaauaacaggg

SEQ ID NO: 896802 - RNA, 19 nt, Artificial Sequence
  Description of Artificial Sequence: Synthetic oligonucleotide
  Sense strand starting at position 757 of SEQ ID NO: 588888
guuauucugcuaugauacu

SEQ ID NO: 896803 - RNA, 19 nt, Artificial Sequence
  Description of Artificial Sequence: Synthetic oligonucleotide
  Antisense strand to SEQ ID NO: 896802
aguaucauagcagaauaac

SEQ ID NO: 896804 - RNA, 19 nt, Artificial Sequence
  Description of Artificial Sequence: Synthetic oligonucleotide
  Sense strand starting at position 920 of SEQ ID NO: 588888
ugaagauagucugggauuu

SEQ ID NO: 896805 - RNA, 19 nt, Artificial Sequence
  Description of Artificial Sequence: Synthetic oligonucleotide
  Antisense strand to SEQ ID NO: 896804
aaaucccagacuaucuuca

SEQ ID NO: 896806 - RNA, 19 nt, Artificial Sequence
  Description of Artificial Sequence: Synthetic oligonucleotide
  Sense strand starting at position 922 of SEQ ID NO: 588888
aagauagucugggauuuga

SEQ ID NO: 896807 - RNA, 19 nt, Artificial Sequence
  Description of Artificial Sequence: Synthetic oligonucleotide
  Antisense strand to SEQ ID NO: 896806
ucaaaucccagacuaucuu

SEQ ID NO: 896808 - RNA, 19 nt, Artificial Sequence
  Description of Artificial Sequence: Synthetic oligonucleotide
  Sense strand starting at position 1094 of SEQ ID NO: 588888
uauuaaguguuggcaagga

SEQ ID NO: 896809 - RNA, 19 nt, Artificial Sequence
  Description of Artificial Sequence: Synthetic oligonucleotide
  Antisense strand to SEQ ID NO: 896808
uccuugccaacacuuaaua

SEQ ID NO: 896810 - RNA, 19 nt, Artificial Sequence
  Description of Artificial Sequence: Synthetic oligonucleotide
  Sense strand starting at position 1141 of SEQ ID NO: 588888
acacuaaggucuucuuuag

SEQ ID NO: 896811 - RNA, 19 nt, Artificial Sequence
  Description of Artificial Sequence: Synthetic oligonucleotide
  Antisense strand to SEQ ID NO: 896810
cuaaagaagaccuuagugu

SEQ ID NO: 896812 - RNA, 19 nt, Artificial Sequence
  Description of Artificial Sequence: Synthetic oligonucleotide
  Sense strand starting at position 1147 of SEQ ID NO: 588888
aggucuucuuuagucacua

SEQ ID NO: 896813 - RNA, 19 nt, Artificial Sequence
  Description of Artificial Sequence: Synthetic oligonucleotide
  Antisense strand to SEQ ID NO: 896812
uagugacuaaagaagaccu

SEQ ID NO: 896814 - RNA, 19 nt, Artificial Sequence
  Description of Artificial Sequence: Synthetic oligonucleotide
  Sense strand starting at position 1148 of SEQ ID NO: 588888
ggucuucuuuagucacuaa

SEQ ID NO: 896815 - RNA, 19 nt, Artificial Sequence
  Description of Artificial Sequence: Synthetic oligonucleotide
  Antisense strand to SEQ ID NO: 896814
uuagugacuaaagaagacc

SEQ ID NO: 896816 - RNA, 19 nt, Artificial Sequence
  Description of Artificial Sequence: Synthetic oligonucleotide
  Sense strand starting at position 1249 of SEQ ID NO: 588888
ccagaucgggccugauagu

SEQ ID NO: 896817 - RNA, 19 nt, Artificial Sequence
  Description of Artificial Sequence: Synthetic oligonucleotide
  Antisense strand to SEQ ID NO: 896816
acuaucaggcccgaucugg

SEQ ID NO: 896818 - RNA, 19 nt, Artificial Sequence
  Description of Artificial Sequence: Synthetic oligonucleotide
  Sense strand starting at position 1250 of SEQ ID NO: 588888
cagaucgggccugauaguu

SEQ ID NO: 896819 - RNA, 19 nt, Artificial Sequence
  Description of Artificial Sequence: Synthetic oligonucleotide
  Antisense strand to SEQ ID NO: 896818
aacuaucaggcccgaucug

SEQ ID NO: 896820 - RNA, 19 nt, Artificial Sequence
  Description of Artificial Sequence: Synthetic oligonucleotide
  Sense strand starting at position 1322 of SEQ ID NO: 588888
uccucuaagguaugcuaga

SEQ ID NO: 896821 - RNA, 19 nt, Artificial Sequence
  Description of Artificial Sequence: Synthetic oligonucleotide
  Antisense strand to SEQ ID NO: 896820
ucuagcauaccuuagagga

SEQ ID NO: 896822 - RNA, 19 nt, Artificial Sequence
  Description of Artificial Sequence: Synthetic oligonucleotide
  Sense strand starting at position 1393 of SEQ ID NO: 588888
gggugagguuaucaaacag

SEQ ID NO: 896823 - RNA, 19 nt, Artificial Sequence
  Description of Artificial Sequence: Synthetic oligonucleotide
  Antisense strand to SEQ ID NO: 896822
cuguuugauaaccucaccc

SEQ ID NO: 896824 - RNA, 19 nt, Artificial Sequence
  Description of Artificial Sequence: Synthetic oligonucleotide
  Sense strand starting at position 1400 of SEQ ID NO: 588888
guuaucaaacagugacaau

SEQ ID NO: 896825 - RNA, 19 nt, Artificial Sequence
  Description of Artificial Sequence: Synthetic oligonucleotide
  Antisense strand to SEQ ID NO: 896824
auugucacuguuugauaac

SEQ ID NO: 896826 - RNA, 19 nt, Artificial Sequence
  Description of Artificial Sequence: Synthetic oligonucleotide
  Sense strand starting at position 1456 of SEQ ID NO: 588888
gccguauaagcagagacaa

SEQ ID NO: 896827 - RNA, 19 nt, Artificial Sequence
  Description of Artificial Sequence: Synthetic oligonucleotide
  Antisense strand to SEQ ID NO: 896826
uugucucugcuuauacggc

SEQ ID NO: 896828 - RNA, 19 nt, Artificial Sequence
  Description of Artificial Sequence: Synthetic oligonucleotide
  Sense strand starting at position 1614 of SEQ ID NO: 588888
gaacuuaggucugcaaggu

SEQ ID NO: 896829 - RNA, 19 nt, Artificial Sequence
  Description of Artificial Sequence: Synthetic oligonucleotide
  Antisense strand to SEQ ID NO: 896828
accuugcagaccuaaguuc

SEQ ID NO: 896830 - RNA, 19 nt, Artificial Sequence
  Description of Artificial Sequence: Synthetic oligonucleotide
  Sense strand starting at position 1857 of SEQ ID NO: 588888
caggacucacuccgaagau

SEQ ID NO: 896831 - RNA, 19 nt, Artificial Sequence
  Description of Artificial Sequence: Synthetic oligonucleotide
  Antisense strand to SEQ ID NO: 896830
aucuucggagugaguccug

SEQ ID NO: 896832 - RNA, 19 nt, Artificial Sequence
  Description of Artificial Sequence: Synthetic oligonucleotide
  Sense strand starting at position 1875 of SEQ ID NO: 588888
uucgauuucgaucgacaua

SEQ ID NO: 896833 - RNA, 19 nt, Artificial Sequence
  Description of Artificial Sequence: Synthetic oligonucleotide
  Antisense strand to SEQ ID NO: 896832
uaugucgaucgaaaucgaa

SEQ ID NO: 896834 - RNA, 19 nt, Artificial Sequence
  Description of Artificial Sequence: Synthetic oligonucleotide
  Sense strand starting at position 1886 of SEQ ID NO: 588888
ucgacauagccguaucucu

SEQ ID NO: 896835 - RNA, 19 nt, Artificial Sequence
  Description of Artificial Sequence: Synthetic oligonucleotide
  Antisense strand to SEQ ID NO: 896834
agagauacggcuaugucga

SEQ ID NO: 896836 - RNA, 19 nt, Artificial Sequence
  Description of Artificial Sequence: Synthetic oligonucleotide
  Sense strand starting at position 2487 of SEQ ID NO: 588888
cgccauacagcucacaaau

SEQ ID NO: 896837 - RNA, 19 nt, Artificial Sequence
  Description of Artificial Sequence: Synthetic oligonucleotide
  Antisense strand to SEQ ID NO: 896836
auuugugagcuguauggcg

SEQ ID NO: 896838 - RNA, 19 nt, Artificial Sequence
  Description of Artificial Sequence: Synthetic oligonucleotide
  Sense strand starting at position 2683 of SEQ ID NO: 588888
gcaggagaaucguuucacc

SEQ ID NO: 896839 - RNA, 19 nt, Artificial Sequence
  Description of Artificial Sequence: Synthetic oligonucleotide
  Antisense strand to SEQ ID NO: 896838
ggugaaacgauucuccugc

SEQ ID NO: 896840 - RNA, 19 nt, Artificial Sequence
  Description of Artificial Sequence: Synthetic oligonucleotide
  Sense strand starting at position 2798 of SEQ ID NO: 588888
uggugauaagauuguagua

SEQ ID NO: 896841 - RNA, 19 nt, Artificial Sequence
  Description of Artificial Sequence: Synthetic oligonucleotide
  Antisense strand to SEQ ID NO: 896840
uacuacaaucuuaucacca

SEQ ID NO: 896842 - RNA, 19 nt, Artificial Sequence
  Description of Artificial Sequence: Synthetic oligonucleotide
  Sense strand starting at position 3190 of SEQ ID NO: 588888
uguugcuuucguuugaugu

SEQ ID NO: 896843 - RNA, 19 nt, Artificial Sequence
  Description of Artificial Sequence: Synthetic oligonucleotide
  Antisense strand to SEQ ID NO: 896842
acaucaaacgaaagcaaca

SEQ ID NO: 896844 - RNA, 19 nt, Artificial Sequence
  Description of Artificial Sequence: Synthetic oligonucleotide
  Sense strand starting at position 3196 of SEQ ID NO: 588888
uuucguuugauguaauuag

SEQ ID NO: 896845 - RNA, 19 nt, Artificial Sequence
  Description of Artificial Sequence: Synthetic oligonucleotide
  Antisense strand to SEQ ID NO: 896844
cuaauuacaucaaacgaaa

SEQ ID NO: 896846 - RNA, 19 nt, Artificial Sequence
  Description of Artificial Sequence: Synthetic oligonucleotide
  Sense strand starting at position 3200 of SEQ ID NO: 588888
guuugauguaauuaguuga

SEQ ID NO: 896847 - RNA, 19 nt, Artificial Sequence
  Description of Artificial Sequence: Synthetic oligonucleotide
  Antisense strand to SEQ ID NO: 896846
ucaacuaauuacaucaaac

SEQ ID NO: 896848 - RNA, 19 nt, Artificial Sequence
  Description of Artificial Sequence: Synthetic oligonucleotide
  Sense strand starting at position 3222 of SEQ ID NO: 588888
gauuuaagaugaggcugaa

SEQ ID NO: 896849 - RNA, 19 nt, Artificial Sequence
  Description of Artificial Sequence: Synthetic oligonucleotide
  Antisense strand to SEQ ID NO: 896848
uucagccucaucuuaaauc

SEQ ID NO: 896850 - RNA, 19 nt, Artificial Sequence
  Description of Artificial Sequence: Synthetic oligonucleotide
  Sense strand starting at position 3225 of SEQ ID NO: 588888
uuaagaugaggcugaauau

SEQ ID NO: 896851 - RNA, 19 nt, Artificial Sequence
  Description of Artificial Sequence: Synthetic oligonucleotide
  Antisense strand to SEQ ID NO: 896850
auauucagccucaucuuaa

SEQ ID NO: 896852 - RNA, 19 nt, Artificial Sequence
  Description of Artificial Sequence: Synthetic oligonucleotide
  Sense strand starting at position 3244 of SEQ ID NO: 588888
gcaauaccugaugggauau

SEQ ID NO: 896853 - RNA, 19 nt, Artificial Sequence
  Description of Artificial Sequence: Synthetic oligonucleotide
  Antisense strand to SEQ ID NO: 896852
auaucccaucagguauugc

SEQ ID NO: 896854 - RNA, 19 nt, Artificial Sequence
  Description of Artificial Sequence: Synthetic oligonucleotide
  Sense strand starting at position 3254 of SEQ ID NO: 588888
augggauauuaauacauuc

SEQ ID NO: 896855 - RNA, 19 nt, Artificial Sequence
  Description of Artificial Sequence: Synthetic oligonucleotide
  Antisense strand to SEQ ID NO: 896854
gaauguauuaauaucccau

SEQ ID NO: 896856 - RNA, 19 nt, Artificial Sequence
  Description of Artificial Sequence: Synthetic oligonucleotide
  Sense strand starting at position 3526 of SEQ ID NO: 588888
uuacauuuguagugacaaa

SEQ ID NO: 896857 - RNA, 19 nt, Artificial Sequence
  Description of Artificial Sequence: Synthetic oligonucleotide
  Antisense strand to SEQ ID NO: 896856
uuugucacuacaaauguaa

SEQ ID NO: 896858 - RNA, 19 nt, Artificial Sequence
  Description of Artificial Sequence: Synthetic oligonucleotide
  Sense strand starting at position 3533 of SEQ ID NO: 588888
uguagugacaaaugaaaug

SEQ ID NO: 896859 - RNA, 19 nt, Artificial Sequence
  Description of Artificial Sequence: Synthetic oligonucleotide
  Antisense strand to SEQ ID NO: 896858
cauuucauuugucacuaca

SEQ ID NO: 896860 - RNA, 19 nt, Artificial Sequence
  Description of Artificial Sequence: Synthetic oligonucleotide
  Sense strand starting at position 3552 of SEQ ID NO: 588888
uagagauaucagugaacuu

SEQ ID NO: 896861 - RNA, 19 nt, Artificial Sequence
  Description of Artificial Sequence: Synthetic oligonucleotide
  Antisense strand to SEQ ID NO: 896860
aaguucacugauaucucua

SEQ ID NO: 896862 - RNA, 19 nt, Artificial Sequence
  Description of Artificial Sequence: Synthetic oligonucleotide
  Sense strand starting at position 3630 of SEQ ID NO: 588888
uuugcagcacaguaauaau

SEQ ID NO: 896863 - RNA, 19 nt, Artificial Sequence
  Description of Artificial Sequence: Synthetic oligonucleotide
  Antisense strand to SEQ ID NO: 896862
auuauuacugugcugcaaa

SEQ ID NO: 896864 - RNA, 19 nt, Artificial Sequence
  Description of Artificial Sequence: Synthetic oligonucleotide
  Sense strand starting at position 3795 of SEQ ID NO: 588888
ggcagauaggugugcaucu

SEQ ID NO: 896865 - RNA, 19 nt, Artificial Sequence
  Description of Artificial Sequence: Synthetic oligonucleotide
  Antisense strand to SEQ ID NO: 896864
agaugcacaccuaucugcc

SEQ ID NO: 896866 - RNA, 19 nt, Artificial Sequence
  Description of Artificial Sequence: Synthetic oligonucleotide
  Sense strand starting at position 3955 of SEQ ID NO: 588888
aaauaaaucuguguuccga

SEQ ID NO: 896867 - RNA, 19 nt, Artificial Sequence
  Description of Artificial Sequence: Synthetic oligonucleotide
  Antisense strand to SEQ ID NO: 896866
ucggaacacagauuuauuu

SEQ ID NO: 896868 - RNA, 19 nt, Artificial Sequence
  Description of Artificial Sequence: Synthetic oligonucleotide
  Sense strand starting at position 3957 of SEQ ID NO: 588888
auaaaucuguguuccgaaa

SEQ ID NO: 896869 - RNA, 19 nt, Artificial Sequence
  Description of Artificial Sequence: Synthetic oligonucleotide
  Antisense strand to SEQ ID NO: 896868
uuucggaacacagauuuau

SEQ ID NO: 896870 - RNA, 19 nt, Artificial Sequence
  Description of Artificial Sequence: Synthetic oligonucleotide
  Sense strand starting at position 7 of SEQ ID NO: 588889
guaugaaauaaguggacua

SEQ ID NO: 896871 - RNA, 19 nt, Artificial Sequence
  Description of Artificial Sequence: Synthetic oligonucleotide
  Antisense strand to SEQ ID NO: 896870
uaguccacuuauuucauac

SEQ ID NO: 896872 - RNA, 19 nt, Artificial Sequence
  Description of Artificial Sequence: Synthetic oligonucleotide
  Sense strand starting at position 231 of SEQ ID NO: 588889
cuuauauuguguuugucuu

SEQ ID NO: 896873 - RNA, 19 nt, Artificial Sequence
  Description of Artificial Sequence: Synthetic oligonucleotide
  Antisense strand to SEQ ID NO: 896872
aagacaaacacaauauaag

SEQ ID NO: 896874 - RNA, 19 nt, Artificial Sequence
  Description of Artificial Sequence: Synthetic oligonucleotide
  Sense strand starting at position 463 of SEQ ID NO: 588889
uggacugaauauuauagau

SEQ ID NO: 896875 - RNA, 19 nt, Artificial Sequence
  Description of Artificial Sequence: Synthetic oligonucleotide
  Antisense strand to SEQ ID NO: 896874
aucuauaauauucagucca

SEQ ID NO: 896876 - RNA, 19 nt, Artificial Sequence
  Description of Artificial Sequence: Synthetic oligonucleotide
  Sense strand starting at position 515 of SEQ ID NO: 588889
ccacaauaauuauguagga

SEQ ID NO: 896877 - RNA, 19 nt, Artificial Sequence
  Description of Artificial Sequence: Synthetic oligonucleotide
  Antisense strand to SEQ ID NO: 896876
uccuacauaauuauugugg

SEQ ID NO: 896878 - RNA, 19 nt, Artificial Sequence
  Description of Artificial Sequence: Synthetic oligonucleotide
  Sense strand starting at position 520 of SEQ ID NO: 588889
auaauuauguaggagaaug

SEQ ID NO: 896879 - RNA, 19 nt, Artificial Sequence
  Description of Artificial Sequence: Synthetic oligonucleotide
  Antisense strand to SEQ ID NO: 896878
cauucuccuacauaauuau

SEQ ID NO: 896880 - RNA, 19 nt, Artificial Sequence
  Description of Artificial Sequence: Synthetic oligonucleotide
  Sense strand starting at position 548 of SEQ ID NO: 588889
gaagcuauaugcuuaugua

SEQ ID NO: 896881 - RNA, 19 nt, Artificial Sequence
  Description of Artificial Sequence: Synthetic oligonucleotide
  Antisense strand to SEQ ID NO: 896880
uacauaagcauauagcuuc

SEQ ID NO: 896882 - RNA, 19 nt, Artificial Sequence
  Description of Artificial Sequence: Synthetic oligonucleotide
  Sense strand starting at position 560 of SEQ ID NO: 588889
uuauguauuuacggguaaa

SEQ ID NO: 896883 - RNA, 19 nt, Artificial Sequence
  Description of Artificial Sequence: Synthetic oligonucleotide
  Antisense strand to SEQ ID NO: 896882
uuuacccguaaauacauaa

SEQ ID NO: 896884 - RNA, 19 nt, Artificial Sequence
  Description of Artificial Sequence: Synthetic oligonucleotide
  Sense strand starting at position 863 of SEQ ID NO: 588889
ucaguuuaucaaggcuaaa

SEQ ID NO: 896885 - RNA, 19 nt, Artificial Sequence
  Description of Artificial Sequence: Synthetic oligonucleotide
  Antisense strand to SEQ ID NO: 896884
uuuagccuugauaaacuga

SEQ ID NO: 896886 - RNA, 19 nt, Artificial Sequence
  Description of Artificial Sequence: Synthetic oligonucleotide
  Sense strand starting at position 920 of SEQ ID NO: 588889
ucugguucacagcgaguua

SEQ ID NO: 896887 - RNA, 19 nt, Artificial Sequence
  Description of Artificial Sequence: Synthetic oligonucleotide
  Antisense strand to SEQ ID NO: 896886
uaacucgcugugaaccaga

SEQ ID NO: 896888 - RNA, 19 nt, Artificial Sequence
  Description of Artificial Sequence: Synthetic oligonucleotide
  Sense strand starting at position 1018 of SEQ ID NO: 588889
gacaacgauuucugugauu

SEQ ID NO: 896889 - RNA, 19 nt, Artificial Sequence
  Description of Artificial Sequence: Synthetic oligonucleotide
  Antisense strand to SEQ ID NO: 896888
aaucacagaaaucguuguc

SEQ ID NO: 896890 - RNA, 19 nt, Artificial Sequence
  Description of Artificial Sequence: Synthetic oligonucleotide
  Sense strand starting at position 1021 of SEQ ID NO: 588889
aacgauuucugugauuaua

SEQ ID NO: 896891 - RNA, 19 nt, Artificial Sequence
  Description of Artificial Sequence: Synthetic oligonucleotide
  Antisense strand to SEQ ID NO: 896890
uauaaucacagaaaucguu

SEQ ID NO: 896892 - RNA, 19 nt, Artificial Sequence
  Description of Artificial Sequence: Synthetic oligonucleotide
  Sense strand starting at position 1071 of SEQ ID NO: 588889
aguacuguuaaauggagaa

SEQ ID NO: 896893 - RNA, 19 nt, Artificial Sequence
  Description of Artificial Sequence: Synthetic oligonucleotide
  Antisense strand to SEQ ID NO: 896892
uucuccauuuaacaguacu

SEQ ID NO: 896894 - RNA, 19 nt, Artificial Sequence
  Description of Artificial Sequence: Synthetic oligonucleotide
  Sense strand starting at position 1244 of SEQ ID NO: 588889
agguuccuccauugucaaa

SEQ ID NO: 896895 - RNA, 19 nt, Artificial Sequence
  Description of Artificial Sequence: Synthetic oligonucleotide
  Antisense strand to SEQ ID NO: 896894
uuugacaauggaggaaccu

SEQ ID NO: 896896 - RNA, 19 nt, Artificial Sequence
  Description of Artificial Sequence: Synthetic oligonucleotide
  Sense strand starting at position 1246 of SEQ ID NO: 588889
guuccuccauugucaaagu

SEQ ID NO: 896897 - RNA, 19 nt, Artificial Sequence
  Description of Artificial Sequence: Synthetic oligonucleotide
  Antisense strand to SEQ ID NO: 896896
acuuugacaauggaggaac

SEQ ID NO: 896898 - RNA, 19 nt, Artificial Sequence
  Description of Artificial Sequence: Synthetic oligonucleotide
  Sense strand starting at position 1255 of SEQ ID NO: 588889
uugucaaagugucugucaa

SEQ ID NO: 896899 - RNA, 19 nt, Artificial Sequence
  Description of Artificial Sequence: Synthetic oligonucleotide
  Antisense strand to SEQ ID NO: 896898
uugacagacacuuugacaa

SEQ ID NO: 896900 - RNA, 19 nt, Artificial Sequence
  Description of Artificial Sequence: Synthetic oligonucleotide
  Sense strand starting at position 1256 of SEQ ID NO: 588889
ugucaaagugucugucaau

SEQ ID NO: 896901 - RNA, 19 nt, Artificial Sequence
  Description of Artificial Sequence: Synthetic oligonucleotide
  Antisense strand to SEQ ID NO: 896900
auugacagacacuuugaca

SEQ ID NO: 896902 - RNA, 19 nt, Artificial Sequence
  Description of Artificial Sequence: Synthetic oligonucleotide
  Sense strand starting at position 1257 of SEQ ID NO: 588889
gucaaagugucugucaaug

SEQ ID NO: 896903 - RNA, 19 nt, Artificial Sequence
  Description of Artificial Sequence: Synthetic oligonucleotide
  Antisense strand to SEQ ID NO: 896902
cauugacagacacuuugac

SEQ ID NO: 896904 - RNA, 19 nt, Artificial Sequence
  Description of Artificial Sequence: Synthetic oligonucleotide
  Sense strand starting at position 1322 of SEQ ID NO: 588889
gcacucuuagaauaagcaa

SEQ ID NO: 896905 - RNA, 19 nt, Artificial Sequence
  Description of Artificial Sequence: Synthetic oligonucleotide
  Antisense strand to SEQ ID NO: 896904
uugcuuauucuaagagugc

SEQ ID NO: 896906 - RNA, 19 nt, Artificial Sequence
  Description of Artificial Sequence: Synthetic oligonucleotide
  Sense strand starting at position 1457 of SEQ ID NO: 588889
agcuuuaaaggguaauacu

SEQ ID NO: 896907 - RNA, 19 nt, Artificial Sequence
  Description of Artificial Sequence: Synthetic oligonucleotide
  Antisense strand to SEQ ID NO: 896906
aguauuacccuuuaaagcu

SEQ ID NO: 896908 - RNA, 19 nt, Artificial Sequence
  Description of Artificial Sequence: Synthetic oligonucleotide
  Sense strand starting at position 1499 of SEQ ID NO: 588889
gcccuucucagggaugagu

SEQ ID NO: 896909 - RNA, 19 nt, Artificial Sequence
  Description of Artificial Sequence: Synthetic oligonucleotide
  Antisense strand to SEQ ID NO: 896908
acucaucccugagaagggc

SEQ ID NO: 896910 - RNA, 19 nt, Artificial Sequence
  Description of Artificial Sequence: Synthetic oligonucleotide
  Sense strand starting at position 1508 of SEQ ID NO: 588889
agggaugagucccagagga

SEQ ID NO: 896911 - RNA, 19 nt, Artificial Sequence
  Description of Artificial Sequence: Synthetic oligonucleotide
  Antisense strand to SEQ ID NO: 896910
uccucugggacucaucccu

SEQ ID NO: 896912 - RNA, 19 nt, Artificial Sequence
  Description of Artificial Sequence: Synthetic oligonucleotide
  Sense strand starting at position 2311 of SEQ ID NO: 588889
gcugccugauugcuuuaga

SEQ ID NO: 896913 - RNA, 19 nt, Artificial Sequence
  Description of Artificial Sequence: Synthetic oligonucleotide
  Antisense strand to SEQ ID NO: 896912
ucuaaagcaaucaggcagc

SEQ ID NO: 896914 - RNA, 19 nt, Artificial Sequence
  Description of Artificial Sequence: Synthetic oligonucleotide
  Sense strand starting at position 2312 of SEQ ID NO: 588889
cugccugauugcuuuagag

SEQ ID NO: 896915 - RNA, 19 nt, Artificial Sequence
  Description of Artificial Sequence: Synthetic oligonucleotide
  Antisense strand to SEQ ID NO: 896914
cucuaaagcaaucaggcag

SEQ ID NO: 896916 - RNA, 19 nt, Artificial Sequence
  Description of Artificial Sequence: Synthetic oligonucleotide
  Sense strand starting at position 2321 of SEQ ID NO: 588889
ugcuuuagagccuaagaaa

SEQ ID NO: 896917 - RNA, 19 nt, Artificial Sequence
  Description of Artificial Sequence: Synthetic oligonucleotide
  Antisense strand to SEQ ID NO: 896916
uuucuuaggcucuaaagca

SEQ ID NO: 896918 - RNA, 19 nt, Artificial Sequence
  Description of Artificial Sequence: Synthetic oligonucleotide
  Sense strand starting at position 2442 of SEQ ID NO: 588889
guuucagagcgucugugua

SEQ ID NO: 896919 - RNA, 19 nt, Artificial Sequence
  Description of Artificial Sequence: Synthetic oligonucleotide
  Antisense strand to SEQ ID NO: 896918
uacacagacgcucugaaac

SEQ ID NO: 896920 - RNA, 19 nt, Artificial Sequence
  Description of Artificial Sequence: Synthetic oligonucleotide
  Sense strand starting at position 2513 of SEQ ID NO: 588889
acaacaaccuuuccggaua

SEQ ID NO: 896921 - RNA, 19 nt, Artificial Sequence
  Description of Artificial Sequence: Synthetic oligonucleotide
  Antisense strand to SEQ ID NO: 896920
uauccggaaagguuguugu

SEQ ID NO: 896922 - RNA, 19 nt, Artificial Sequence
  Description of Artificial Sequence: Synthetic oligonucleotide
  Sense strand starting at position 2548 of SEQ ID NO: 588889
guugcuguugaggaaggau

SEQ ID NO: 896923 - RNA, 19 nt, Artificial Sequence
  Description of Artificial Sequence: Synthetic oligonucleotide
  Antisense strand to SEQ ID NO: 896922
auccuuccucaacagcaac

SEQ ID NO: 896924 - RNA, 19 nt, Artificial Sequence
  Description of Artificial Sequence: Synthetic oligonucleotide
  Sense strand starting at position 2761 of SEQ ID NO: 588889
accacuauuugagagcauu

SEQ ID NO: 896925 - RNA, 19 nt, Artificial Sequence
  Description of Artificial Sequence: Synthetic oligonucleotide
  Antisense strand to SEQ ID NO: 896924
aaugcucucaaauaguggu

SEQ ID NO: 896926 - RNA, 19 nt, Artificial Sequence
  Description of Artificial Sequence: Synthetic oligonucleotide
  Sense strand starting at position 2863 of SEQ ID NO: 588889
ccuacuuugucucucuaga

SEQ ID NO: 896927 - RNA, 19 nt, Artificial Sequence
  Description of Artificial Sequence: Synthetic oligonucleotide
  Antisense strand to SEQ ID NO: 896926
ucuagagagacaaaguagg

SEQ ID NO: 896928 - RNA, 19 nt, Artificial Sequence
  Description of Artificial Sequence: Synthetic oligonucleotide
  Sense strand starting at position 2944 of SEQ ID NO: 588889
guuuacaagguuuguuaca

SEQ ID NO: 896929 - RNA, 19 nt, Artificial Sequence
  Description of Artificial Sequence: Synthetic oligonucleotide
  Antisense strand to SEQ ID NO: 896928
uguaacaaaccuuguaaac

SEQ ID NO: 896930 - RNA, 19 nt, Artificial Sequence
  Description of Artificial Sequence: Synthetic oligonucleotide
  Sense strand starting at position 2951 of SEQ ID NO: 588889
agguuuguuacagguaguu

SEQ ID NO: 896931 - RNA, 19 nt, Artificial Sequence
  Description of Artificial Sequence: Synthetic oligonucleotide
  Antisense strand to SEQ ID NO: 896930
aacuaccuguaacaaaccu

SEQ ID NO: 896932 - RNA, 19 nt, Artificial Sequence
  Description of Artificial Sequence: Synthetic oligonucleotide
  Sense strand starting at position 3021 of SEQ ID NO: 588889
ggugaugcuuaggcauuua

SEQ ID NO: 896933 - RNA, 19 nt, Artificial Sequence
  Description of Artificial Sequence: Synthetic oligonucleotide
  Antisense strand to SEQ ID NO: 896932
uaaaugccuaagcaucacc

SEQ ID NO: 896934 - RNA, 19 nt, Artificial Sequence
  Description of Artificial Sequence: Synthetic oligonucleotide
  Sense strand starting at position 3115 of SEQ ID NO: 588889
gcacuaaagugcucguuga

SEQ ID NO: 896935 - RNA, 19 nt, Artificial Sequence
  Description of Artificial Sequence: Synthetic oligonucleotide
  Antisense strand to SEQ ID NO: 896934
ucaacgagcacuuuagugc

SEQ ID NO: 896936 - RNA, 19 nt, Artificial Sequence
  Description of Artificial Sequence: Synthetic oligonucleotide
  Sense strand starting at position 3116 of SEQ ID NO: 588889
cacuaaagugcucguugaa

SEQ ID NO: 896937 - RNA, 19 nt, Artificial Sequence
  Description of Artificial Sequence: Synthetic oligonucleotide
  Antisense strand to SEQ ID NO: 896936
uucaacgagcacuuuagug

SEQ ID NO: 896938 - RNA, 19 nt, Artificial Sequence
  Description of Artificial Sequence: Synthetic oligonucleotide
  Sense strand starting at position 3359 of SEQ ID NO: 588889
uguaaaguccuaggaucga

SEQ ID NO: 896939 - RNA, 19 nt, Artificial Sequence
  Description of Artificial Sequence: Synthetic oligonucleotide
  Antisense strand to SEQ ID NO: 896938
ucgauccuaggacuuuaca

SEQ ID NO: 896940 - RNA, 19 nt, Artificial Sequence
  Description of Artificial Sequence: Synthetic oligonucleotide
  Sense strand starting at position 3377 of SEQ ID NO: 588889
aggucaauaucacaguuga

SEQ ID NO: 896941 - RNA, 19 nt, Artificial Sequence
  Description of Artificial Sequence: Synthetic oligonucleotide
  Antisense strand to SEQ ID NO: 896940
ucaacugugauauugaccu

SEQ ID NO: 896942 - RNA, 19 nt, Artificial Sequence
  Description of Artificial Sequence: Synthetic oligonucleotide
  Sense strand starting at position 3624 of SEQ ID NO: 588889
uuuguaguaugugucagua

SEQ ID NO: 896943 - RNA, 19 nt, Artificial Sequence
  Description of Artificial Sequence: Synthetic oligonucleotide
  Antisense strand to SEQ ID NO: 896942
uacugacacauacuacaaa

SEQ ID NO: 896944 - RNA, 19 nt, Artificial Sequence
  Description of Artificial Sequence: Synthetic oligonucleotide
  Sense strand starting at position 3782 of SEQ ID NO: 588889
gcaugugcccaguaguaua

SEQ ID NO: 896945 - RNA, 19 nt, Artificial Sequence
  Description of Artificial Sequence: Synthetic oligonucleotide
  Antisense strand to SEQ ID NO: 896944
uauacuacugggcacaugc

SEQ ID NO: 896946 - RNA, 19 nt, Artificial Sequence
  Description of Artificial Sequence: Synthetic oligonucleotide
  Sense strand starting at position 3865 of SEQ ID NO: 588889
acaguauucccagguugca

SEQ ID NO: 896947 - RNA, 19 nt, Artificial Sequence
  Description of Artificial Sequence: Synthetic oligonucleotide
  Antisense strand to SEQ ID NO: 896946
ugcaaccugggaauacugu

SEQ ID NO: 896948 - RNA, 19 nt, Artificial Sequence
  Description of Artificial Sequence: Synthetic oligonucleotide
  Sense strand starting at position 3939 of SEQ ID NO: 588889
agaagagcaucugucaauu

SEQ ID NO: 896949 - RNA, 19 nt, Artificial Sequence
  Description of Artificial Sequence: Synthetic oligonucleotide
  Antisense strand to SEQ ID NO: 896948
aauugacagaugcucuucu

SEQ ID NO: 896950 - RNA, 19 nt, Artificial Sequence
  Description of Artificial Sequence: Synthetic oligonucleotide
  Sense strand starting at position 138 of SEQ ID NO: 588890
ccagcuaauuucuguauag

SEQ ID NO: 896951 - RNA, 19 nt, Artificial Sequence
  Description of Artificial Sequence: Synthetic oligonucleotide
  Antisense strand to SEQ ID NO: 896950
cuauacagaaauuagcugg

SEQ ID NO: 896952 - RNA, 19 nt, Artificial Sequence
  Description of Artificial Sequence: Synthetic oligonucleotide
  Sense strand starting at position 150 of SEQ ID NO: 588890
uguauagcugcucguguua

SEQ ID NO: 896953 - RNA, 19 nt, Artificial Sequence
  Description of Artificial Sequence: Synthetic oligonucleotide
  Antisense strand to SEQ ID NO: 896952
uaacacgagcagcuauaca

SEQ ID NO: 896954 - RNA, 19 nt, Artificial Sequence
  Description of Artificial Sequence: Synthetic oligonucleotide
  Sense strand starting at position 153 of SEQ ID NO: 588890
auagcugcucguguuaacu

SEQ ID NO: 896955 - RNA, 19 nt, Artificial Sequence
  Description of Artificial Sequence: Synthetic oligonucleotide
  Antisense strand to SEQ ID NO: 896954
aguuaacacgagcagcuau

SEQ ID NO: 896956 - RNA, 19 nt, Artificial Sequence
  Description of Artificial Sequence: Synthetic oligonucleotide
  Sense strand starting at position 169 of SEQ ID NO: 588890
acugacuugugcuguaaac

SEQ ID NO: 896957 - RNA, 19 nt, Artificial Sequence
  Description of Artificial Sequence: Synthetic oligonucleotide
  Antisense strand to SEQ ID NO: 896956
guuuacagcacaagucagu

SEQ ID NO: 896958 - RNA, 19 nt, Artificial Sequence
  Description of Artificial Sequence: Synthetic oligonucleotide
  Sense strand starting at position 171 of SEQ ID NO: 588890
ugacuugugcuguaaacgu

SEQ ID NO: 896959 - RNA, 19 nt, Artificial Sequence
  Description of Artificial Sequence: Synthetic oligonucleotide
  Antisense strand to SEQ ID NO: 896958
acguuuacagcacaaguca

SEQ ID NO: 896960 - RNA, 19 nt, Artificial Sequence
  Description of Artificial Sequence: Synthetic oligonucleotide
  Sense strand starting at position 260 of SEQ ID NO: 588890
cacagcuuuccgcaaguga

SEQ ID NO: 896961 - RNA, 19 nt, Artificial Sequence
  Description of Artificial Sequence: Synthetic oligonucleotide
  Antisense strand to SEQ ID NO: 896960
ucacuugcggaaagcugug

SEQ ID NO: 896962 - RNA, 19 nt, Artificial Sequence
  Description of Artificial Sequence: Synthetic oligonucleotide
  Sense strand starting at position 342 of SEQ ID NO: 588890
ucaccaagcuguuaacagu

SEQ ID NO: 896963 - RNA, 19 nt, Artificial Sequence
  Description of Artificial Sequence: Synthetic oligonucleotide
  Antisense strand to SEQ ID NO: 896962
acuguuaacagcuugguga

SEQ ID NO: 896964 - RNA, 19 nt, Artificial Sequence
  Description of Artificial Sequence: Synthetic oligonucleotide
  Sense strand starting at position 349 of SEQ ID NO: 588890
gcuguuaacagugguuauu

SEQ ID NO: 896965 - RNA, 19 nt, Artificial Sequence
  Description of Artificial Sequence: Synthetic oligonucleotide
  Antisense strand to SEQ ID NO: 896964
aauaaccacuguuaacagc

SEQ ID NO: 896966 - RNA, 19 nt, Artificial Sequence
  Description of Artificial Sequence: Synthetic oligonucleotide
  Sense strand starting at position 518 of SEQ ID NO: 588890
gccagaucaggccaacagu

SEQ ID NO: 896967 - RNA, 19 nt, Artificial Sequence
  Description of Artificial Sequence: Synthetic oligonucleotide
  Antisense strand to SEQ ID NO: 896966
acuguuggccugaucuggc

SEQ ID NO: 896968 - RNA, 19 nt, Artificial Sequence
  Description of Artificial Sequence: Synthetic oligonucleotide
  Sense strand starting at position 577 of SEQ ID NO: 588890
ggcagugaaucugucagaa

SEQ ID NO: 896969 - RNA, 19 nt, Artificial Sequence
  Description of Artificial Sequence: Synthetic oligonucleotide
  Antisense strand to SEQ ID NO: 896968
uucugacagauucacugcc

SEQ ID NO: 896970 - RNA, 19 nt, Artificial Sequence
  Description of Artificial Sequence: Synthetic oligonucleotide
  Sense strand starting at position 579 of SEQ ID NO: 588890
cagugaaucugucagaaac

SEQ ID NO: 896971 - RNA, 19 nt, Artificial Sequence
  Description of Artificial Sequence: Synthetic oligonucleotide
  Antisense strand to SEQ ID NO: 896970
guuucugacagauucacug

SEQ ID NO: 896972 - RNA, 19 nt, Artificial Sequence
  Description of Artificial Sequence: Synthetic oligonucleotide
  Sense strand starting at position 581 of SEQ ID NO: 588890
gugaaucugucagaaacac

SEQ ID NO: 896973 - RNA, 19 nt, Artificial Sequence
  Description of Artificial Sequence: Synthetic oligonucleotide
  Antisense strand to SEQ ID NO: 896972
guguuucugacagauucac

SEQ ID NO: 896974 - RNA, 19 nt, Artificial Sequence
  Description of Artificial Sequence: Synthetic oligonucleotide
  Sense strand starting at position 850 of SEQ ID NO: 588890
ggcacaagcuaucuuuacu

SEQ ID NO: 896975 - RNA, 19 nt, Artificial Sequence
  Description of Artificial Sequence: Synthetic oligonucleotide
  Antisense strand to SEQ ID NO: 896974
aguaaagauagcuugugcc

SEQ ID NO: 896976 - RNA, 19 nt, Artificial Sequence
  Description of Artificial Sequence: Synthetic oligonucleotide
  Sense strand starting at position 853 of SEQ ID NO: 588890
acaagcuaucuuuacugga

SEQ ID NO: 896977 - RNA, 19 nt, Artificial Sequence
  Description of Artificial Sequence: Synthetic oligonucleotide
  Antisense strand to SEQ ID NO: 896976
uccaguaaagauagcuugu

SEQ ID NO: 896978 - RNA, 19 nt, Artificial Sequence
  Description of Artificial Sequence: Synthetic oligonucleotide
  Sense strand starting at position 857 of SEQ ID NO: 588890
gcuaucuuuacuggagaga

SEQ ID NO: 896979 - RNA, 19 nt, Artificial Sequence
  Description of Artificial Sequence: Synthetic oligonucleotide
  Antisense strand to SEQ ID NO: 896978
ucucuccaguaaagauagc

SEQ ID NO: 896980 - RNA, 19 nt, Artificial Sequence
  Description of Artificial Sequence: Synthetic oligonucleotide
  Sense strand starting at position 1553 of SEQ ID NO: 588890
aagcucucuggcuggagua

SEQ ID NO: 896981 - RNA, 19 nt, Artificial Sequence
  Description of Artificial Sequence: Synthetic oligonucleotide
  Antisense strand to SEQ ID NO: 896980
uacuccagccagagagcuu

SEQ ID NO: 896982 - RNA, 19 nt, Artificial Sequence
  Description of Artificial Sequence: Synthetic oligonucleotide
  Sense strand starting at position 1620 of SEQ ID NO: 588890
ccagccaucguuuauuauu

SEQ ID NO: 896983 - RNA, 19 nt, Artificial Sequence
  Description of Artificial Sequence: Synthetic oligonucleotide
  Antisense strand to SEQ ID NO: 896982
aauaauaaacgauggcugg

SEQ ID NO: 896984 - RNA, 19 nt, Artificial Sequence
  Description of Artificial Sequence: Synthetic oligonucleotide
  Sense strand starting at position 1622 of SEQ ID NO: 588890
agccaucguuuauuauuau

SEQ ID NO: 896985 - RNA, 19 nt, Artificial Sequence
  Description of Artificial Sequence: Synthetic oligonucleotide
  Antisense strand to SEQ ID NO: 896984
auaauaauaaacgauggcu

SEQ ID NO: 896986 - RNA, 19 nt, Artificial Sequence
  Description of Artificial Sequence: Synthetic oligonucleotide
  Sense strand starting at position 1623 of SEQ ID NO: 588890
gccaucguuuauuauuauu

SEQ ID NO: 896987 - RNA, 19 nt, Artificial Sequence
  Description of Artificial Sequence: Synthetic oligonucleotide
  Antisense strand to SEQ ID NO: 896986
aauaauaauaaacgauggc

SEQ ID NO: 896988 - RNA, 19 nt, Artificial Sequence
  Description of Artificial Sequence: Synthetic oligonucleotide
  Sense strand starting at position 1689 of SEQ ID NO: 588890
augaacuccugggaucaaa

SEQ ID NO: 896989 - RNA, 19 nt, Artificial Sequence
  Description of Artificial Sequence: Synthetic oligonucleotide
  Antisense strand to SEQ ID NO: 896988
uuugaucccaggaguucau

SEQ ID NO: 896990 - RNA, 19 nt, Artificial Sequence
  Description of Artificial Sequence: Synthetic oligonucleotide
  Sense strand starting at position 1729 of SEQ ID NO: 588890
aggagucccuggguuuaca

SEQ ID NO: 896991 - RNA, 19 nt, Artificial Sequence
  Description of Artificial Sequence: Synthetic oligonucleotide
  Antisense strand to SEQ ID NO: 896990
uguaaacccagggacuccu

SEQ ID NO: 896992 - RNA, 19 nt, Artificial Sequence
  Description of Artificial Sequence: Synthetic oligonucleotide
  Sense strand starting at position 1740 of SEQ ID NO: 588890
gguuuacaggccugagaaa

SEQ ID NO: 896993 - RNA, 19 nt, Artificial Sequence
  Description of Artificial Sequence: Synthetic oligonucleotide
  Antisense strand to SEQ ID NO: 896992
uuucucaggccuguaaacc

SEQ ID NO: 896994 - RNA, 19 nt, Artificial Sequence
  Description of Artificial Sequence: Synthetic oligonucleotide
  Sense strand starting at position 1781 of SEQ ID NO: 588890
ccuaaugugccugagagga

SEQ ID NO: 896995 - RNA, 19 nt, Artificial Sequence
  Description of Artificial Sequence: Synthetic oligonucleotide
  Antisense strand to SEQ ID NO: 896994
uccucucaggcacauuagg

SEQ ID NO: 896996 - RNA, 19 nt, Artificial Sequence
  Description of Artificial Sequence: Synthetic oligonucleotide
  Sense strand starting at position 1881 of SEQ ID NO: 588890
gagacuugauucugagauc

SEQ ID NO: 896997 - RNA, 19 nt, Artificial Sequence
  Description of Artificial Sequence: Synthetic oligonucleotide
  Antisense strand to SEQ ID NO: 896996
gaucucagaaucaagucuc

SEQ ID NO: 896998 - RNA, 19 nt, Artificial Sequence
  Description of Artificial Sequence: Synthetic oligonucleotide
  Sense strand starting at position 1882 of SEQ ID NO: 588890
agacuugauucugagaucu

SEQ ID NO: 896999 - RNA, 19 nt, Artificial Sequence
  Description of Artificial Sequence: Synthetic oligonucleotide
  Antisense strand to SEQ ID NO: 896998
agaucucagaaucaagucu

SEQ ID NO: 897000 - RNA, 19 nt, Artificial Sequence
  Description of Artificial Sequence: Synthetic oligonucleotide
  Sense strand starting at position 1892 of SEQ ID NO: 588890
cugagaucuccacguggga

SEQ ID NO: 897001 - RNA, 19 nt, Artificial Sequence
  Description of Artificial Sequence: Synthetic oligonucleotide
  Antisense strand to SEQ ID NO: 897000
ucccacguggagaucucag

SEQ ID NO: 897002 - RNA, 19 nt, Artificial Sequence
  Description of Artificial Sequence: Synthetic oligonucleotide
  Sense strand starting at position 1947 of SEQ ID NO: 588890
cuugaucuccuguguuauc

SEQ ID NO: 897003 - RNA, 19 nt, Artificial Sequence
  Description of Artificial Sequence: Synthetic oligonucleotide
  Antisense strand to SEQ ID NO: 897002
gauaacacaggagaucaag

SEQ ID NO: 897004 - RNA, 19 nt, Artificial Sequence
  Description of Artificial Sequence: Synthetic oligonucleotide
  Sense strand starting at position 1948 of SEQ ID NO: 588890
uugaucuccuguguuaucu

SEQ ID NO: 897005 - RNA, 19 nt, Artificial Sequence
  Description of Artificial Sequence: Synthetic oligonucleotide
  Antisense strand to SEQ ID NO: 897004
agauaacacaggagaucaa

SEQ ID NO: 897006 - RNA, 19 nt, Artificial Sequence
  Description of Artificial Sequence: Synthetic oligonucleotide
  Sense strand starting at position 1958 of SEQ ID NO: 588890
guguuaucuucucucuuuc

SEQ ID NO: 897007 - RNA, 19 nt, Artificial Sequence
  Description of Artificial Sequence: Synthetic oligonucleotide
  Antisense strand to SEQ ID NO: 897006
gaaagagagaagauaacac

SEQ ID NO: 897008 - RNA, 19 nt, Artificial Sequence
  Description of Artificial Sequence: Synthetic oligonucleotide
  Sense strand starting at position 2453 of SEQ ID NO: 588890
gagggcauuugagaaacgu

SEQ ID NO: 897009 - RNA, 19 nt, Artificial Sequence
  Description of Artificial Sequence: Synthetic oligonucleotide
  Antisense strand to SEQ ID NO: 897008
acguuucucaaaugcccuc

SEQ ID NO: 897010 - RNA, 19 nt, Artificial Sequence
  Description of Artificial Sequence: Synthetic oligonucleotide
  Sense strand starting at position 2549 of SEQ ID NO: 588890
gcuggcuguucucuguaca

SEQ ID NO: 897011 - RNA, 19 nt, Artificial Sequence
  Description of Artificial Sequence: Synthetic oligonucleotide
  Antisense strand to SEQ ID NO: 897010
uguacagagaacagccagc

SEQ ID NO: 897012 - RNA, 19 nt, Artificial Sequence
  Description of Artificial Sequence: Synthetic oligonucleotide
  Sense strand starting at position 2550 of SEQ ID NO: 588890
cuggcuguucucuguacau

SEQ ID NO: 897013 - RNA, 19 nt, Artificial Sequence
  Description of Artificial Sequence: Synthetic oligonucleotide
  Antisense strand to SEQ ID NO: 897012
auguacagagaacagccag

SEQ ID NO: 897014 - RNA, 19 nt, Artificial Sequence
  Description of Artificial Sequence: Synthetic oligonucleotide
  Sense strand starting at position 2604 of SEQ ID NO: 588890
cuaacaaauguuugucaag

SEQ ID NO: 897015 - RNA, 19 nt, Artificial Sequence
  Description of Artificial Sequence: Synthetic oligonucleotide
  Antisense strand to SEQ ID NO: 897014
cuugacaaacauuuguuag

SEQ ID NO: 897016 - RNA, 19 nt, Artificial Sequence
  Description of Artificial Sequence: Synthetic oligonucleotide
  Sense strand starting at position 2607 of SEQ ID NO: 588890
acaaauguuugucaagcuu

SEQ ID NO: 897017 - RNA, 19 nt, Artificial Sequence
  Description of Artificial Sequence: Synthetic oligonucleotide
  Antisense strand to SEQ ID NO: 897016
aagcuugacaaacauuugu

SEQ ID NO: 897018 - RNA, 19 nt, Artificial Sequence
  Description of Artificial Sequence: Synthetic oligonucleotide
  Sense strand starting at position 2690 of SEQ ID NO: 588890
augaaacauuagcagagaa

SEQ ID NO: 897019 - RNA, 19 nt, Artificial Sequence
  Description of Artificial Sequence: Synthetic oligonucleotide
  Antisense strand to SEQ ID NO: 897018
uucucugcuaauguuucau

SEQ ID NO: 897020 - RNA, 19 nt, Artificial Sequence
  Description of Artificial Sequence: Synthetic oligonucleotide
  Sense strand starting at position 2910 of SEQ ID NO: 588890
ccuuguuuaugcccgaaau

SEQ ID NO: 897021 - RNA, 19 nt, Artificial Sequence
  Description of Artificial Sequence: Synthetic oligonucleotide
  Antisense strand to SEQ ID NO: 897020
auuucgggcauaaacaagg

SEQ ID NO: 897022 - RNA, 19 nt, Artificial Sequence
  Description of Artificial Sequence: Synthetic oligonucleotide
  Sense strand starting at position 2911 of SEQ ID NO: 588890
cuuguuuaugcccgaaaug

SEQ ID NO: 897023 - RNA, 19 nt, Artificial Sequence
  Description of Artificial Sequence: Synthetic oligonucleotide
  Antisense strand to SEQ ID NO: 897022
cauuucgggcauaaacaag

SEQ ID NO: 897024 - RNA, 19 nt, Artificial Sequence
  Description of Artificial Sequence: Synthetic oligonucleotide
  Sense strand starting at position 2920 of SEQ ID NO: 588890
gcccgaaaugcuugugaac

SEQ ID NO: 897025 - RNA, 19 nt, Artificial Sequence
  Description of Artificial Sequence: Synthetic oligonucleotide
  Antisense strand to SEQ ID NO: 897024
guucacaagcauuucgggc

SEQ ID NO: 897026 - RNA, 19 nt, Artificial Sequence
  Description of Artificial Sequence: Synthetic oligonucleotide
  Sense strand starting at position 3071 of SEQ ID NO: 588890
cgcucaggugagcaaugau

SEQ ID NO: 897027 - RNA, 19 nt, Artificial Sequence
  Description of Artificial Sequence: Synthetic oligonucleotide
  Antisense strand to SEQ ID NO: 897026
aucauugcucaccugagcg

SEQ ID NO: 897028 - RNA, 19 nt, Artificial Sequence
  Description of Artificial Sequence: Synthetic oligonucleotide
  Sense strand starting at position 3080 of SEQ ID NO: 588890
gagcaaugaucagcaggaa

SEQ ID NO: 897029 - RNA, 19 nt, Artificial Sequence
  Description of Artificial Sequence: Synthetic oligonucleotide
  Antisense strand to SEQ ID NO: 897028
uuccugcugaucauugcuc

SEQ ID NO: 897030 - RNA, 19 nt, Artificial Sequence
  Description of Artificial Sequence: Synthetic oligonucleotide
  Sense strand starting at position 79 of SEQ ID NO: 588891
auuuccaggugauaaguuu

SEQ ID NO: 897031 - RNA, 19 nt, Artificial Sequence
  Description of Artificial Sequence: Synthetic oligonucleotide
  Antisense strand to SEQ ID NO: 897030
aaacuuaucaccuggaaau

SEQ ID NO: 897032 - RNA, 19 nt, Artificial Sequence
  Description of Artificial Sequence: Synthetic oligonucleotide
  Sense strand starting at position 545 of SEQ ID NO: 588891
uguuccuaaugcuuuggaa

SEQ ID NO: 897033 - RNA, 19 nt, Artificial Sequence
  Description of Artificial Sequence: Synthetic oligonucleotide
  Antisense strand to SEQ ID NO: 897032
uuccaaagcauuaggaaca

SEQ ID NO: 897034 - RNA, 19 nt, Artificial Sequence
  Description of Artificial Sequence: Synthetic oligonucleotide
  Sense strand starting at position 547 of SEQ ID NO: 588891
uuccuaaugcuuuggaacu

SEQ ID NO: 897035 - RNA, 19 nt, Artificial Sequence
  Description of Artificial Sequence: Synthetic oligonucleotide
  Antisense strand to SEQ ID NO: 897034
aguuccaaagcauuaggaa

SEQ ID NO: 897036 - RNA, 19 nt, Artificial Sequence
  Description of Artificial Sequence: Synthetic oligonucleotide
  Sense strand starting at position 607 of SEQ ID NO: 588891
agucgcacucucuagugau

SEQ ID NO: 897037 - RNA, 19 nt, Artificial Sequence
  Description of Artificial Sequence: Synthetic oligonucleotide
  Antisense strand to SEQ ID NO: 897036
aucacuagagagugcgacu

SEQ ID NO: 897038 - RNA, 19 nt, Artificial Sequence
  Description of Artificial Sequence: Synthetic oligonucleotide
  Sense strand starting at position 627 of SEQ ID NO: 588891
uuaagugcucagugaccuu

SEQ ID NO: 897039 - RNA, 19 nt, Artificial Sequence
  Description of Artificial Sequence: Synthetic oligonucleotide
  Antisense strand to SEQ ID NO: 897038
aaggucacugagcacuuaa

SEQ ID NO: 897040 - RNA, 19 nt, Artificial Sequence
  Description of Artificial Sequence: Synthetic oligonucleotide
  Sense strand starting at position 836 of SEQ ID NO: 588891
gcaguuagugacuaaguga

SEQ ID NO: 897041 - RNA, 19 nt, Artificial Sequence
  Description of Artificial Sequence: Synthetic oligonucleotide
  Antisense strand to SEQ ID NO: 897040
ucacuuagucacuaacugc

SEQ ID NO: 897042 - RNA, 19 nt, Artificial Sequence
  Description of Artificial Sequence: Synthetic oligonucleotide
  Sense strand starting at position 919 of SEQ ID NO: 588891
gggaggaggucgucccuua

SEQ ID NO: 897043 - RNA, 19 nt, Artificial Sequence
  Description of Artificial Sequence: Synthetic oligonucleotide
  Antisense strand to SEQ ID NO: 897042
uaagggacgaccuccuccc

SEQ ID NO: 897044 - RNA, 19 nt, Artificial Sequence
  Description of Artificial Sequence: Synthetic oligonucleotide
  Sense strand starting at position 1034 of SEQ ID NO: 588891
cgagcuuucuuuccaucaa

SEQ ID NO: 897045 - RNA, 19 nt, Artificial Sequence
  Description of Artificial Sequence: Synthetic oligonucleotide
  Antisense strand to SEQ ID NO: 897044
uugauggaaagaaagcucg

SEQ ID NO: 897046 - RNA, 19 nt, Artificial Sequence
  Description of Artificial Sequence: Synthetic oligonucleotide
  Sense strand starting at position 1237 of SEQ ID NO: 588891
agaagacucucgcuguaag

SEQ ID NO: 897047 - RNA, 19 nt, Artificial Sequence
  Description of Artificial Sequence: Synthetic oligonucleotide
  Antisense strand to SEQ ID NO: 897046
cuuacagcgagagucuucu

SEQ ID NO: 897048 - RNA, 19 nt, Artificial Sequence
  Description of Artificial Sequence: Synthetic oligonucleotide
  Sense strand starting at position 2324 of SEQ ID NO: 588891
ggagcaaaugucuaacgga

SEQ ID NO: 897049 - RNA, 19 nt, Artificial Sequence
  Description of Artificial Sequence: Synthetic oligonucleotide
  Antisense strand to SEQ ID NO: 897048
uccguuagacauuugcucc

SEQ ID NO: 897050 - RNA, 19 nt, Artificial Sequence
  Description of Artificial Sequence: Synthetic oligonucleotide
  Sense strand starting at position 2457 of SEQ ID NO: 588891
agggucuucuggccucuaa

SEQ ID NO: 897051 - RNA, 19 nt, Artificial Sequence
  Description of Artificial Sequence: Synthetic oligonucleotide
  Antisense strand to SEQ ID NO: 897050
uuagaggccagaagacccu

SEQ ID NO: 897052 - RNA, 19 nt, Artificial Sequence
  Description of Artificial Sequence: Synthetic oligonucleotide
  Sense strand starting at position 2492 of SEQ ID NO: 588891
acccuagauagacggaauu

SEQ ID NO: 897053 - RNA, 19 nt, Artificial Sequence
  Description of Artificial Sequence: Synthetic oligonucleotide
  Antisense strand to SEQ ID NO: 897052
aauuccgucuaucuagggu

SEQ ID NO: 897054 - RNA, 19 nt, Artificial Sequence
  Description of Artificial Sequence: Synthetic oligonucleotide
  Sense strand starting at position 2661 of SEQ ID NO: 588891
cugagcuggauuuguguaa

SEQ ID NO: 897055 - RNA, 19 nt, Artificial Sequence
  Description of Artificial Sequence: Synthetic oligonucleotide
  Antisense strand to SEQ ID NO: 897054
uuacacaaauccagcucag

SEQ ID NO: 897056 - RNA, 19 nt, Artificial Sequence
  Description of Artificial Sequence: Synthetic oligonucleotide
  Sense strand starting at position 2742 of SEQ ID NO: 588891
cacacuuuggccgaagaga

SEQ ID NO: 897057 - RNA, 19 nt, Artificial Sequence
  Description of Artificial Sequence: Synthetic oligonucleotide
  Antisense strand to SEQ ID NO: 897056
ucucuucggccaaagugug

SEQ ID NO: 897058 - RNA, 19 nt, Artificial Sequence
  Description of Artificial Sequence: Synthetic oligonucleotide
  Sense strand starting at position 2830 of SEQ ID NO: 588891
agcugauucucagcuuuau

SEQ ID NO: 897059 - RNA, 19 nt, Artificial Sequence
  Description of Artificial Sequence: Synthetic oligonucleotide
  Antisense strand to SEQ ID NO: 897058
auaaagcugagaaucagcu

SEQ ID NO: 897060 - RNA, 19 nt, Artificial Sequence
  Description of Artificial Sequence: Synthetic oligonucleotide
  Sense strand starting at position 2862 of SEQ ID NO: 588891
gcaaauagucaagguguua

SEQ ID NO: 897061 - RNA, 19 nt, Artificial Sequence
  Description of Artificial Sequence: Synthetic oligonucleotide
  Antisense strand to SEQ ID NO: 897060
uaacaccuugacuauuugc

SEQ ID NO: 897062 - RNA, 19 nt, Artificial Sequence
  Description of Artificial Sequence: Synthetic oligonucleotide
  Sense strand starting at position 2929 of SEQ ID NO: 588891
gucccuagaucuucuguuu

SEQ ID NO: 897063 - RNA, 19 nt, Artificial Sequence
  Description of Artificial Sequence: Synthetic oligonucleotide
  Antisense strand to SEQ ID NO: 897062
aaacagaagaucuagggac

SEQ ID NO: 897064 - RNA, 19 nt, Artificial Sequence
  Description of Artificial Sequence: Synthetic oligonucleotide
  Sense strand starting at position 2932 of SEQ ID NO: 588891
ccuagaucuucuguuucca

SEQ ID NO: 897065 - RNA, 19 nt, Artificial Sequence
  Description of Artificial Sequence: Synthetic oligonucleotide
  Antisense strand to SEQ ID NO: 897064
uggaaacagaagaucuagg

SEQ ID NO: 897066 - RNA, 19 nt, Artificial Sequence
  Description of Artificial Sequence: Synthetic oligonucleotide
  Sense strand starting at position 3077 of SEQ ID NO: 588891
ggugaugacagauguugac

SEQ ID NO: 897067 - RNA, 19 nt, Artificial Sequence
  Description of Artificial Sequence: Synthetic oligonucleotide
  Antisense strand to SEQ ID NO: 897066
gucaacaucugucaucacc

SEQ ID NO: 897068 - RNA, 19 nt, Artificial Sequence
  Description of Artificial Sequence: Synthetic oligonucleotide
  Sense strand starting at position 3086 of SEQ ID NO: 588891
agauguugacucugggauu

SEQ ID NO: 897069 - RNA, 19 nt, Artificial Sequence
  Description of Artificial Sequence: Synthetic oligonucleotide
  Antisense strand to SEQ ID NO: 897068
aaucccagagucaacaucu

SEQ ID NO: 897070 - RNA, 19 nt, Artificial Sequence
  Description of Artificial Sequence: Synthetic oligonucleotide
  Sense strand starting at position 3229 of SEQ ID NO: 588891
uaauuuauauaggguugga

SEQ ID NO: 897071 - RNA, 19 nt, Artificial Sequence
  Description of Artificial Sequence: Synthetic oligonucleotide
  Antisense strand to SEQ ID NO: 897070
uccaacccuauauaaauua

SEQ ID NO: 897072 - RNA, 19 nt, Artificial Sequence
  Description of Artificial Sequence: Synthetic oligonucleotide
  Sense strand starting at position 3372 of SEQ ID NO: 588891
uccucuuggaguuggauua

SEQ ID NO: 897073 - RNA, 19 nt, Artificial Sequence
  Description of Artificial Sequence: Synthetic oligonucleotide
  Antisense strand to SEQ ID NO: 897072
uaauccaacuccaagagga

SEQ ID NO: 897074 - RNA, 19 nt, Artificial Sequence
  Description of Artificial Sequence: Synthetic oligonucleotide
  Sense strand starting at position 3373 of SEQ ID NO: 588891
ccucuuggaguuggauuaa

SEQ ID NO: 897075 - RNA, 19 nt, Artificial Sequence
  Description of Artificial Sequence: Synthetic oligonucleotide
  Antisense strand to SEQ ID NO: 897074
uuaauccaacuccaagagg

SEQ ID NO: 897076 - RNA, 19 nt, Artificial Sequence
  Description of Artificial Sequence: Synthetic oligonucleotide
  Sense strand starting at position 3452 of SEQ ID NO: 588891
ucuucugaauuagcaugaa

SEQ ID NO: 897077 - RNA, 19 nt, Artificial Sequence
  Description of Artificial Sequence: Synthetic oligonucleotide
  Antisense strand to SEQ ID NO: 897076
uucaugcuaauucagaaga

SEQ ID NO: 897078 - RNA, 19 nt, Artificial Sequence
  Description of Artificial Sequence: Synthetic oligonucleotide
  Sense strand starting at position 3601 of SEQ ID NO: 588891
uggacauccguauggauua

SEQ ID NO: 897079 - RNA, 19 nt, Artificial Sequence
  Description of Artificial Sequence: Synthetic oligonucleotide
  Antisense strand to SEQ ID NO: 897078
uaauccauacggaugucca

SEQ ID NO: 897080 - RNA, 19 nt, Artificial Sequence
  Description of Artificial Sequence: Synthetic oligonucleotide
  Sense strand starting at position 3606 of SEQ ID NO: 588891
auccguauggauuaagacu

SEQ ID NO: 897081 - RNA, 19 nt, Artificial Sequence
  Description of Artificial Sequence: Synthetic oligonucleotide
  Antisense strand to SEQ ID NO: 897080
agucuuaauccauacggau

SEQ ID NO: 897082 - RNA, 19 nt, Artificial Sequence
  Description of Artificial Sequence: Synthetic oligonucleotide
  Sense strand starting at position 3679 of SEQ ID NO: 588891
ugaauucggcuuugucacu

SEQ ID NO: 897083 - RNA, 19 nt, Artificial Sequence
  Description of Artificial Sequence: Synthetic oligonucleotide
  Antisense strand to SEQ ID NO: 897082
agugacaaagccgaauuca

SEQ ID NO: 897084 - RNA, 19 nt, Artificial Sequence
  Description of Artificial Sequence: Synthetic oligonucleotide
  Sense strand starting at position 3680 of SEQ ID NO: 588891
gaauucggcuuugucacua

SEQ ID NO: 897085 - RNA, 19 nt, Artificial Sequence
  Description of Artificial Sequence: Synthetic oligonucleotide
  Antisense strand to SEQ ID NO: 897084
uagugacaaagccgaauuc

SEQ ID NO: 897086 - RNA, 19 nt, Artificial Sequence
  Description of Artificial Sequence: Synthetic oligonucleotide
  Sense strand starting at position 3684 of SEQ ID NO: 588891
ucggcuuugucacuacaag

SEQ ID NO: 897087 - RNA, 19 nt, Artificial Sequence
  Description of Artificial Sequence: Synthetic oligonucleotide
  Antisense strand to SEQ ID NO: 897086
cuuguagugacaaagccga

SEQ ID NO: 897088 - RNA, 19 nt, Artificial Sequence
  Description of Artificial Sequence: Synthetic oligonucleotide
  Sense strand starting at position 3685 of SEQ ID NO: 588891
cggcuuugucacuacaagu

SEQ ID NO: 897089 - RNA, 19 nt, Artificial Sequence
  Description of Artificial Sequence: Synthetic oligonucleotide
  Antisense strand to SEQ ID NO: 897088
acuuguagugacaaagccg

SEQ ID NO: 897090 - RNA, 19 nt, Artificial Sequence
  Description of Artificial Sequence: Synthetic oligonucleotide
  Sense strand starting at position 3716 of SEQ ID NO: 588891
gcaaguuacuaaccucagu

SEQ ID NO: 897091 - RNA, 19 nt, Artificial Sequence
  Description of Artificial Sequence: Synthetic oligonucleotide
  Antisense strand to SEQ ID NO: 897090
acugagguuaguaacuugc

SEQ ID NO: 897092 - RNA, 19 nt, Artificial Sequence
  Description of Artificial Sequence: Synthetic oligonucleotide
  Sense strand starting at position 3719 of SEQ ID NO: 588891
aguuacuaaccucagugaa

SEQ ID NO: 897093 - RNA, 19 nt, Artificial Sequence
  Description of Artificial Sequence: Synthetic oligonucleotide
  Antisense strand to SEQ ID NO: 897092
uucacugagguuaguaacu

SEQ ID NO: 897094 - RNA, 19 nt, Artificial Sequence
  Description of Artificial Sequence: Synthetic oligonucleotide
  Sense strand starting at position 3796 of SEQ ID NO: 588891
gguugugagaguuauauag

SEQ ID NO: 897095 - RNA, 19 nt, Artificial Sequence
  Description of Artificial Sequence: Synthetic oligonucleotide
  Antisense strand to SEQ ID NO: 897094
cuauauaacucucacaacc

SEQ ID NO: 897096 - RNA, 19 nt, Artificial Sequence
  Description of Artificial Sequence: Synthetic oligonucleotide
  Sense strand starting at position 3800 of SEQ ID NO: 588891
gugagaguuauauagcauu

SEQ ID NO: 897097 - RNA, 19 nt, Artificial Sequence
  Description of Artificial Sequence: Synthetic oligonucleotide
  Antisense strand to SEQ ID NO: 897096
aaugcuauauaacucucac

SEQ ID NO: 897098 - RNA, 19 nt, Artificial Sequence
  Description of Artificial Sequence: Synthetic oligonucleotide
  Sense strand starting at position 3855 of SEQ ID NO: 588891
auaggugcucccuaaaugu

SEQ ID NO: 897099 - RNA, 19 nt, Artificial Sequence
  Description of Artificial Sequence: Synthetic oligonucleotide
  Antisense strand to SEQ ID NO: 897098
acauuuagggagcaccuau

SEQ ID NO: 897100 - RNA, 19 nt, Artificial Sequence
  Description of Artificial Sequence: Synthetic oligonucleotide
  Sense strand starting at position 3891 of SEQ ID NO: 588891
uucccuuucugucagauuu

SEQ ID NO: 897101 - RNA, 19 nt, Artificial Sequence
  Description of Artificial Sequence: Synthetic oligonucleotide
  Antisense strand to SEQ ID NO: 897100
aaaucugacagaaagggaa

SEQ ID NO: 897102 - RNA, 19 nt, Artificial Sequence
  Description of Artificial Sequence: Synthetic oligonucleotide
  Sense strand starting at position 3955 of SEQ ID NO: 588891
augcuuuacuauucugagu

SEQ ID NO: 897103 - RNA, 19 nt, Artificial Sequence
  Description of Artificial Sequence: Synthetic oligonucleotide
  Antisense strand to SEQ ID NO: 897102
acucagaauaguaaagcau

SEQ ID NO: 897104 - RNA, 19 nt, Artificial Sequence
  Description of Artificial Sequence: Synthetic oligonucleotide
  Sense strand starting at position 3960 of SEQ ID NO: 588891
uuacuauucugaguagggu

SEQ ID NO: 897105 - RNA, 19 nt, Artificial Sequence
  Description of Artificial Sequence: Synthetic oligonucleotide
  Antisense strand to SEQ ID NO: 897104
acccuacucagaauaguaa

SEQ ID NO: 897106 - RNA, 19 nt, Artificial Sequence
  Description of Artificial Sequence: Synthetic oligonucleotide
  Sense strand starting at position 3968 of SEQ ID NO: 588891
cugaguagggucugguuga

SEQ ID NO: 897107 - RNA, 19 nt, Artificial Sequence
  Description of Artificial Sequence: Synthetic oligonucleotide
  Antisense strand to SEQ ID NO: 897106
ucaaccagacccuacucag

SEQ ID NO: 897108 - RNA, 19 nt, Artificial Sequence
  Description of Artificial Sequence: Synthetic oligonucleotide
  Sense strand starting at position 3973 of SEQ ID NO: 588891
uagggucugguugaauaua

SEQ ID NO: 897109 - RNA, 19 nt, Artificial Sequence
  Description of Artificial Sequence: Synthetic oligonucleotide
  Antisense strand to SEQ ID NO: 897108
uauauucaaccagacccua

SEQ ID NO: 897110 - RNA, 19 nt, Artificial Sequence
  Description of Artificial Sequence: Synthetic oligonucleotide
  Sense strand starting at position 20 of SEQ ID NO: 588892
gcuugaaucugacucgaca

SEQ ID NO: 897111 - RNA, 19 nt, Artificial Sequence
  Description of Artificial Sequence: Synthetic oligonucleotide
  Antisense strand to SEQ ID NO: 897110
ugucgagucagauucaagc

SEQ ID NO: 897112 - RNA, 19 nt, Artificial Sequence
  Description of Artificial Sequence: Synthetic oligonucleotide
  Sense strand starting at position 287 of SEQ ID NO: 588892
ccugaaucaggcugugcau

SEQ ID NO: 897113 - RNA, 19 nt, Artificial Sequence
  Description of Artificial Sequence: Synthetic oligonucleotide
  Antisense strand to SEQ ID NO: 897112
augcacagccugauucagg

SEQ ID NO: 897114 - RNA, 19 nt, Artificial Sequence
  Description of Artificial Sequence: Synthetic oligonucleotide
  Sense strand starting at position 452 of SEQ ID NO: 588892
uggagacgugcagagaaau

SEQ ID NO: 897115 - RNA, 19 nt, Artificial Sequence
  Description of Artificial Sequence: Synthetic oligonucleotide
  Antisense strand to SEQ ID NO: 897114
auuucucugcacgucucca

SEQ ID NO: 897116 - RNA, 19 nt, Artificial Sequence
  Description of Artificial Sequence: Synthetic oligonucleotide
  Sense strand starting at position 458 of SEQ ID NO: 588892
cgugcagagaaaugaucua

SEQ ID NO: 897117 - RNA, 19 nt, Artificial Sequence
  Description of Artificial Sequence: Synthetic oligonucleotide
  Antisense strand to SEQ ID NO: 897116
uagaucauuucucugcacg

SEQ ID NO: 897118 - RNA, 19 nt, Artificial Sequence
  Description of Artificial Sequence: Synthetic oligonucleotide
  Sense strand starting at position 594 of SEQ ID NO: 588892
gcuugcuccuuuccaggaa

SEQ ID NO: 897119 - RNA, 19 nt, Artificial Sequence
  Description of Artificial Sequence: Synthetic oligonucleotide
  Antisense strand to SEQ ID NO: 897118
uuccuggaaaggagcaagc

SEQ ID NO: 897120 - RNA, 19 nt, Artificial Sequence
  Description of Artificial Sequence: Synthetic oligonucleotide
  Sense strand starting at position 598 of SEQ ID NO: 588892
gcuccuuuccaggaacaga

SEQ ID NO: 897121 - RNA, 19 nt, Artificial Sequence
  Description of Artificial Sequence: Synthetic oligonucleotide
  Antisense strand to SEQ ID NO: 897120
ucuguuccuggaaaggagc

SEQ ID NO: 897122 - RNA, 19 nt, Artificial Sequence
  Description of Artificial Sequence: Synthetic oligonucleotide
  Sense strand starting at position 623 of SEQ ID NO: 588892
acagguaaggcuugaacaa

SEQ ID NO: 897123 - RNA, 19 nt, Artificial Sequence
  Description of Artificial Sequence: Synthetic oligonucleotide
  Antisense strand to SEQ ID NO: 897122
uuguucaagccuuaccugu

SEQ ID NO: 897124 - RNA, 19 nt, Artificial Sequence
  Description of Artificial Sequence: Synthetic oligonucleotide
  Sense strand starting at position 779 of SEQ ID NO: 588892
ggcgucuacccuuacaacu

SEQ ID NO: 897125 - RNA, 19 nt, Artificial Sequence
  Description of Artificial Sequence: Synthetic oligonucleotide
  Antisense strand to SEQ ID NO: 897124
aguuguaaggguagacgcc

SEQ ID NO: 897126 - RNA, 19 nt, Artificial Sequence
  Description of Artificial Sequence: Synthetic oligonucleotide
  Sense strand starting at position 854 of SEQ ID NO: 588892
cagacaucuccaggaccga

SEQ ID NO: 897127 - RNA, 19 nt, Artificial Sequence
  Description of Artificial Sequence: Synthetic oligonucleotide
  Antisense strand to SEQ ID NO: 897126
ucgguccuggagaugucug

SEQ ID NO: 897128 - RNA, 19 nt, Artificial Sequence
  Description of Artificial Sequence: Synthetic oligonucleotide
  Sense strand starting at position 948 of SEQ ID NO: 588892
ccugguuccggucaagaaa

SEQ ID NO: 897129 - RNA, 19 nt, Artificial Sequence
  Description of Artificial Sequence: Synthetic oligonucleotide
  Antisense strand to SEQ ID NO: 897128
uuucuugaccggaaccagg

SEQ ID NO: 897130 - RNA, 19 nt, Artificial Sequence
  Description of Artificial Sequence: Synthetic oligonucleotide
  Sense strand starting at position 1180 of SEQ ID NO: 588892
gcugcuuugcgguguggaa

SEQ ID NO: 897131 - RNA, 19 nt, Artificial Sequence
  Description of Artificial Sequence: Synthetic oligonucleotide
  Antisense strand to SEQ ID NO: 897130
uuccacaccgcaaagcagc

SEQ ID NO: 897132 - RNA, 19 nt, Artificial Sequence
  Description of Artificial Sequence: Synthetic oligonucleotide
  Sense strand starting at position 1313 of SEQ ID NO: 588892
ucugguuuacuuggagaug

SEQ ID NO: 897133 - RNA, 19 nt, Artificial Sequence
  Description of Artificial Sequence: Synthetic oligonucleotide
  Antisense strand to SEQ ID NO: 897132
caucuccaaguaaaccaga

SEQ ID NO: 897134 - RNA, 19 nt, Artificial Sequence
  Description of Artificial Sequence: Synthetic oligonucleotide
  Sense strand starting at position 1314 of SEQ ID NO: 588892
cugguuuacuuggagaugu

SEQ ID NO: 897135 - RNA, 19 nt, Artificial Sequence
  Description of Artificial Sequence: Synthetic oligonucleotide
  Antisense strand to SEQ ID NO: 897134
acaucuccaaguaaaccag

SEQ ID NO: 897136 - RNA, 19 nt, Artificial Sequence
  Description of Artificial Sequence: Synthetic oligonucleotide
  Sense strand starting at position 2357 of SEQ ID NO: 588892
ggcugaguuguuuagccca

SEQ ID NO: 897137 - RNA, 19 nt, Artificial Sequence
  Description of Artificial Sequence: Synthetic oligonucleotide
  Antisense strand to SEQ ID NO: 897136
ugggcuaaacaacucagcc

SEQ ID NO: 897138 - RNA, 19 nt, Artificial Sequence
  Description of Artificial Sequence: Synthetic oligonucleotide
  Sense strand starting at position 3168 of SEQ ID NO: 588892
gagggagguuauguaauau

SEQ ID NO: 897139 - RNA, 19 nt, Artificial Sequence
  Description of Artificial Sequence: Synthetic oligonucleotide
  Antisense strand to SEQ ID NO: 897138
auauuacauaaccucccuc

SEQ ID NO: 897140 - RNA, 19 nt, Artificial Sequence
  Description of Artificial Sequence: Synthetic oligonucleotide
  Sense strand starting at position 3391 of SEQ ID NO: 588892
ucggaaugucaucaaaccu

SEQ ID NO: 897141 - RNA, 19 nt, Artificial Sequence
  Description of Artificial Sequence: Synthetic oligonucleotide
  Antisense strand to SEQ ID NO: 897140
agguuugaugacauuccga

SEQ ID NO: 897142 - RNA, 19 nt, Artificial Sequence
  Description of Artificial Sequence: Synthetic oligonucleotide
  Sense strand starting at position 3424 of SEQ ID NO: 588892
guugacaacacguguaauu

SEQ ID NO: 897143 - RNA, 19 nt, Artificial Sequence
  Description of Artificial Sequence: Synthetic oligonucleotide
  Antisense strand to SEQ ID NO: 897142
aauuacacguguugucaac

SEQ ID NO: 897144 - RNA, 19 nt, Artificial Sequence
  Description of Artificial Sequence: Synthetic oligonucleotide
  Sense strand starting at position 3426 of SEQ ID NO: 588892
ugacaacacguguaauuac

SEQ ID NO: 897145 - RNA, 19 nt, Artificial Sequence
  Description of Artificial Sequence: Synthetic oligonucleotide
  Antisense strand to SEQ ID NO: 897144
guaauuacacguguuguca

SEQ ID NO: 897146 - RNA, 19 nt, Artificial Sequence
  Description of Artificial Sequence: Synthetic oligonucleotide
  Sense strand starting at position 3433 of SEQ ID NO: 588892
acguguaauuacugcuaau

SEQ ID NO: 897147 - RNA, 19 nt, Artificial Sequence
  Description of Artificial Sequence: Synthetic oligonucleotide
  Antisense strand to SEQ ID NO: 897146
auuagcaguaauuacacgu

SEQ ID NO: 897148 - RNA, 19 nt, Artificial Sequence
  Description of Artificial Sequence: Synthetic oligonucleotide
  Sense strand starting at position 3728 of SEQ ID NO: 588892
ccugcugccuccuggagaa

SEQ ID NO: 897149 - RNA, 19 nt, Artificial Sequence
  Description of Artificial Sequence: Synthetic oligonucleotide
  Antisense strand to SEQ ID NO: 897148
uucuccaggaggcagcagg

SEQ ID NO: 897150 - RNA, 19 nt, Artificial Sequence
  Description of Artificial Sequence: Synthetic oligonucleotide
  Sense strand starting at position 3916 of SEQ ID NO: 588892
cgcaguucuccagagcucu

SEQ ID NO: 897151 - RNA, 19 nt, Artificial Sequence
  Description of Artificial Sequence: Synthetic oligonucleotide
  Antisense strand to SEQ ID NO: 897150
agagcucuggagaacugcg

SEQ ID NO: 897152 - RNA, 19 nt, Artificial Sequence
  Description of Artificial Sequence: Synthetic oligonucleotide
  Sense strand starting at position 3922 of SEQ ID NO: 588892
ucuccagagcucuguguga

SEQ ID NO: 897153 - RNA, 19 nt, Artificial Sequence
  Description of Artificial Sequence: Synthetic oligonucleotide
  Antisense strand to SEQ ID NO: 897152
ucacacagagcucuggaga

SEQ ID NO: 897154 - RNA, 19 nt, Artificial Sequence
  Description of Artificial Sequence: Synthetic oligonucleotide
  Sense strand starting at position 3949 of SEQ ID NO: 588892
cagggugacgcauguguaa

SEQ ID NO: 897155 - RNA, 19 nt, Artificial Sequence
  Description of Artificial Sequence: Synthetic oligonucleotide
  Antisense strand to SEQ ID NO: 897154
uuacacaugcgucacccug

SEQ ID NO: 897156 - RNA, 19 nt, Artificial Sequence
  Description of Artificial Sequence: Synthetic oligonucleotide
  Sense strand starting at position 3951 of SEQ ID NO: 588892
gggugacgcauguguaaca

SEQ ID NO: 897157 - RNA, 19 nt, Artificial Sequence
  Description of Artificial Sequence: Synthetic oligonucleotide
  Antisense strand to SEQ ID NO: 897156
uguuacacaugcgucaccc

SEQ ID NO: 897158 - RNA, 19 nt, Artificial Sequence
  Description of Artificial Sequence: Synthetic oligonucleotide
  Sense strand starting at position 226 of SEQ ID NO: 588893
uggugugucacagacucaa

SEQ ID NO: 897159 - RNA, 19 nt, Artificial Sequence
  Description of Artificial Sequence: Synthetic oligonucleotide
  Antisense strand to SEQ ID NO: 897158
uugagucugugacacacca

SEQ ID NO: 897160 - RNA, 19 nt, Artificial Sequence
  Description of Artificial Sequence: Synthetic oligonucleotide
  Sense strand starting at position 520 of SEQ ID NO: 588893
ccuuauauccacuggagaa

SEQ ID NO: 897161 - RNA, 19 nt, Artificial Sequence
  Description of Artificial Sequence: Synthetic oligonucleotide
  Antisense strand to SEQ ID NO: 897160
uucuccaguggauauaagg

SEQ ID NO: 897162 - RNA, 19 nt, Artificial Sequence
  Description of Artificial Sequence: Synthetic oligonucleotide
  Sense strand starting at position 803 of SEQ ID NO: 588893
ucccaaguugaaugacuau

SEQ ID NO: 897163 - RNA, 19 nt, Artificial Sequence
  Description of Artificial Sequence: Synthetic oligonucleotide
  Antisense strand to SEQ ID NO: 897162
auagucauucaacuuggga

SEQ ID NO: 897164 - RNA, 19 nt, Artificial Sequence
  Description of Artificial Sequence: Synthetic oligonucleotide
  Sense strand starting at position 1083 of SEQ ID NO: 588893
ugcugacuccaggagguau

SEQ ID NO: 897165 - RNA, 19 nt, Artificial Sequence
  Description of Artificial Sequence: Synthetic oligonucleotide
  Antisense strand to SEQ ID NO: 897164
auaccuccuggagucagca

SEQ ID NO: 897166 - RNA, 19 nt, Artificial Sequence
  Description of Artificial Sequence: Synthetic oligonucleotide
  Sense strand starting at position 1127 of SEQ ID NO: 588893
guuucugaacccuggagga

SEQ ID NO: 897167 - RNA, 19 nt, Artificial Sequence
  Description of Artificial Sequence: Synthetic oligonucleotide
  Antisense strand to SEQ ID NO: 897166
uccuccaggguucagaaac

SEQ ID NO: 897168 - RNA, 19 nt, Artificial Sequence
  Description of Artificial Sequence: Synthetic oligonucleotide
  Sense strand starting at position 1386 of SEQ ID NO: 588893
gaacuauggucaguuguag

SEQ ID NO: 897169 - RNA, 19 nt, Artificial Sequence
  Description of Artificial Sequence: Synthetic oligonucleotide
  Antisense strand to SEQ ID NO: 897168
cuacaacugaccauaguuc

SEQ ID NO: 897170 - RNA, 19 nt, Artificial Sequence
  Description of Artificial Sequence: Synthetic oligonucleotide
  Sense strand starting at position 1408 of SEQ ID NO: 588893
aaguguccugagcaauaca

SEQ ID NO: 897171 - RNA, 19 nt, Artificial Sequence
  Description of Artificial Sequence: Synthetic oligonucleotide
  Antisense strand to SEQ ID NO: 897170
uguauugcucaggacacuu

SEQ ID NO: 897172 - RNA, 19 nt, Artificial Sequence
  Description of Artificial Sequence: Synthetic oligonucleotide
  Sense strand starting at position 1449 of SEQ ID NO: 588893
ccaagacucccaugggcua

SEQ ID NO: 897173 - RNA, 19 nt, Artificial Sequence
  Description of Artificial Sequence: Synthetic oligonucleotide
  Antisense strand to SEQ ID NO: 897172
uagcccaugggagucuugg

SEQ ID NO: 897174 - RNA, 19 nt, Artificial Sequence
  Description of Artificial Sequence: Synthetic oligonucleotide
  Sense strand starting at position 1463 of SEQ ID NO: 588893
ggcuauauuguggguaaag

SEQ ID NO: 897175 - RNA, 19 nt, Artificial Sequence
  Description of Artificial Sequence: Synthetic oligonucleotide
  Antisense strand to SEQ ID NO: 897174
cuuuacccacaauauagcc

SEQ ID NO: 897176 - RNA, 19 nt, Artificial Sequence
  Description of Artificial Sequence: Synthetic oligonucleotide
  Sense strand starting at position 1556 of SEQ ID NO: 588893
ggucuuuguagauaaugca

SEQ ID NO: 897177 - RNA, 19 nt, Artificial Sequence
  Description of Artificial Sequence: Synthetic oligonucleotide
  Antisense strand to SEQ ID NO: 897176
ugcauuaucuacaaagacc

SEQ ID NO: 897178 - RNA, 19 nt, Artificial Sequence
  Description of Artificial Sequence: Synthetic oligonucleotide
  Sense strand starting at position 1662 of SEQ ID NO: 588893
cugggacugucaucugaag

SEQ ID NO: 897179 - RNA, 19 nt, Artificial Sequence
  Description of Artificial Sequence: Synthetic oligonucleotide
  Antisense strand to SEQ ID NO: 897178
cuucagaugacagucccag

SEQ ID NO: 897180 - RNA, 19 nt, Artificial Sequence
  Description of Artificial Sequence: Synthetic oligonucleotide
  Sense strand starting at position 1754 of SEQ ID NO: 588893
acacgacauggcugucaaa

SEQ ID NO: 897181 - RNA, 19 nt, Artificial Sequence
  Description of Artificial Sequence: Synthetic oligonucleotide
  Antisense strand to SEQ ID NO: 897180
uuugacagccaugucgugu

SEQ ID NO: 897182 - RNA, 19 nt, Artificial Sequence
  Description of Artificial Sequence: Synthetic oligonucleotide
  Sense strand starting at position 2048 of SEQ ID NO: 588893
ggcggcauuccgccucaga

SEQ ID NO: 897183 - RNA, 19 nt, Artificial Sequence
  Description of Artificial Sequence: Synthetic oligonucleotide
  Antisense strand to SEQ ID NO: 897182
ucugaggcggaaugccgcc

SEQ ID NO: 897184 - RNA, 19 nt, Artificial Sequence
  Description of Artificial Sequence: Synthetic oligonucleotide
  Sense strand starting at position 2321 of SEQ ID NO: 588893
uggugagacguagaauagu

SEQ ID NO: 897185 - RNA, 19 nt, Artificial Sequence
  Description of Artificial Sequence: Synthetic oligonucleotide
  Antisense strand to SEQ ID NO: 897184
acuauucuacgucucacca

SEQ ID NO: 897186 - RNA, 19 nt, Artificial Sequence
  Description of Artificial Sequence: Synthetic oligonucleotide
  Sense strand starting at position 2422 of SEQ ID NO: 588893
cccuuagaaccugguuuga

SEQ ID NO: 897187 - RNA, 19 nt, Artificial Sequence
  Description of Artificial Sequence: Synthetic oligonucleotide
  Antisense strand to SEQ ID NO: 897186
ucaaaccagguucuaaggg

SEQ ID NO: 897188 - RNA, 19 nt, Artificial Sequence
  Description of Artificial Sequence: Synthetic oligonucleotide
  Sense strand starting at position 2433 of SEQ ID NO: 588893
ugguuugaccucugaagaa

SEQ ID NO: 897189 - RNA, 19 nt, Artificial Sequence
  Description of Artificial Sequence: Synthetic oligonucleotide
  Antisense strand to SEQ ID NO: 897188
uucuucagaggucaaacca

SEQ ID NO: 897190 - RNA, 19 nt, Artificial Sequence
  Description of Artificial Sequence: Synthetic oligonucleotide
  Sense strand starting at position 2510 of SEQ ID NO: 588893
uuucuagaagcuugaccua

SEQ ID NO: 897191 - RNA, 19 nt, Artificial Sequence
  Description of Artificial Sequence: Synthetic oligonucleotide
  Antisense strand to SEQ ID NO: 897190
uaggucaagcuucuagaaa

SEQ ID NO: 897192 - RNA, 19 nt, Artificial Sequence
  Description of Artificial Sequence: Synthetic oligonucleotide
  Sense strand starting at position 2531 of SEQ ID NO: 588893
guggaccacuugucaagaa

SEQ ID NO: 897193 - RNA, 19 nt, Artificial Sequence
  Description of Artificial Sequence: Synthetic oligonucleotide
  Antisense strand to SEQ ID NO: 897192
uucuugacaagugguccac

SEQ ID NO: 897194 - RNA, 19 nt, Artificial Sequence
  Description of Artificial Sequence: Synthetic oligonucleotide
  Sense strand starting at position 2552 of SEQ ID NO: 588893
cuuacauaucugcaggcaa

SEQ ID NO: 897195 - RNA, 19 nt, Artificial Sequence
  Description of Artificial Sequence: Synthetic oligonucleotide
  Antisense strand to SEQ ID NO: 897194
uugccugcagauauguaag

SEQ ID NO: 897196 - RNA, 19 nt, Artificial Sequence
  Description of Artificial Sequence: Synthetic oligonucleotide
  Sense strand starting at position 2764 of SEQ ID NO: 588893
ucugguguccuuuaaucag

SEQ ID NO: 897197 - RNA, 19 nt, Artificial Sequence
  Description of Artificial Sequence: Synthetic oligonucleotide
  Antisense strand to SEQ ID NO: 897196
cugauuaaaggacaccaga

SEQ ID NO: 897198 - RNA, 19 nt, Artificial Sequence
  Description of Artificial Sequence: Synthetic oligonucleotide
  Sense strand starting at position 2826 of SEQ ID NO: 588893
aguacaugaaugugcagau

SEQ ID NO: 897199 - RNA, 19 nt, Artificial Sequence
  Description of Artificial Sequence: Synthetic oligonucleotide
  Antisense strand to SEQ ID NO: 897198
aucugcacauucauguacu

SEQ ID NO: 897200 - RNA, 19 nt, Artificial Sequence
  Description of Artificial Sequence: Synthetic oligonucleotide
  Sense strand starting at position 2872 of SEQ ID NO: 588893
caucguugaucacugaaau

SEQ ID NO: 897201 - RNA, 19 nt, Artificial Sequence
  Description of Artificial Sequence: Synthetic oligonucleotide
  Antisense strand to SEQ ID NO: 897200
auuucagugaucaacgaug

SEQ ID NO: 897202 - RNA, 19 nt, Artificial Sequence
  Description of Artificial Sequence: Synthetic oligonucleotide
  Sense strand starting at position 2873 of SEQ ID NO: 588893
aucguugaucacugaaauu

SEQ ID NO: 897203 - RNA, 19 nt, Artificial Sequence
  Description of Artificial Sequence: Synthetic oligonucleotide
  Antisense strand to SEQ ID NO: 897202
aauuucagugaucaacgau

SEQ ID NO: 897204 - RNA, 19 nt, Artificial Sequence
  Description of Artificial Sequence: Synthetic oligonucleotide
  Sense strand starting at position 2918 of SEQ ID NO: 588893
auggcagaggucgaagaau

SEQ ID NO: 897205 - RNA, 19 nt, Artificial Sequence
  Description of Artificial Sequence: Synthetic oligonucleotide
  Antisense strand to SEQ ID NO: 897204
auucuucgaccucugccau

SEQ ID NO: 897206 - RNA, 19 nt, Artificial Sequence
  Description of Artificial Sequence: Synthetic oligonucleotide
  Sense strand starting at position 3000 of SEQ ID NO: 588893
ucaccaagucgguauccau

SEQ ID NO: 897207 - RNA, 19 nt, Artificial Sequence
  Description of Artificial Sequence: Synthetic oligonucleotide
  Antisense strand to SEQ ID NO: 897206
auggauaccgacuugguga

SEQ ID NO: 897208 - RNA, 19 nt, Artificial Sequence
  Description of Artificial Sequence: Synthetic oligonucleotide
  Sense strand starting at position 3057 of SEQ ID NO: 588893
aggaguagguguccuagaa

SEQ ID NO: 897209 - RNA, 19 nt, Artificial Sequence
  Description of Artificial Sequence: Synthetic oligonucleotide
  Antisense strand to SEQ ID NO: 897208
uucuaggacaccuacuccu

SEQ ID NO: 897210 - RNA, 19 nt, Artificial Sequence
  Description of Artificial Sequence: Synthetic oligonucleotide
  Sense strand starting at position 3061 of SEQ ID NO: 588893
guagguguccuagaagcua

SEQ ID NO: 897211 - RNA, 19 nt, Artificial Sequence
  Description of Artificial Sequence: Synthetic oligonucleotide
  Antisense strand to SEQ ID NO: 897210
uagcuucuaggacaccuac

SEQ ID NO: 897212 - RNA, 19 nt, Artificial Sequence
  Description of Artificial Sequence: Synthetic oligonucleotide
  Sense strand starting at position 3094 of SEQ ID NO: 588893
ggacauagguggcuucauu

SEQ ID NO: 897213 - RNA, 19 nt, Artificial Sequence
  Description of Artificial Sequence: Synthetic oligonucleotide
  Antisense strand to SEQ ID NO: 897212
aaugaagccaccuaugucc

SEQ ID NO: 897214 - RNA, 19 nt, Artificial Sequence
  Description of Artificial Sequence: Synthetic oligonucleotide
  Sense strand starting at position 3329 of SEQ ID NO: 588893
guuggaugguaucuacaac

SEQ ID NO: 897215 - RNA, 19 nt, Artificial Sequence
  Description of Artificial Sequence: Synthetic oligonucleotide
  Antisense strand to SEQ ID NO: 897214
guuguagauaccauccaac

SEQ ID NO: 897216 - RNA, 19 nt, Artificial Sequence
  Description of Artificial Sequence: Synthetic oligonucleotide
  Sense strand starting at position 3395 of SEQ ID NO: 588893
uagagaaugucagcuggga

SEQ ID NO: 897217 - RNA, 19 nt, Artificial Sequence
  Description of Artificial Sequence: Synthetic oligonucleotide
  Antisense strand to SEQ ID NO: 897216
ucccagcugacauucucua

SEQ ID NO: 897218 - RNA, 19 nt, Artificial Sequence
  Description of Artificial Sequence: Synthetic oligonucleotide
  Sense strand starting at position 3581 of SEQ ID NO: 588893
uuguuaauuucguccuucu

SEQ ID NO: 897219 - RNA, 19 nt, Artificial Sequence
  Description of Artificial Sequence: Synthetic oligonucleotide
  Antisense strand to SEQ ID NO: 897218
agaaggacgaaauuaacaa

SEQ ID NO: 897220 - RNA, 19 nt, Artificial Sequence
  Description of Artificial Sequence: Synthetic oligonucleotide
  Sense strand starting at position 3681 of SEQ ID NO: 588893
gcuggaccugguuagauaa

SEQ ID NO: 897221 - RNA, 19 nt, Artificial Sequence
  Description of Artificial Sequence: Synthetic oligonucleotide
  Antisense strand to SEQ ID NO: 897220
uuaucuaaccagguccagc

SEQ ID NO: 897222 - RNA, 19 nt, Artificial Sequence
  Description of Artificial Sequence: Synthetic oligonucleotide
  Sense strand starting at position 3692 of SEQ ID NO: 588893
uuagauaacaggcgguauu

SEQ ID NO: 897223 - RNA, 19 nt, Artificial Sequence
  Description of Artificial Sequence: Synthetic oligonucleotide
  Antisense strand to SEQ ID NO: 897222
aauaccgccuguuaucuaa

SEQ ID NO: 897224 - RNA, 19 nt, Artificial Sequence
  Description of Artificial Sequence: Synthetic oligonucleotide
  Sense strand starting at position 3693 of SEQ ID NO: 588893
uagauaacaggcgguauua

SEQ ID NO: 897225 - RNA, 19 nt, Artificial Sequence
  Description of Artificial Sequence: Synthetic oligonucleotide
  Antisense strand to SEQ ID NO: 897224
uaauaccgccuguuaucua

SEQ ID NO: 897226 - RNA, 19 nt, Artificial Sequence
  Description of Artificial Sequence: Synthetic oligonucleotide
  Sense strand starting at position 3695 of SEQ ID NO: 588893
gauaacaggcgguauuauu

SEQ ID NO: 897227 - RNA, 19 nt, Artificial Sequence
  Description of Artificial Sequence: Synthetic oligonucleotide
  Antisense strand to SEQ ID NO: 897226
aauaauaccgccuguuauc

SEQ ID NO: 897228 - RNA, 19 nt, Artificial Sequence
  Description of Artificial Sequence: Synthetic oligonucleotide
  Sense strand starting at position 3745 of SEQ ID NO: 588893
ucauguguccacgaaauau

SEQ ID NO: 897229 - RNA, 19 nt, Artificial Sequence
  Description of Artificial Sequence: Synthetic oligonucleotide
  Antisense strand to SEQ ID NO: 897228
auauuucguggacacauga

SEQ ID NO: 897230 - RNA, 19 nt, Artificial Sequence
  Description of Artificial Sequence: Synthetic oligonucleotide
  Sense strand starting at position 3757 of SEQ ID NO: 588893
gaaauauagcacuguuuag

SEQ ID NO: 897231 - RNA, 19 nt, Artificial Sequence
  Description of Artificial Sequence: Synthetic oligonucleotide
  Antisense strand to SEQ ID NO: 897230
cuaaacagugcuauauuuc

SEQ ID NO: 897232 - RNA, 19 nt, Artificial Sequence
  Description of Artificial Sequence: Synthetic oligonucleotide
  Sense strand starting at position 3884 of SEQ ID NO: 588893
aagggaugguuuccauaau

SEQ ID NO: 897233 - RNA, 19 nt, Artificial Sequence
  Description of Artificial Sequence: Synthetic oligonucleotide
  Antisense strand to SEQ ID NO: 897232
auuauggaaaccaucccuu

SEQ ID NO: 897234 - RNA, 19 nt, Artificial Sequence
  Description of Artificial Sequence: Synthetic oligonucleotide
  Sense strand starting at position 3953 of SEQ ID NO: 588893
ccacuuauuuccguuacuu

SEQ ID NO: 897235 - RNA, 19 nt, Artificial Sequence
  Description of Artificial Sequence: Synthetic oligonucleotide
  Antisense strand to SEQ ID NO: 897234
aaguaacggaaauaagugg

SEQ ID NO: 897236 - RNA, 19 nt, Artificial Sequence
  Description of Artificial Sequence: Synthetic oligonucleotide
  Sense strand starting at position 3955 of SEQ ID NO: 588893
acuuauuuccguuacuugu

SEQ ID NO: 897237 - RNA, 19 nt, Artificial Sequence
  Description of Artificial Sequence: Synthetic oligonucleotide
  Antisense strand to SEQ ID NO: 897236
acaaguaacggaaauaagu

SEQ ID NO: 897238 - RNA, 19 nt, Artificial Sequence
  Description of Artificial Sequence: Synthetic oligonucleotide
  Sense strand starting at position 13 of SEQ ID NO: 588895
ggcugaguggcuguuucuu

SEQ ID NO: 897239 - RNA, 19 nt, Artificial Sequence
  Description of Artificial Sequence: Synthetic oligonucleotide
  Antisense strand to SEQ ID NO: 897238
aagaaacagccacucagcc

SEQ ID NO: 897240 - RNA, 19 nt, Artificial Sequence
  Description of Artificial Sequence: Synthetic oligonucleotide
  Sense strand starting at position 15 of SEQ ID NO: 588895
cugaguggcuguuucuuua

SEQ ID NO: 897241 - RNA, 19 nt, Artificial Sequence
  Description of Artificial Sequence: Synthetic oligonucleotide
  Antisense strand to SEQ ID NO: 897240
uaaagaaacagccacucag

SEQ ID NO: 897242 - RNA, 19 nt, Artificial Sequence
  Description of Artificial Sequence: Synthetic oligonucleotide
  Sense strand starting at position 19 of SEQ ID NO: 588895
guggcuguuucuuuaggga

SEQ ID NO: 897243 - RNA, 19 nt, Artificial Sequence
  Description of Artificial Sequence: Synthetic oligonucleotide
  Antisense strand to SEQ ID NO: 897242
ucccuaaagaaacagccac

SEQ ID NO: 897244 - RNA, 19 nt, Artificial Sequence
  Description of Artificial Sequence: Synthetic oligonucleotide
  Sense strand starting at position 22 of SEQ ID NO: 588895
gcuguuucuuuagggagga

SEQ ID NO: 897245 - RNA, 19 nt, Artificial Sequence
  Description of Artificial Sequence: Synthetic oligonucleotide
  Antisense strand to SEQ ID NO: 897244
uccucccuaaagaaacagc

SEQ ID NO: 897246 - RNA, 19 nt, Artificial Sequence
  Description of Artificial Sequence: Synthetic oligonucleotide
  Sense strand starting at position 462 of SEQ ID NO: 588895
gucaguucccuucgggaca

SEQ ID NO: 897247 - RNA, 19 nt, Artificial Sequence
  Description of Artificial Sequence: Synthetic oligonucleotide
  Antisense strand to SEQ ID NO: 897246
ugucccgaagggaacugac

SEQ ID NO: 897248 - RNA, 19 nt, Artificial Sequence
  Description of Artificial Sequence: Synthetic oligonucleotide
  Sense strand starting at position 474 of SEQ ID NO: 588895
cgggacagaugagaucaaa

SEQ ID NO: 897249 - RNA, 19 nt, Artificial Sequence
  Description of Artificial Sequence: Synthetic oligonucleotide
  Antisense strand to SEQ ID NO: 897248
uuugaucucaucugucccg

SEQ ID NO: 897250 - RNA, 19 nt, Artificial Sequence
  Description of Artificial Sequence: Synthetic oligonucleotide
  Sense strand starting at position 498 of SEQ ID NO: 588895
ccuagugugcucuggcaga

SEQ ID NO: 897251 - RNA, 19 nt, Artificial Sequence
  Description of Artificial Sequence: Synthetic oligonucleotide
  Antisense strand to SEQ ID NO: 897250
ucugccagagcacacuagg

SEQ ID NO: 897252 - RNA, 19 nt, Artificial Sequence
  Description of Artificial Sequence: Synthetic oligonucleotide
  Sense strand starting at position 1311 of SEQ ID NO: 588895
ugagcuaucagguaggauu

SEQ ID NO: 897253 - RNA, 19 nt, Artificial Sequence
  Description of Artificial Sequence: Synthetic oligonucleotide
  Antisense strand to SEQ ID NO: 897252
aauccuaccugauagcuca

SEQ ID NO: 897254 - RNA, 19 nt, Artificial Sequence
  Description of Artificial Sequence: Synthetic oligonucleotide
  Sense strand starting at position 1322 of SEQ ID NO: 588895
guaggauucugcuucccag

SEQ ID NO: 897255 - RNA, 19 nt, Artificial Sequence
  Description of Artificial Sequence: Synthetic oligonucleotide
  Antisense strand to SEQ ID NO: 897254
cugggaagcagaauccuac

SEQ ID NO: 897256 - RNA, 19 nt, Artificial Sequence
  Description of Artificial Sequence: Synthetic oligonucleotide
  Sense strand starting at position 1472 of SEQ ID NO: 588895
gggccuggucucggacaga

SEQ ID NO: 897257 - RNA, 19 nt, Artificial Sequence
  Description of Artificial Sequence: Synthetic oligonucleotide
  Antisense strand to SEQ ID NO: 897256
ucuguccgagaccaggccc

SEQ ID NO: 897258 - RNA, 19 nt, Artificial Sequence
  Description of Artificial Sequence: Synthetic oligonucleotide
  Sense strand starting at position 1523 of SEQ ID NO: 588895
ugaguccacugguuugauu

SEQ ID NO: 897259 - RNA, 19 nt, Artificial Sequence
  Description of Artificial Sequence: Synthetic oligonucleotide
  Antisense strand to SEQ ID NO: 897258
aaucaaaccaguggacuca

SEQ ID NO: 897260 - RNA, 19 nt, Artificial Sequence
  Description of Artificial Sequence: Synthetic oligonucleotide
  Sense strand starting at position 1662 of SEQ ID NO: 588895
ucuggucucuucugagacu

SEQ ID NO: 897261 - RNA, 19 nt, Artificial Sequence
  Description of Artificial Sequence: Synthetic oligonucleotide
  Antisense strand to SEQ ID NO: 897260
agucucagaagagaccaga

SEQ ID NO: 897262 - RNA, 19 nt, Artificial Sequence
  Description of Artificial Sequence: Synthetic oligonucleotide
  Sense strand starting at position 1663 of SEQ ID NO: 588895
cuggucucuucugagacuu

SEQ ID NO: 897263 - RNA, 19 nt, Artificial Sequence
  Description of Artificial Sequence: Synthetic oligonucleotide
  Antisense strand to SEQ ID NO: 897262
aagucucagaagagaccag

SEQ ID NO: 897264 - RNA, 19 nt, Artificial Sequence
  Description of Artificial Sequence: Synthetic oligonucleotide
  Sense strand starting at position 1745 of SEQ ID NO: 588895
gaaucaagcucuguggguu

SEQ ID NO: 897265 - RNA, 19 nt, Artificial Sequence
  Description of Artificial Sequence: Synthetic oligonucleotide
  Antisense strand to SEQ ID NO: 897264
aacccacagagcuugauuc

SEQ ID NO: 897266 - RNA, 19 nt, Artificial Sequence
  Description of Artificial Sequence: Synthetic oligonucleotide
  Sense strand starting at position 1811 of SEQ ID NO: 588895
gggucaucacaacggaagu

SEQ ID NO: 897267 - RNA, 19 nt, Artificial Sequence
  Description of Artificial Sequence: Synthetic oligonucleotide
  Antisense strand to SEQ ID NO: 897266
acuuccguugugaugaccc

SEQ ID NO: 897268 - RNA, 19 nt, Artificial Sequence
  Description of Artificial Sequence: Synthetic oligonucleotide
  Sense strand starting at position 1812 of SEQ ID NO: 588895
ggucaucacaacggaagua

SEQ ID NO: 897269 - RNA, 19 nt, Artificial Sequence
  Description of Artificial Sequence: Synthetic oligonucleotide
  Antisense strand to SEQ ID NO: 897268
uacuuccguugugaugacc

SEQ ID NO: 897270 - RNA, 19 nt, Artificial Sequence
  Description of Artificial Sequence: Synthetic oligonucleotide
  Sense strand starting at position 1918 of SEQ ID NO: 588895
ggcguuuagcgaugaggca

SEQ ID NO: 897271 - RNA, 19 nt, Artificial Sequence
  Description of Artificial Sequence: Synthetic oligonucleotide
  Antisense strand to SEQ ID NO: 897270
ugccucaucgcuaaacgcc

SEQ ID NO: 897272 - RNA, 19 nt, Artificial Sequence
  Description of Artificial Sequence: Synthetic oligonucleotide
  Sense strand starting at position 1973 of SEQ ID NO: 588895
ugaauaggcgcguugcuuu

SEQ ID NO: 897273 - RNA, 19 nt, Artificial Sequence
  Description of Artificial Sequence: Synthetic oligonucleotide
  Antisense strand to SEQ ID NO: 897272
aaagcaacgcgccuauuca

SEQ ID NO: 897274 - RNA, 19 nt, Artificial Sequence
  Description of Artificial Sequence: Synthetic oligonucleotide
  Sense strand starting at position 1980 of SEQ ID NO: 588895
gcgcguugcuuucaagcaa

SEQ ID NO: 897275 - RNA, 19 nt, Artificial Sequence
  Description of Artificial Sequence: Synthetic oligonucleotide
  Antisense strand to SEQ ID NO: 897274
uugcuugaaagcaacgcgc

SEQ ID NO: 897276 - RNA, 19 nt, Artificial Sequence
  Description of Artificial Sequence: Synthetic oligonucleotide
  Sense strand starting at position 2377 of SEQ ID NO: 588895
aucugaaguucugaaauuu

SEQ ID NO: 897277 - RNA, 19 nt, Artificial Sequence
  Description of Artificial Sequence: Synthetic oligonucleotide
  Antisense strand to SEQ ID NO: 897276
aaauuucagaacuucagau

SEQ ID NO: 897278 - RNA, 19 nt, Artificial Sequence
  Description of Artificial Sequence: Synthetic oligonucleotide
  Sense strand starting at position 2474 of SEQ ID NO: 588895
uguaucaauccagggacaa

SEQ ID NO: 897279 - RNA, 19 nt, Artificial Sequence
  Description of Artificial Sequence: Synthetic oligonucleotide
  Antisense strand to SEQ ID NO: 897278
uugucccuggauugauaca

SEQ ID NO: 897280 - RNA, 19 nt, Artificial Sequence
  Description of Artificial Sequence: Synthetic oligonucleotide
  Sense strand starting at position 2658 of SEQ ID NO: 588895
uuuaacuuucgggauacau

SEQ ID NO: 897281 - RNA, 19 nt, Artificial Sequence
  Description of Artificial Sequence: Synthetic oligonucleotide
  Antisense strand to SEQ ID NO: 897280
auguaucccgaaaguuaaa

SEQ ID NO: 897282 - RNA, 19 nt, Artificial Sequence
  Description of Artificial Sequence: Synthetic oligonucleotide
  Sense strand starting at position 2660 of SEQ ID NO: 588895
uaacuuucgggauacaugu

SEQ ID NO: 897283 - RNA, 19 nt, Artificial Sequence
  Description of Artificial Sequence: Synthetic oligonucleotide
  Antisense strand to SEQ ID NO: 897282
acauguaucccgaaaguua

SEQ ID NO: 897284 - RNA, 19 nt, Artificial Sequence
  Description of Artificial Sequence: Synthetic oligonucleotide
  Sense strand starting at position 2707 of SEQ ID NO: 588895
aaauauguaccauggugau

SEQ ID NO: 897285 - RNA, 19 nt, Artificial Sequence
  Description of Artificial Sequence: Synthetic oligonucleotide
  Antisense strand to SEQ ID NO: 897284
aucaccaugguacauauuu

SEQ ID NO: 897286 - RNA, 19 nt, Artificial Sequence
  Description of Artificial Sequence: Synthetic oligonucleotide
  Sense strand starting at position 3149 of SEQ ID NO: 588895
uccuuuggauaugcaauaa

SEQ ID NO: 897287 - RNA, 19 nt, Artificial Sequence
  Description of Artificial Sequence: Synthetic oligonucleotide
  Antisense strand to SEQ ID NO: 897286
uuauugcauauccaaagga

SEQ ID NO: 897288 - RNA, 19 nt, Artificial Sequence
  Description of Artificial Sequence: Synthetic oligonucleotide
  Sense strand starting at position 3153 of SEQ ID NO: 588895
uuggauaugcaauaauggu

SEQ ID NO: 897289 - RNA, 19 nt, Artificial Sequence
  Description of Artificial Sequence: Synthetic oligonucleotide
  Antisense strand to SEQ ID NO: 897288
accauuauugcauauccaa

SEQ ID NO: 897290 - RNA, 19 nt, Artificial Sequence
  Description of Artificial Sequence: Synthetic oligonucleotide
  Sense strand starting at position 3159 of SEQ ID NO: 588895
augcaauaaugguauaucu

SEQ ID NO: 897291 - RNA, 19 nt, Artificial Sequence
  Description of Artificial Sequence: Synthetic oligonucleotide
  Antisense strand to SEQ ID NO: 897290
agauauaccauuauugcau

SEQ ID NO: 897292 - RNA, 19 nt, Artificial Sequence
  Description of Artificial Sequence: Synthetic oligonucleotide
  Sense strand starting at position 3203 of SEQ ID NO: 588895
gggaauucugcccagcgca

SEQ ID NO: 897293 - RNA, 19 nt, Artificial Sequence
  Description of Artificial Sequence: Synthetic oligonucleotide
  Antisense strand to SEQ ID NO: 897292
ugcgcugggcagaauuccc

SEQ ID NO: 897294 - RNA, 19 nt, Artificial Sequence
  Description of Artificial Sequence: Synthetic oligonucleotide
  Sense strand starting at position 3261 of SEQ ID NO: 588895
cggcuagacccgcaguaau

SEQ ID NO: 897295 - RNA, 19 nt, Artificial Sequence
  Description of Artificial Sequence: Synthetic oligonucleotide
  Antisense strand to SEQ ID NO: 897294
auuacugcgggucuagccg

SEQ ID NO: 897296 - RNA, 19 nt, Artificial Sequence
  Description of Artificial Sequence: Synthetic oligonucleotide
  Sense strand starting at position 3306 of SEQ ID NO: 588895
uggucuucuuaggcagacu

SEQ ID NO: 897297 - RNA, 19 nt, Artificial Sequence
  Description of Artificial Sequence: Synthetic oligonucleotide
  Antisense strand to SEQ ID NO: 897296
agucugccuaagaagacca

SEQ ID NO: 897298 - RNA, 19 nt, Artificial Sequence
  Description of Artificial Sequence: Synthetic oligonucleotide
  Sense strand starting at position 3418 of SEQ ID NO: 588895
gcccucuucucaugggagu

SEQ ID NO: 897299 - RNA, 19 nt, Artificial Sequence
  Description of Artificial Sequence: Synthetic oligonucleotide
  Antisense strand to SEQ ID NO: 897298
acucccaugagaagagggc

SEQ ID NO: 897300 - RNA, 19 nt, Artificial Sequence
  Description of Artificial Sequence: Synthetic oligonucleotide
  Sense strand starting at position 3419 of SEQ ID NO: 588895
cccucuucucaugggaguu

SEQ ID NO: 897301 - RNA, 19 nt, Artificial Sequence
  Description of Artificial Sequence: Synthetic oligonucleotide
  Antisense strand to SEQ ID NO: 897300
aacucccaugagaagaggg

SEQ ID NO: 897302 - RNA, 19 nt, Artificial Sequence
  Description of Artificial Sequence: Synthetic oligonucleotide
  Sense strand starting at position 3455 of SEQ ID NO: 588895
acuggauuacugcgagcca

SEQ ID NO: 897303 - RNA, 19 nt, Artificial Sequence
  Description of Artificial Sequence: Synthetic oligonucleotide
  Antisense strand to SEQ ID NO: 897302
uggcucgcaguaauccagu

SEQ ID NO: 897304 - RNA, 19 nt, Artificial Sequence
  Description of Artificial Sequence: Synthetic oligonucleotide
  Sense strand starting at position 3698 of SEQ ID NO: 588895
ggucucuuugcccugugua

SEQ ID NO: 897305 - RNA, 19 nt, Artificial Sequence
  Description of Artificial Sequence: Synthetic oligonucleotide
  Antisense strand to SEQ ID NO: 897304
uacacagggcaaagagacc

SEQ ID NO: 897306 - RNA, 19 nt, Artificial Sequence
  Description of Artificial Sequence: Synthetic oligonucleotide
  Sense strand starting at position 3710 of SEQ ID NO: 588895
cuguguagcucuuggguga

SEQ ID NO: 897307 - RNA, 19 nt, Artificial Sequence
  Description of Artificial Sequence: Synthetic oligonucleotide
  Antisense strand to SEQ ID NO: 897306
ucacccaagagcuacacag

SEQ ID NO: 897308 - RNA, 19 nt, Artificial Sequence
  Description of Artificial Sequence: Synthetic oligonucleotide
  Sense strand starting at position 3711 of SEQ ID NO: 588895
uguguagcucuugggugaa

SEQ ID NO: 897309 - RNA, 19 nt, Artificial Sequence
  Description of Artificial Sequence: Synthetic oligonucleotide
  Antisense strand to SEQ ID NO: 897308
uucacccaagagcuacaca

SEQ ID NO: 897310 - RNA, 19 nt, Artificial Sequence
  Description of Artificial Sequence: Synthetic oligonucleotide
  Sense strand starting at position 3724 of SEQ ID NO: 588895
ggugaacugucgcccaacu

SEQ ID NO: 897311 - RNA, 19 nt, Artificial Sequence
  Description of Artificial Sequence: Synthetic oligonucleotide
  Antisense strand to SEQ ID NO: 897310
aguugggcgacaguucacc

SEQ ID NO: 897312 - RNA, 19 nt, Artificial Sequence
  Description of Artificial Sequence: Synthetic oligonucleotide
  Sense strand starting at position 3803 of SEQ ID NO: 588895
cuggauaccucaguuagaa

SEQ ID NO: 897313 - RNA, 19 nt, Artificial Sequence
  Description of Artificial Sequence: Synthetic oligonucleotide
  Antisense strand to SEQ ID NO: 897312
uucuaacugagguauccag

SEQ ID NO: 897314 - RNA, 19 nt, Artificial Sequence
  Description of Artificial Sequence: Synthetic oligonucleotide
  Sense strand starting at position 3837 of SEQ ID NO: 588895
gcuguuuauguuugucuca

SEQ ID NO: 897315 - RNA, 19 nt, Artificial Sequence
  Description of Artificial Sequence: Synthetic oligonucleotide
  Antisense strand to SEQ ID NO: 897314
ugagacaaacauaaacagc

SEQ ID NO: 897316 - RNA, 19 nt, Artificial Sequence
  Description of Artificial Sequence: Synthetic oligonucleotide
  Sense strand starting at position 3839 of SEQ ID NO: 588895
uguuuauguuugucucagu

SEQ ID NO: 897317 - RNA, 19 nt, Artificial Sequence
  Description of Artificial Sequence: Synthetic oligonucleotide
  Antisense strand to SEQ ID NO: 897316
acugagacaaacauaaaca

SEQ ID NO: 897318 - RNA, 19 nt, Artificial Sequence
  Description of Artificial Sequence: Synthetic oligonucleotide
  Sense strand starting at position 502 of SEQ ID NO: 588896
ccuagugugcucuggcaga

SEQ ID NO: 897319 - RNA, 19 nt, Artificial Sequence
  Description of Artificial Sequence: Synthetic oligonucleotide
  Antisense strand to SEQ ID NO: 897318
ucugccagagcacacuagg

SEQ ID NO: 897320 - RNA, 19 nt, Artificial Sequence
  Description of Artificial Sequence: Synthetic oligonucleotide
  Sense strand starting at position 3150 of SEQ ID NO: 588897
uccuuuggauaugcaauaa

SEQ ID NO: 897321 - RNA, 19 nt, Artificial Sequence
  Description of Artificial Sequence: Synthetic oligonucleotide
  Antisense strand to SEQ ID NO: 897320
uuauugcauauccaaagga

SEQ ID NO: 897322 - RNA, 19 nt, Artificial Sequence
  Description of Artificial Sequence: Synthetic oligonucleotide
  Sense strand starting at position 3154 of SEQ ID NO: 588897
uuggauaugcaauaauggu

SEQ ID NO: 897323 - RNA, 19 nt, Artificial Sequence
  Description of Artificial Sequence: Synthetic oligonucleotide
  Antisense strand to SEQ ID NO: 897322
accauuauugcauauccaa

SEQ ID NO: 897324 - RNA, 19 nt, Artificial Sequence
  Description of Artificial Sequence: Synthetic oligonucleotide
  Sense strand starting at position 3160 of SEQ ID NO: 588897
augcaauaaugguauaucu

SEQ ID NO: 897325 - RNA, 19 nt, Artificial Sequence
  Description of Artificial Sequence: Synthetic oligonucleotide
  Antisense strand to SEQ ID NO: 897324
agauauaccauuauugcau

SEQ ID NO: 897326 - RNA, 19 nt, Artificial Sequence
  Description of Artificial Sequence: Synthetic oligonucleotide
  Sense strand starting at position 764 of SEQ ID NO: 588898
ugugcuuccucccacucau

SEQ ID NO: 897327 - RNA, 19 nt, Artificial Sequence
  Description of Artificial Sequence: Synthetic oligonucleotide
  Antisense strand to SEQ ID NO: 897326
augagugggaggaagcaca

SEQ ID NO: 897328 - RNA, 19 nt, Artificial Sequence
  Description of Artificial Sequence: Synthetic oligonucleotide
  Sense strand starting at position 782 of SEQ ID NO: 588898
uguuuaacuggaugauaaa

SEQ ID NO: 897329 - RNA, 19 nt, Artificial Sequence
  Description of Artificial Sequence: Synthetic oligonucleotide
  Antisense strand to SEQ ID NO: 897328
uuuaucauccaguuaaaca

SEQ ID NO: 897330 - RNA, 19 nt, Artificial Sequence
  Description of Artificial Sequence: Synthetic oligonucleotide
  Sense strand starting at position 1579 of SEQ ID NO: 588898
cugagaucuugggauggaa

SEQ ID NO: 897331 - RNA, 19 nt, Artificial Sequence
  Description of Artificial Sequence: Synthetic oligonucleotide
  Antisense strand to SEQ ID NO: 897330
uuccaucccaagaucucag

SEQ ID NO: 897332 - RNA, 19 nt, Artificial Sequence
  Description of Artificial Sequence: Synthetic oligonucleotide
  Sense strand starting at position 3202 of SEQ ID NO: 588898
gggaauucugcccagugca

SEQ ID NO: 897333 - RNA, 19 nt, Artificial Sequence
  Description of Artificial Sequence: Synthetic oligonucleotide
  Antisense strand to SEQ ID NO: 897332
ugcacugggcagaauuccc

SEQ ID NO: 897334 - RNA, 19 nt, Artificial Sequence
  Description of Artificial Sequence: Synthetic oligonucleotide
  Sense strand starting at position 3723 of SEQ ID NO: 588898
ggugaacugucacccaacu

SEQ ID NO: 897335 - RNA, 19 nt, Artificial Sequence
  Description of Artificial Sequence: Synthetic oligonucleotide
  Antisense strand to SEQ ID NO: 897334
aguugggugacaguucacc

SEQ ID NO: 897336 - RNA, 19 nt, Artificial Sequence
  Description of Artificial Sequence: Synthetic oligonucleotide
  Sense strand starting at position 502 of SEQ ID NO: 588899
ccuagugugcucuggcaga

SEQ ID NO: 897337 - RNA, 19 nt, Artificial Sequence
  Description of Artificial Sequence: Synthetic oligonucleotide
  Antisense strand to SEQ ID NO: 897336
ucugccagagcacacuagg

SEQ ID NO: 897338 - RNA, 19 nt, Artificial Sequence
  Description of Artificial Sequence: Synthetic oligonucleotide
  Sense strand starting at position 3150 of SEQ ID NO: 588900
uccuuuggauaugcaauaa

SEQ ID NO: 897339 - RNA, 19 nt, Artificial Sequence
  Description of Artificial Sequence: Synthetic oligonucleotide
  Antisense strand to SEQ ID NO: 897338
uuauugcauauccaaagga

SEQ ID NO: 897340 - RNA, 19 nt, Artificial Sequence
  Description of Artificial Sequence: Synthetic oligonucleotide
  Sense strand starting at position 3154 of SEQ ID NO: 588900
uuggauaugcaauaauggu

SEQ ID NO: 897341 - RNA, 19 nt, Artificial Sequence
  Description of Artificial Sequence: Synthetic oligonucleotide
  Antisense strand to SEQ ID NO: 897340
accauuauugcauauccaa

SEQ ID NO: 897342 - RNA, 19 nt, Artificial Sequence
  Description of Artificial Sequence: Synthetic oligonucleotide
  Sense strand starting at position 3160 of SEQ ID NO: 588900
augcaauaaugguauaucu

SEQ ID NO: 897343 - RNA, 19 nt, Artificial Sequence
  Description of Artificial Sequence: Synthetic oligonucleotide
  Antisense strand to SEQ ID NO: 897342
agauauaccauuauugcau

SEQ ID NO: 897344 - RNA, 19 nt, Artificial Sequence
  Description of Artificial Sequence: Synthetic oligonucleotide
  Sense strand starting at position 104 of SEQ ID NO: 588901
cugaguguauguuucuuua

SEQ ID NO: 897345 - RNA, 19 nt, Artificial Sequence
  Description of Artificial Sequence: Synthetic oligonucleotide
  Antisense strand to SEQ ID NO: 897344
uaaagaaacauacacucag

SEQ ID NO: 897346 - RNA, 19 nt, Artificial Sequence
  Description of Artificial Sequence: Synthetic oligonucleotide
  Sense strand starting at position 108 of SEQ ID NO: 588901
guguauguuucuuuaggga

SEQ ID NO: 897347 - RNA, 19 nt, Artificial Sequence
  Description of Artificial Sequence: Synthetic oligonucleotide
  Antisense strand to SEQ ID NO: 897346
ucccuaaagaaacauacac

SEQ ID NO: 897348 - RNA, 19 nt, Artificial Sequence
  Description of Artificial Sequence: Synthetic oligonucleotide
  Sense strand starting at position 111 of SEQ ID NO: 588901
uauguuucuuuagggaaga

SEQ ID NO: 897349 - RNA, 19 nt, Artificial Sequence
  Description of Artificial Sequence: Synthetic oligonucleotide
  Antisense strand to SEQ ID NO: 897348
ucuucccuaaagaaacaua

SEQ ID NO: 897350 - RNA, 19 nt, Artificial Sequence
  Description of Artificial Sequence: Synthetic oligonucleotide
  Sense strand starting at position 112 of SEQ ID NO: 588901
auguuucuuuagggaagac

SEQ ID NO: 897351 - RNA, 19 nt, Artificial Sequence
  Description of Artificial Sequence: Synthetic oligonucleotide
  Antisense strand to SEQ ID NO: 897350
gucuucccuaaagaaacau

SEQ ID NO: 897352 - RNA, 19 nt, Artificial Sequence
  Description of Artificial Sequence: Synthetic oligonucleotide
  Sense strand starting at position 456 of SEQ ID NO: 588901
gcuucauuccggcggcaca

SEQ ID NO: 897353 - RNA, 19 nt, Artificial Sequence
  Description of Artificial Sequence: Synthetic oligonucleotide
  Antisense strand to SEQ ID NO: 897352
ugugccgccggaaugaagc

SEQ ID NO: 897354 - RNA, 19 nt, Artificial Sequence
  Description of Artificial Sequence: Synthetic oligonucleotide
  Sense strand starting at position 565 of SEQ ID NO: 588901
ccggacagaugagaucaaa

SEQ ID NO: 897355 - RNA, 19 nt, Artificial Sequence
  Description of Artificial Sequence: Synthetic oligonucleotide
  Antisense strand to SEQ ID NO: 897354
uuugaucucaucuguccgg

SEQ ID NO: 897356 - RNA, 19 nt, Artificial Sequence
  Description of Artificial Sequence: Synthetic oligonucleotide
  Sense strand starting at position 3354 of SEQ ID NO: 588901
agugaaauaucgguucaug

SEQ ID NO: 897357 - RNA, 19 nt, Artificial Sequence
  Description of Artificial Sequence: Synthetic oligonucleotide
  Antisense strand to SEQ ID NO: 897356
caugaaccgauauuucacu

SEQ ID NO: 897358 - RNA, 19 nt, Artificial Sequence
  Description of Artificial Sequence: Synthetic oligonucleotide
  Sense strand starting at position 3749 of SEQ ID NO: 588901
auugguaucuaauugguuu

SEQ ID NO: 897359 - RNA, 19 nt, Artificial Sequence
  Description of Artificial Sequence: Synthetic oligonucleotide
  Antisense strand to SEQ ID NO: 897358
aaaccaauuagauaccaau

SEQ ID NO: 897360 - RNA, 19 nt, Artificial Sequence
  Description of Artificial Sequence: Synthetic oligonucleotide
  Sense strand starting at position 3789 of SEQ ID NO: 588901
ggugauaucugaucacucu

SEQ ID NO: 897361 - RNA, 19 nt, Artificial Sequence
  Description of Artificial Sequence: Synthetic oligonucleotide
  Antisense strand to SEQ ID NO: 897360
agagugaucagauaucacc

SEQ ID NO: 897362 - RNA, 19 nt, Artificial Sequence
  Description of Artificial Sequence: Synthetic oligonucleotide
  Sense strand starting at position 3790 of SEQ ID NO: 588901
gugauaucugaucacucug

SEQ ID NO: 897363 - RNA, 19 nt, Artificial Sequence
  Description of Artificial Sequence: Synthetic oligonucleotide
  Antisense strand to SEQ ID NO: 897362
cagagugaucagauaucac

SEQ ID NO: 897364 - RNA, 19 nt, Artificial Sequence
  Description of Artificial Sequence: Synthetic oligonucleotide
  Sense strand starting at position 3820 of SEQ ID NO: 588901
gcaagaauucugugagguc

SEQ ID NO: 897365 - RNA, 19 nt, Artificial Sequence
  Description of Artificial Sequence: Synthetic oligonucleotide
  Antisense strand to SEQ ID NO: 897364
gaccucacagaauucuugc

SEQ ID NO: 897366 - RNA, 19 nt, Artificial Sequence
  Description of Artificial Sequence: Synthetic oligonucleotide
  Sense strand starting at position 3821 of SEQ ID NO: 588901
caagaauucugugagguca

SEQ ID NO: 897367 - RNA, 19 nt, Artificial Sequence
  Description of Artificial Sequence: Synthetic oligonucleotide
  Antisense strand to SEQ ID NO: 897366
ugaccucacagaauucuug

SEQ ID NO: 897368 - RNA, 19 nt, Artificial Sequence
  Description of Artificial Sequence: Synthetic oligonucleotide
  Sense strand starting at position 3823 of SEQ ID NO: 588901
agaauucugugaggucagu

SEQ ID NO: 897369 - RNA, 19 nt, Artificial Sequence
  Description of Artificial Sequence: Synthetic oligonucleotide
  Antisense strand to SEQ ID NO: 897368
acugaccucacagaauucu

SEQ ID NO: 897370 - RNA, 19 nt, Artificial Sequence
  Description of Artificial Sequence: Synthetic oligonucleotide
  Sense strand starting at position 3894 of SEQ ID NO: 588901
ccugcucuguggcuauaaa

SEQ ID NO: 897371 - RNA, 19 nt, Artificial Sequence
  Description of Artificial Sequence: Synthetic oligonucleotide
  Antisense strand to SEQ ID NO: 897370
uuuauagccacagagcagg

SEQ ID NO: 897372 - RNA, 19 nt, Artificial Sequence
  Description of Artificial Sequence: Synthetic oligonucleotide
  Sense strand starting at position 3931 of SEQ ID NO: 588901
accugaauauauggaaacu

SEQ ID NO: 897373 - RNA, 19 nt, Artificial Sequence
  Description of Artificial Sequence: Synthetic oligonucleotide
  Antisense strand to SEQ ID NO: 897372
aguuuccauauauucaggu

SEQ ID NO: 897374 - RNA, 19 nt, Artificial Sequence
  Description of Artificial Sequence: Synthetic oligonucleotide
  Sense strand starting at position 3947 of SEQ ID NO: 588901
acuggagauuacugcaaga

SEQ ID NO: 897375 - RNA, 19 nt, Artificial Sequence
  Description of Artificial Sequence: Synthetic oligonucleotide
  Antisense strand to SEQ ID NO: 897374
ucuugcaguaaucuccagu

SEQ ID NO: 897376 - RNA, 19 nt, Artificial Sequence
  Description of Artificial Sequence: Synthetic oligonucleotide
  Sense strand starting at position 3960 of SEQ ID NO: 588901
gcaagacccuauugcagua

SEQ ID NO: 897377 - RNA, 19 nt, Artificial Sequence
  Description of Artificial Sequence: Synthetic oligonucleotide
  Antisense strand to SEQ ID NO: 897376
uacugcaauagggucuugc

SEQ ID NO: 897378 - RNA, 19 nt, Artificial Sequence
  Description of Artificial Sequence: Synthetic oligonucleotide
  Sense strand starting at position 450 of SEQ ID NO: 588902
gcuucauuccggcggcaca

SEQ ID NO: 897379 - RNA, 19 nt, Artificial Sequence
  Description of Artificial Sequence: Synthetic oligonucleotide
  Antisense strand to SEQ ID NO: 897378
ugugccgccggaaugaagc

SEQ ID NO: 897380 - RNA, 19 nt, Artificial Sequence
  Description of Artificial Sequence: Synthetic oligonucleotide
  Sense strand starting at position 559 of SEQ ID NO: 588902
ccggacagaugagaucaaa

SEQ ID NO: 897381 - RNA, 19 nt, Artificial Sequence
  Description of Artificial Sequence: Synthetic oligonucleotide
  Antisense strand to SEQ ID NO: 897380
uuugaucucaucuguccgg

SEQ ID NO: 897382 - RNA, 19 nt, Artificial Sequence
  Description of Artificial Sequence: Synthetic oligonucleotide
  Sense strand starting at position 674 of SEQ ID NO: 588902
acaagaugacgcugggaga

SEQ ID NO: 897383 - RNA, 19 nt, Artificial Sequence
  Description of Artificial Sequence: Synthetic oligonucleotide
  Antisense strand to SEQ ID NO: 897382
ucucccagcgucaucuugu

SEQ ID NO: 897384 - RNA, 19 nt, Artificial Sequence
  Description of Artificial Sequence: Synthetic oligonucleotide
  Sense strand starting at position 2180 of SEQ ID NO: 588902
cuuccuucgcacuaaguuu

SEQ ID NO: 897385 - RNA, 19 nt, Artificial Sequence
  Description of Artificial Sequence: Synthetic oligonucleotide
  Antisense strand to SEQ ID NO: 897384
aaacuuagugcgaaggaag

SEQ ID NO: 897386 - RNA, 19 nt, Artificial Sequence
  Description of Artificial Sequence: Synthetic oligonucleotide
  Sense strand starting at position 3353 of SEQ ID NO: 588902
cagugaaauaucgguucgu

SEQ ID NO: 897387 - RNA, 19 nt, Artificial Sequence
  Description of Artificial Sequence: Synthetic oligonucleotide
  Antisense strand to SEQ ID NO: 897386
acgaaccgauauuucacug

SEQ ID NO: 897388 - RNA, 19 nt, Artificial Sequence
  Description of Artificial Sequence: Synthetic oligonucleotide
  Sense strand starting at position 3354 of SEQ ID NO: 588902
agugaaauaucgguucgug

SEQ ID NO: 897389 - RNA, 19 nt, Artificial Sequence
  Description of Artificial Sequence: Synthetic oligonucleotide
  Antisense strand to SEQ ID NO: 897388
cacgaaccgauauuucacu

SEQ ID NO: 897390 - RNA, 19 nt, Artificial Sequence
  Description of Artificial Sequence: Synthetic oligonucleotide
  Sense strand starting at position 3357 of SEQ ID NO: 588902
gaaauaucgguucgugccu

SEQ ID NO: 897391 - RNA, 19 nt, Artificial Sequence
  Description of Artificial Sequence: Synthetic oligonucleotide
  Antisense strand to SEQ ID NO: 897390
aggcacgaaccgauauuuc

SEQ ID NO: 897392 - RNA, 19 nt, Artificial Sequence
  Description of Artificial Sequence: Synthetic oligonucleotide
  Sense strand starting at position 3454 of SEQ ID NO: 588902
ugagcuccuugucagauau

SEQ ID NO: 897393 - RNA, 19 nt, Artificial Sequence
  Description of Artificial Sequence: Synthetic oligonucleotide
  Antisense strand to SEQ ID NO: 897392
auaucugacaaggagcuca

SEQ ID NO: 897394 - RNA, 19 nt, Artificial Sequence
  Description of Artificial Sequence: Synthetic oligonucleotide
  Sense strand starting at position 3461 of SEQ ID NO: 588902
cuugucagauaugguuuau

SEQ ID NO: 897395 - RNA, 19 nt, Artificial Sequence
  Description of Artificial Sequence: Synthetic oligonucleotide
  Antisense strand to SEQ ID NO: 897394
auaaaccauaucugacaag

SEQ ID NO: 897396 - RNA, 19 nt, Artificial Sequence
  Description of Artificial Sequence: Synthetic oligonucleotide
  Sense strand starting at position 3472 of SEQ ID NO: 588902
ugguuuaucaggugugguu

SEQ ID NO: 897397 - RNA, 19 nt, Artificial Sequence
  Description of Artificial Sequence: Synthetic oligonucleotide
  Antisense strand to SEQ ID NO: 897396
aaccacaccugauaaacca

SEQ ID NO: 897398 - RNA, 19 nt, Artificial Sequence
  Description of Artificial Sequence: Synthetic oligonucleotide
  Sense strand starting at position 28 of SEQ ID NO: 588903
gagauuuguuagccuggca

SEQ ID NO: 897399 - RNA, 19 nt, Artificial Sequence
  Description of Artificial Sequence: Synthetic oligonucleotide
  Antisense strand to SEQ ID NO: 897398
ugccaggcuaacaaaucuc

SEQ ID NO: 897400 - RNA, 19 nt, Artificial Sequence
  Description of Artificial Sequence: Synthetic oligonucleotide
  Sense strand starting at position 64 of SEQ ID NO: 588903
gccugcugcccauaucaca

SEQ ID NO: 897401 - RNA, 19 nt, Artificial Sequence
  Description of Artificial Sequence: Synthetic oligonucleotide
  Antisense strand to SEQ ID NO: 897400
ugugauaugggcagcaggc

SEQ ID NO: 897402 - RNA, 19 nt, Artificial Sequence
  Description of Artificial Sequence: Synthetic oligonucleotide
  Sense strand starting at position 94 of SEQ ID NO: 588903
ccaggaccucaccguauau

SEQ ID NO: 897403 - RNA, 19 nt, Artificial Sequence
  Description of Artificial Sequence: Synthetic oligonucleotide
  Antisense strand to SEQ ID NO: 897402
auauacggugagguccugg

SEQ ID NO: 897404 - RNA, 19 nt, Artificial Sequence
  Description of Artificial Sequence: Synthetic oligonucleotide
  Sense strand starting at position 96 of SEQ ID NO: 588903
aggaccucaccguauauga

SEQ ID NO: 897405 - RNA, 19 nt, Artificial Sequence
  Description of Artificial Sequence: Synthetic oligonucleotide
  Antisense strand to SEQ ID NO: 897404
ucauauacggugagguccu

SEQ ID NO: 897406 - RNA, 19 nt, Artificial Sequence
  Description of Artificial Sequence: Synthetic oligonucleotide
  Sense strand starting at position 116 of SEQ ID NO: 588903
guccuaugaccucacuaua

SEQ ID NO: 897407 - RNA, 19 nt, Artificial Sequence
  Description of Artificial Sequence: Synthetic oligonucleotide
  Antisense strand to SEQ ID NO: 897406
uauagugaggucauaggac

SEQ ID NO: 897408 - RNA, 19 nt, Artificial Sequence
  Description of Artificial Sequence: Synthetic oligonucleotide
  Sense strand starting at position 355 of SEQ ID NO: 588903
accugaauaguauguuaua

SEQ ID NO: 897409 - RNA, 19 nt, Artificial Sequence
  Description of Artificial Sequence: Synthetic oligonucleotide
  Antisense strand to SEQ ID NO: 897408
uauaacauacuauucaggu

SEQ ID NO: 897410 - RNA, 19 nt, Artificial Sequence
  Description of Artificial Sequence: Synthetic oligonucleotide
  Sense strand starting at position 356 of SEQ ID NO: 588903
ccugaauaguauguuauau

SEQ ID NO: 897411 - RNA, 19 nt, Artificial Sequence
  Description of Artificial Sequence: Synthetic oligonucleotide
  Antisense strand to SEQ ID NO: 897410
auauaacauacuauucagg

SEQ ID NO: 897412 - RNA, 19 nt, Artificial Sequence
  Description of Artificial Sequence: Synthetic oligonucleotide
  Sense strand starting at position 367 of SEQ ID NO: 588903
uguuauaugcaaugaagau

SEQ ID NO: 897413 - RNA, 19 nt, Artificial Sequence
  Description of Artificial Sequence: Synthetic oligonucleotide
  Antisense strand to SEQ ID NO: 897412
aucuucauugcauauaaca

SEQ ID NO: 897414 - RNA, 19 nt, Artificial Sequence
  Description of Artificial Sequence: Synthetic oligonucleotide
  Sense strand starting at position 406 of SEQ ID NO: 588903
gaagucaaucuguggaaga

SEQ ID NO: 897415 - RNA, 19 nt, Artificial Sequence
  Description of Artificial Sequence: Synthetic oligonucleotide
  Antisense strand to SEQ ID NO: 897414
ucuuccacagauugacuuc

SEQ ID NO: 897416 - RNA, 19 nt, Artificial Sequence
  Description of Artificial Sequence: Synthetic oligonucleotide
  Sense strand starting at position 608 of SEQ ID NO: 588903
gaauccgagcauugaggaa

SEQ ID NO: 897417 - RNA, 19 nt, Artificial Sequence
  Description of Artificial Sequence: Synthetic oligonucleotide
  Antisense strand to SEQ ID NO: 897416
uuccucaaugcucggauuc

SEQ ID NO: 897418 - RNA, 19 nt, Artificial Sequence
  Description of Artificial Sequence: Synthetic oligonucleotide
  Sense strand starting at position 626 of SEQ ID NO: 588903
agucaaaguacguaugcaa

SEQ ID NO: 897419 - RNA, 19 nt, Artificial Sequence
  Description of Artificial Sequence: Synthetic oligonucleotide
  Antisense strand to SEQ ID NO: 897418
uugcauacguacuuugacu

SEQ ID NO: 897420 - RNA, 19 nt, Artificial Sequence
  Description of Artificial Sequence: Synthetic oligonucleotide
  Sense strand starting at position 745 of SEQ ID NO: 588903
cuuuguccugcccguaaau

SEQ ID NO: 897421 - RNA, 19 nt, Artificial Sequence
  Description of Artificial Sequence: Synthetic oligonucleotide
  Antisense strand to SEQ ID NO: 897420
auuuacgggcaggacaaag

SEQ ID NO: 897422 - RNA, 19 nt, Artificial Sequence
  Description of Artificial Sequence: Synthetic oligonucleotide
  Sense strand starting at position 845 of SEQ ID NO: 588903
gacugcaucuaguaacuga

SEQ ID NO: 897423 - RNA, 19 nt, Artificial Sequence
  Description of Artificial Sequence: Synthetic oligonucleotide
  Antisense strand to SEQ ID NO: 897422
ucaguuacuagaugcaguc

SEQ ID NO: 897424 - RNA, 19 nt, Artificial Sequence
  Description of Artificial Sequence: Synthetic oligonucleotide
  Sense strand starting at position 929 of SEQ ID NO: 588903
gauagagcaggcugacauu

SEQ ID NO: 897425 - RNA, 19 nt, Artificial Sequence
  Description of Artificial Sequence: Synthetic oligonucleotide
  Antisense strand to SEQ ID NO: 897424
aaugucagccugcucuauc

SEQ ID NO: 897426 - RNA, 19 nt, Artificial Sequence
  Description of Artificial Sequence: Synthetic oligonucleotide
  Sense strand starting at position 938 of SEQ ID NO: 588903
ggcugacauuaccuuugaa

SEQ ID NO: 897427 - RNA, 19 nt, Artificial Sequence
  Description of Artificial Sequence: Synthetic oligonucleotide
  Antisense strand to SEQ ID NO: 897426
uucaaagguaaugucagcc

SEQ ID NO: 897428 - RNA, 19 nt, Artificial Sequence
  Description of Artificial Sequence: Synthetic oligonucleotide
  Sense strand starting at position 941 of SEQ ID NO: 588903
ugacauuaccuuugaaugu

SEQ ID NO: 897429 - RNA, 19 nt, Artificial Sequence
  Description of Artificial Sequence: Synthetic oligonucleotide
  Antisense strand to SEQ ID NO: 897428
acauucaaagguaauguca

SEQ ID NO: 897430 - RNA, 19 nt, Artificial Sequence
  Description of Artificial Sequence: Synthetic oligonucleotide
  Sense strand starting at position 988 of SEQ ID NO: 588903
cccugaugcugagaacaaa

SEQ ID NO: 897431 - RNA, 19 nt, Artificial Sequence
  Description of Artificial Sequence: Synthetic oligonucleotide
  Antisense strand to SEQ ID NO: 897430
uuuguucucagcaucaggg

SEQ ID NO: 897432 - RNA, 19 nt, Artificial Sequence
  Description of Artificial Sequence: Synthetic oligonucleotide
  Sense strand starting at position 1026 of SEQ ID NO: 588903
gggacucacuucucucacu

SEQ ID NO: 897433 - RNA, 19 nt, Artificial Sequence
  Description of Artificial Sequence: Synthetic oligonucleotide
  Antisense strand to SEQ ID NO: 897432
agugagagaagugaguccc

SEQ ID NO: 897434 - RNA, 19 nt, Artificial Sequence
  Description of Artificial Sequence: Synthetic oligonucleotide
  Sense strand starting at position 1114 of SEQ ID NO: 588903
auagaaauauguuccuguu

SEQ ID NO: 897435 - RNA, 19 nt, Artificial Sequence
  Description of Artificial Sequence: Synthetic oligonucleotide
  Antisense strand to SEQ ID NO: 897434
aacaggaacauauuucuau

SEQ ID NO: 897436 - RNA, 19 nt, Artificial Sequence
  Description of Artificial Sequence: Synthetic oligonucleotide
  Sense strand starting at position 1116 of SEQ ID NO: 588903
agaaauauguuccuguuau

SEQ ID NO: 897437 - RNA, 19 nt, Artificial Sequence
  Description of Artificial Sequence: Synthetic oligonucleotide
  Antisense strand to SEQ ID NO: 897436
auaacaggaacauauuucu

SEQ ID NO: 897438 - RNA, 19 nt, Artificial Sequence
  Description of Artificial Sequence: Synthetic oligonucleotide
  Sense strand starting at position 1333 of SEQ ID NO: 588903
cucagagacucucagcauu

SEQ ID NO: 897439 - RNA, 19 nt, Artificial Sequence
  Description of Artificial Sequence: Synthetic oligonucleotide
  Antisense strand to SEQ ID NO: 897438
aaugcugagagucucugag

SEQ ID NO: 897440 - RNA, 19 nt, Artificial Sequence
  Description of Artificial Sequence: Synthetic oligonucleotide
  Sense strand starting at position 1336 of SEQ ID NO: 588903
agagacucucagcauuacu

SEQ ID NO: 897441 - RNA, 19 nt, Artificial Sequence
  Description of Artificial Sequence: Synthetic oligonucleotide
  Antisense strand to SEQ ID NO: 897440
aguaaugcugagagucucu

SEQ ID NO: 897442 - RNA, 19 nt, Artificial Sequence
  Description of Artificial Sequence: Synthetic oligonucleotide
  Sense strand starting at position 1347 of SEQ ID NO: 588903
gcauuacuccucuggucag

SEQ ID NO: 897443 - RNA, 19 nt, Artificial Sequence
  Description of Artificial Sequence: Synthetic oligonucleotide
  Antisense strand to SEQ ID NO: 897442
cugaccagaggaguaaugc

SEQ ID NO: 897444 - RNA, 19 nt, Artificial Sequence
  Description of Artificial Sequence: Synthetic oligonucleotide
  Sense strand starting at position 1621 of SEQ ID NO: 588903
uccauagaagagugaaguu

SEQ ID NO: 897445 - RNA, 19 nt, Artificial Sequence
  Description of Artificial Sequence: Synthetic oligonucleotide
  Antisense strand to SEQ ID NO: 897444
aacuucacucuucuaugga

SEQ ID NO: 897446 - RNA, 19 nt, Artificial Sequence
  Description of Artificial Sequence: Synthetic oligonucleotide
  Sense strand starting at position 1707 of SEQ ID NO: 588903
ggaauaggauugggaaaca

SEQ ID NO: 897447 - RNA, 19 nt, Artificial Sequence
  Description of Artificial Sequence: Synthetic oligonucleotide
  Antisense strand to SEQ ID NO: 897446
uguuucccaauccuauucc

SEQ ID NO: 897448 - RNA, 19 nt, Artificial Sequence
  Description of Artificial Sequence: Synthetic oligonucleotide
  Sense strand starting at position 2050 of SEQ ID NO: 588903
acagaagguuucuaagggu

SEQ ID NO: 897449 - RNA, 19 nt, Artificial Sequence
  Description of Artificial Sequence: Synthetic oligonucleotide
  Antisense strand to SEQ ID NO: 897448
acccuuagaaaccuucugu

SEQ ID NO: 897450 - RNA, 19 nt, Artificial Sequence
  Description of Artificial Sequence: Synthetic oligonucleotide
  Sense strand starting at position 2402 of SEQ ID NO: 588903
gaacguuucugccuuacau

SEQ ID NO: 897451 - RNA, 19 nt, Artificial Sequence
  Description of Artificial Sequence: Synthetic oligonucleotide
  Antisense strand to SEQ ID NO: 897450
auguaaggcagaaacguuc

SEQ ID NO: 897452 - RNA, 19 nt, Artificial Sequence
  Description of Artificial Sequence: Synthetic oligonucleotide
  Sense strand starting at position 2404 of SEQ ID NO: 588903
acguuucugccuuacauaa

SEQ ID NO: 897453 - RNA, 19 nt, Artificial Sequence
  Description of Artificial Sequence: Synthetic oligonucleotide
  Antisense strand to SEQ ID NO: 897452
uuauguaaggcagaaacgu

SEQ ID NO: 897454 - RNA, 19 nt, Artificial Sequence
  Description of Artificial Sequence: Synthetic oligonucleotide
  Sense strand starting at position 2522 of SEQ ID NO: 588903
cagagugacugucucaaau

SEQ ID NO: 897455 - RNA, 19 nt, Artificial Sequence
  Description of Artificial Sequence: Synthetic oligonucleotide
  Antisense strand to SEQ ID NO: 897454
auuugagacagucacucug

SEQ ID NO: 897456 - RNA, 19 nt, Artificial Sequence
  Description of Artificial Sequence: Synthetic oligonucleotide
  Sense strand starting at position 2524 of SEQ ID NO: 588903
gagugacugucucaaauga

SEQ ID NO: 897457 - RNA, 19 nt, Artificial Sequence
  Description of Artificial Sequence: Synthetic oligonucleotide
  Antisense strand to SEQ ID NO: 897456
ucauuugagacagucacuc

SEQ ID NO: 897458 - RNA, 19 nt, Artificial Sequence
  Description of Artificial Sequence: Synthetic oligonucleotide
  Sense strand starting at position 2751 of SEQ ID NO: 588903
gucuguaaguccuccgcau

SEQ ID NO: 897459 - RNA, 19 nt, Artificial Sequence
  Description of Artificial Sequence: Synthetic oligonucleotide
  Antisense strand to SEQ ID NO: 897458
augcggaggacuuacagac

SEQ ID NO: 897460 - RNA, 19 nt, Artificial Sequence
  Description of Artificial Sequence: Synthetic oligonucleotide
  Sense strand starting at position 2793 of SEQ ID NO: 588903
ucauguauuccaugugcac

SEQ ID NO: 897461 - RNA, 19 nt, Artificial Sequence
  Description of Artificial Sequence: Synthetic oligonucleotide
  Antisense strand to SEQ ID NO: 897460
gugcacauggaauacauga

SEQ ID NO: 897462 - RNA, 19 nt, Artificial Sequence
  Description of Artificial Sequence: Synthetic oligonucleotide
  Sense strand starting at position 2824 of SEQ ID NO: 588903
uugguugaaacguggcaga

SEQ ID NO: 897463 - RNA, 19 nt, Artificial Sequence
  Description of Artificial Sequence: Synthetic oligonucleotide
  Antisense strand to SEQ ID NO: 897462
ucugccacguuucaaccaa

SEQ ID NO: 897464 - RNA, 19 nt, Artificial Sequence
  Description of Artificial Sequence: Synthetic oligonucleotide
  Sense strand starting at position 2863 of SEQ ID NO: 588903
ccagcuuguucugugccaa

SEQ ID NO: 897465 - RNA, 19 nt, Artificial Sequence
  Description of Artificial Sequence: Synthetic oligonucleotide
  Antisense strand to SEQ ID NO: 897464
uuggcacagaacaagcugg

SEQ ID NO: 897466 - RNA, 19 nt, Artificial Sequence
  Description of Artificial Sequence: Synthetic oligonucleotide
  Sense strand starting at position 3162 of SEQ ID NO: 588903
ucugaaguuagugagguuu

SEQ ID NO: 897467 - RNA, 19 nt, Artificial Sequence
  Description of Artificial Sequence: Synthetic oligonucleotide
  Antisense strand to SEQ ID NO: 897466
aaaccucacuaacuucaga

SEQ ID NO: 897468 - RNA, 19 nt, Artificial Sequence
  Description of Artificial Sequence: Synthetic oligonucleotide
  Sense strand starting at position 3168 of SEQ ID NO: 588903
guuagugagguuuaaacug

SEQ ID NO: 897469 - RNA, 19 nt, Artificial Sequence
  Description of Artificial Sequence: Synthetic oligonucleotide
  Antisense strand to SEQ ID NO: 897468
caguuuaaaccucacuaac

SEQ ID NO: 897470 - RNA, 19 nt, Artificial Sequence
  Description of Artificial Sequence: Synthetic oligonucleotide
  Sense strand starting at position 3244 of SEQ ID NO: 588903
ggaagaaguugaggcaaau

SEQ ID NO: 897471 - RNA, 19 nt, Artificial Sequence
  Description of Artificial Sequence: Synthetic oligonucleotide
  Antisense strand to SEQ ID NO: 897470
auuugccucaacuucuucc

SEQ ID NO: 897472 - RNA, 19 nt, Artificial Sequence
  Description of Artificial Sequence: Synthetic oligonucleotide
  Sense strand starting at position 3345 of SEQ ID NO: 588903
uccaauuagcagcaguuau

SEQ ID NO: 897473 - RNA, 19 nt, Artificial Sequence
  Description of Artificial Sequence: Synthetic oligonucleotide
  Antisense strand to SEQ ID NO: 897472
auaacugcugcuaauugga

SEQ ID NO: 897474 - RNA, 19 nt, Artificial Sequence
  Description of Artificial Sequence: Synthetic oligonucleotide
  Sense strand starting at position 3355 of SEQ ID NO: 588903
agcaguuaugaguggguuu

SEQ ID NO: 897475 - RNA, 19 nt, Artificial Sequence
  Description of Artificial Sequence: Synthetic oligonucleotide
  Antisense strand to SEQ ID NO: 897474
aaacccacucauaacugcu

SEQ ID NO: 897476 - RNA, 19 nt, Artificial Sequence
  Description of Artificial Sequence: Synthetic oligonucleotide
  Sense strand starting at position 3964 of SEQ ID NO: 588903
caaaguuaccuauggguca

SEQ ID NO: 897477 - RNA, 19 nt, Artificial Sequence
  Description of Artificial Sequence: Synthetic oligonucleotide
  Antisense strand to SEQ ID NO: 897476
ugacccauagguaacuuug

SEQ ID NO: 897478 - RNA, 19 nt, Artificial Sequence
  Description of Artificial Sequence: Synthetic oligonucleotide
  Sense strand starting at position 202 of SEQ ID NO: 588906
cucaccuuuccagaaggua

SEQ ID NO: 897479 - RNA, 19 nt, Artificial Sequence
  Description of Artificial Sequence: Synthetic oligonucleotide
  Antisense strand to SEQ ID NO: 897478
uaccuucuggaaaggugag

SEQ ID NO: 897480 - RNA, 19 nt, Artificial Sequence
  Description of Artificial Sequence: Synthetic oligonucleotide
  Sense strand starting at position 420 of SEQ ID NO: 588906
gaagguuuccacugugcag

SEQ ID NO: 897481 - RNA, 19 nt, Artificial Sequence
  Description of Artificial Sequence: Synthetic oligonucleotide
  Antisense strand to SEQ ID NO: 897480
cugcacaguggaaaccuuc

SEQ ID NO: 897482 - RNA, 19 nt, Artificial Sequence
  Description of Artificial Sequence: Synthetic oligonucleotide
  Sense strand starting at position 510 of SEQ ID NO: 588906
gcaaauggguggucucaaa

SEQ ID NO: 897483 - RNA, 19 nt, Artificial Sequence
  Description of Artificial Sequence: Synthetic oligonucleotide
  Antisense strand to SEQ ID NO: 897482
uuugagaccacccauuugc

SEQ ID NO: 897484 - RNA, 19 nt, Artificial Sequence
  Description of Artificial Sequence: Synthetic oligonucleotide
  Sense strand starting at position 517 of SEQ ID NO: 588906
gguggucucaaagaggagu

SEQ ID NO: 897485 - RNA, 19 nt, Artificial Sequence
  Description of Artificial Sequence: Synthetic oligonucleotide
  Antisense strand to SEQ ID NO: 897484
acuccucuuugagaccacc

SEQ ID NO: 897486 - RNA, 19 nt, Artificial Sequence
  Description of Artificial Sequence: Synthetic oligonucleotide
  Sense strand starting at position 999 of SEQ ID NO: 588906
uacucauguuuaccgugaa

SEQ ID NO: 897487 - RNA, 19 nt, Artificial Sequence
  Description of Artificial Sequence: Synthetic oligonucleotide
  Antisense strand to SEQ ID NO: 897486
uucacgguaaacaugagua

SEQ ID NO: 897488 - RNA, 19 nt, Artificial Sequence
  Description of Artificial Sequence: Synthetic oligonucleotide
  Sense strand starting at position 1002 of SEQ ID NO: 588906
ucauguuuaccgugaauga

SEQ ID NO: 897489 - RNA, 19 nt, Artificial Sequence
  Description of Artificial Sequence: Synthetic oligonucleotide
  Antisense strand to SEQ ID NO: 897488
ucauucacgguaaacauga

SEQ ID NO: 897490 - RNA, 19 nt, Artificial Sequence
  Description of Artificial Sequence: Synthetic oligonucleotide
  Sense strand starting at position 1003 of SEQ ID NO: 588906
cauguuuaccgugaaugaa

SEQ ID NO: 897491 - RNA, 19 nt, Artificial Sequence
  Description of Artificial Sequence: Synthetic oligonucleotide
  Antisense strand to SEQ ID NO: 897490
uucauucacgguaaacaug

SEQ ID NO: 897492 - RNA, 19 nt, Artificial Sequence
  Description of Artificial Sequence: Synthetic oligonucleotide
  Sense strand starting at position 1006 of SEQ ID NO: 588906
guuuaccgugaaugaaaug

SEQ ID NO: 897493 - RNA, 19 nt, Artificial Sequence
  Description of Artificial Sequence: Synthetic oligonucleotide
  Antisense strand to SEQ ID NO: 897492
cauuucauucacgguaaac

SEQ ID NO: 897494 - RNA, 19 nt, Artificial Sequence
  Description of Artificial Sequence: Synthetic oligonucleotide
  Sense strand starting at position 1055 of SEQ ID NO: 588906
ggaaggguugucuguguga

SEQ ID NO: 897495 - RNA, 19 nt, Artificial Sequence
  Description of Artificial Sequence: Synthetic oligonucleotide
  Antisense strand to SEQ ID NO: 897494
ucacacagacaacccuucc

SEQ ID NO: 897496 - RNA, 19 nt, Artificial Sequence
  Description of Artificial Sequence: Synthetic oligonucleotide
  Sense strand starting at position 1057 of SEQ ID NO: 588906
aaggguugucugugugacu

SEQ ID NO: 897497 - RNA, 19 nt, Artificial Sequence
  Description of Artificial Sequence: Synthetic oligonucleotide
  Antisense strand to SEQ ID NO: 897496
agucacacagacaacccuu

SEQ ID NO: 897498 - RNA, 19 nt, Artificial Sequence
  Description of Artificial Sequence: Synthetic oligonucleotide
  Sense strand starting at position 1156 of SEQ ID NO: 588906
guaggauucugcuuuggau

SEQ ID NO: 897499 - RNA, 19 nt, Artificial Sequence
  Description of Artificial Sequence: Synthetic oligonucleotide
  Antisense strand to SEQ ID NO: 897498
auccaaagcagaauccuac

SEQ ID NO: 897500 - RNA, 19 nt, Artificial Sequence
  Description of Artificial Sequence: Synthetic oligonucleotide
  Sense strand starting at position 1158 of SEQ ID NO: 588906
aggauucugcuuuggauga

SEQ ID NO: 897501 - RNA, 19 nt, Artificial Sequence
  Description of Artificial Sequence: Synthetic oligonucleotide
  Antisense strand to SEQ ID NO: 897500
ucauccaaagcagaauccu

SEQ ID NO: 897502 - RNA, 19 nt, Artificial Sequence
  Description of Artificial Sequence: Synthetic oligonucleotide
  Sense strand starting at position 1162 of SEQ ID NO: 588906
uucugcuuuggaugagaau

SEQ ID NO: 897503 - RNA, 19 nt, Artificial Sequence
  Description of Artificial Sequence: Synthetic oligonucleotide
  Antisense strand to SEQ ID NO: 897502
auucucauccaaagcagaa

SEQ ID NO: 897504 - RNA, 19 nt, Artificial Sequence
  Description of Artificial Sequence: Synthetic oligonucleotide
  Sense strand starting at position 1163 of SEQ ID NO: 588906
ucugcuuuggaugagaaug

SEQ ID NO: 897505 - RNA, 19 nt, Artificial Sequence
  Description of Artificial Sequence: Synthetic oligonucleotide
  Antisense strand to SEQ ID NO: 897504
cauucucauccaaagcaga

SEQ ID NO: 897506 - RNA, 19 nt, Artificial Sequence
  Description of Artificial Sequence: Synthetic oligonucleotide
  Sense strand starting at position 1571 of SEQ ID NO: 588906
gucucacauugcuuaggaa

SEQ ID NO: 897507 - RNA, 19 nt, Artificial Sequence
  Description of Artificial Sequence: Synthetic oligonucleotide
  Antisense strand to SEQ ID NO: 897506
uuccuaagcaaugugagac

SEQ ID NO: 897508 - RNA, 19 nt, Artificial Sequence
  Description of Artificial Sequence: Synthetic oligonucleotide
  Sense strand starting at position 1572 of SEQ ID NO: 588906
ucucacauugcuuaggaaa

SEQ ID NO: 897509 - RNA, 19 nt, Artificial Sequence
  Description of Artificial Sequence: Synthetic oligonucleotide
  Antisense strand to SEQ ID NO: 897508
uuuccuaagcaaugugaga

SEQ ID NO: 897510 - RNA, 19 nt, Artificial Sequence
  Description of Artificial Sequence: Synthetic oligonucleotide
  Sense strand starting at position 2257 of SEQ ID NO: 588906
cuccuuguaccuuggagau

SEQ ID NO: 897511 - RNA, 19 nt, Artificial Sequence
  Description of Artificial Sequence: Synthetic oligonucleotide
  Antisense strand to SEQ ID NO: 897510
aucuccaagguacaaggag

SEQ ID NO: 897512 - RNA, 19 nt, Artificial Sequence
  Description of Artificial Sequence: Synthetic oligonucleotide
  Sense strand starting at position 2312 of SEQ ID NO: 588906
cugugaaauucuccuagga

SEQ ID NO: 897513 - RNA, 19 nt, Artificial Sequence
  Description of Artificial Sequence: Synthetic oligonucleotide
  Antisense strand to SEQ ID NO: 897512
uccuaggagaauuucacag

SEQ ID NO: 897514 - RNA, 19 nt, Artificial Sequence
  Description of Artificial Sequence: Synthetic oligonucleotide
  Sense strand starting at position 2333 of SEQ ID NO: 588906
uuaggugguuucuuaagga

SEQ ID NO: 897515 - RNA, 19 nt, Artificial Sequence
  Description of Artificial Sequence: Synthetic oligonucleotide
  Antisense strand to SEQ ID NO: 897514
uccuuaagaaaccaccuaa

SEQ ID NO: 897516 - RNA, 19 nt, Artificial Sequence
  Description of Artificial Sequence: Synthetic oligonucleotide
  Sense strand starting at position 2615 of SEQ ID NO: 588906
auauguuguccugauccau

SEQ ID NO: 897517 - RNA, 19 nt, Artificial Sequence
  Description of Artificial Sequence: Synthetic oligonucleotide
  Antisense strand to SEQ ID NO: 897516
auggaucaggacaacauau

SEQ ID NO: 897518 - RNA, 19 nt, Artificial Sequence
  Description of Artificial Sequence: Synthetic oligonucleotide
  Sense strand starting at position 2681 of SEQ ID NO: 588906
gaacaugugugcuccacca

SEQ ID NO: 897519 - RNA, 19 nt, Artificial Sequence
  Description of Artificial Sequence: Synthetic oligonucleotide
  Antisense strand to SEQ ID NO: 897518
ugguggagcacacauguuc

SEQ ID NO: 897520 - RNA, 19 nt, Artificial Sequence
  Description of Artificial Sequence: Synthetic oligonucleotide
  Sense strand starting at position 2791 of SEQ ID NO: 588906
ucagcagacucuucugaga

SEQ ID NO: 897521 - RNA, 19 nt, Artificial Sequence
  Description of Artificial Sequence: Synthetic oligonucleotide
  Antisense strand to SEQ ID NO: 897520
ucucagaagagucugcuga

SEQ ID NO: 897522 - RNA, 19 nt, Artificial Sequence
  Description of Artificial Sequence: Synthetic oligonucleotide
  Sense strand starting at position 3092 of SEQ ID NO: 588906
auuuguauucucugcucca

SEQ ID NO: 897523 - RNA, 19 nt, Artificial Sequence
  Description of Artificial Sequence: Synthetic oligonucleotide
  Antisense strand to SEQ ID NO: 897522
uggagcagagaauacaaau

SEQ ID NO: 897524 - RNA, 19 nt, Artificial Sequence
  Description of Artificial Sequence: Synthetic oligonucleotide
  Sense strand starting at position 3156 of SEQ ID NO: 588906
gccucaugucuggccugua

SEQ ID NO: 897525 - RNA, 19 nt, Artificial Sequence
  Description of Artificial Sequence: Synthetic oligonucleotide
  Antisense strand to SEQ ID NO: 897524
uacaggccagacaugaggc

SEQ ID NO: 897526 - RNA, 19 nt, Artificial Sequence
  Description of Artificial Sequence: Synthetic oligonucleotide
  Sense strand starting at position 3189 of SEQ ID NO: 588906
uacuuugagcccuggagga

SEQ ID NO: 897527 - RNA, 19 nt, Artificial Sequence
  Description of Artificial Sequence: Synthetic oligonucleotide
  Antisense strand to SEQ ID NO: 897526
uccuccagggcucaaagua

SEQ ID NO: 897528 - RNA, 19 nt, Artificial Sequence
  Description of Artificial Sequence: Synthetic oligonucleotide
  Sense strand starting at position 3203 of SEQ ID NO: 588906
gaggaaauguucucauuau

SEQ ID NO: 897529 - RNA, 19 nt, Artificial Sequence
  Description of Artificial Sequence: Synthetic oligonucleotide
  Antisense strand to SEQ ID NO: 897528
auaaugagaacauuuccuc

SEQ ID NO: 897530 - RNA, 19 nt, Artificial Sequence
  Description of Artificial Sequence: Synthetic oligonucleotide
  Sense strand starting at position 3254 of SEQ ID NO: 588906
aggauuagagauugcacuu

SEQ ID NO: 897531 - RNA, 19 nt, Artificial Sequence
  Description of Artificial Sequence: Synthetic oligonucleotide
  Antisense strand to SEQ ID NO: 897530
aagugcaaucucuaauccu

SEQ ID NO: 897532 - RNA, 19 nt, Artificial Sequence
  Description of Artificial Sequence: Synthetic oligonucleotide
  Sense strand starting at position 3345 of SEQ ID NO: 588906
cguucuauauagccucaau

SEQ ID NO: 897533 - RNA, 19 nt, Artificial Sequence
  Description of Artificial Sequence: Synthetic oligonucleotide
  Antisense strand to SEQ ID NO: 897532
auugaggcuauauagaacg

SEQ ID NO: 897534 - RNA, 19 nt, Artificial Sequence
  Description of Artificial Sequence: Synthetic oligonucleotide
  Sense strand starting at position 3370 of SEQ ID NO: 588906
gagaccaucugagucuauu

SEQ ID NO: 897535 - RNA, 19 nt, Artificial Sequence
  Description of Artificial Sequence: Synthetic oligonucleotide
  Antisense strand to SEQ ID NO: 897534
aauagacucagauggucuc

SEQ ID NO: 897536 - RNA, 19 nt, Artificial Sequence
  Description of Artificial Sequence: Synthetic oligonucleotide
  Sense strand starting at position 3380 of SEQ ID NO: 588906
gagucuauuugggucuguu

SEQ ID NO: 897537 - RNA, 19 nt, Artificial Sequence
  Description of Artificial Sequence: Synthetic oligonucleotide
  Antisense strand to SEQ ID NO: 897536
aacagacccaaauagacuc

SEQ ID NO: 897538 - RNA, 19 nt, Artificial Sequence
  Description of Artificial Sequence: Synthetic oligonucleotide
  Sense strand starting at position 3388 of SEQ ID NO: 588906
uugggucuguucucaugaa

SEQ ID NO: 897539 - RNA, 19 nt, Artificial Sequence
  Description of Artificial Sequence: Synthetic oligonucleotide
  Antisense strand to SEQ ID NO: 897538
uucaugagaacagacccaa

SEQ ID NO: 897540 - RNA, 19 nt, Artificial Sequence
  Description of Artificial Sequence: Synthetic oligonucleotide
  Sense strand starting at position 3392 of SEQ ID NO: 588906
gucuguucucaugaacaug

SEQ ID NO: 897541 - RNA, 19 nt, Artificial Sequence
  Description of Artificial Sequence: Synthetic oligonucleotide
  Antisense strand to SEQ ID NO: 897540
cauguucaugagaacagac

SEQ ID NO: 897542 - RNA, 19 nt, Artificial Sequence
  Description of Artificial Sequence: Synthetic oligonucleotide
  Sense strand starting at position 3462 of SEQ ID NO: 588906
gucucuuccuccuuuauga

SEQ ID NO: 897543 - RNA, 19 nt, Artificial Sequence
  Description of Artificial Sequence: Synthetic oligonucleotide
  Antisense strand to SEQ ID NO: 897542
ucauaaaggaggaagagac

SEQ ID NO: 897544 - RNA, 19 nt, Artificial Sequence
  Description of Artificial Sequence: Synthetic oligonucleotide
  Sense strand starting at position 3472 of SEQ ID NO: 588906
ccuuuaugagauugucacu

SEQ ID NO: 897545 - RNA, 19 nt, Artificial Sequence
  Description of Artificial Sequence: Synthetic oligonucleotide
  Antisense strand to SEQ ID NO: 897544
agugacaaucucauaaagg

SEQ ID NO: 897546 - RNA, 19 nt, Artificial Sequence
  Description of Artificial Sequence: Synthetic oligonucleotide
  Sense strand starting at position 3497 of SEQ ID NO: 588906
gcaugacagucccuaaugu

SEQ ID NO: 897547 - RNA, 19 nt, Artificial Sequence
  Description of Artificial Sequence: Synthetic oligonucleotide
  Antisense strand to SEQ ID NO: 897546
acauuagggacugucaugc

SEQ ID NO: 897548 - RNA, 19 nt, Artificial Sequence
  Description of Artificial Sequence: Synthetic oligonucleotide
  Sense strand starting at position 3563 of SEQ ID NO: 588906
uaggaucacugggaaguau

SEQ ID NO: 897549 - RNA, 19 nt, Artificial Sequence
  Description of Artificial Sequence: Synthetic oligonucleotide
  Antisense strand to SEQ ID NO: 897548
auacuucccagugauccua

SEQ ID NO: 897550 - RNA, 19 nt, Artificial Sequence
  Description of Artificial Sequence: Synthetic oligonucleotide
  Sense strand starting at position 3631 of SEQ ID NO: 588906
gggucucaucuugaccuau

SEQ ID NO: 897551 - RNA, 19 nt, Artificial Sequence
  Description of Artificial Sequence: Synthetic oligonucleotide
  Antisense strand to SEQ ID NO: 897550
auaggucaagaugagaccc

SEQ ID NO: 897552 - RNA, 19 nt, Artificial Sequence
  Description of Artificial Sequence: Synthetic oligonucleotide
  Sense strand starting at position 3744 of SEQ ID NO: 588906
gagacaacuggucgcauca

SEQ ID NO: 897553 - RNA, 19 nt, Artificial Sequence
  Description of Artificial Sequence: Synthetic oligonucleotide
  Antisense strand to SEQ ID NO: 897552
ugaugcgaccaguugucuc

SEQ ID NO: 897554 - RNA, 19 nt, Artificial Sequence
  Description of Artificial Sequence: Synthetic oligonucleotide
  Sense strand starting at position 3819 of SEQ ID NO: 588906
uucgccuuucuggauaaau

SEQ ID NO: 897555 - RNA, 19 nt, Artificial Sequence
  Description of Artificial Sequence: Synthetic oligonucleotide
  Antisense strand to SEQ ID NO: 897554
auuuauccagaaaggcgaa

SEQ ID NO: 897556 - RNA, 19 nt, Artificial Sequence
  Description of Artificial Sequence: Synthetic oligonucleotide
  Sense strand starting at position 3821 of SEQ ID NO: 588906
cgccuuucuggauaaauga

SEQ ID NO: 897557 - RNA, 19 nt, Artificial Sequence
  Description of Artificial Sequence: Synthetic oligonucleotide
  Antisense strand to SEQ ID NO: 897556
ucauuuauccagaaaggcg

SEQ ID NO: 897558 - RNA, 19 nt, Artificial Sequence
  Description of Artificial Sequence: Synthetic oligonucleotide
  Sense strand starting at position 642 of SEQ ID NO: 588907
ucacuuagcuucucaagag

SEQ ID NO: 897559 - RNA, 19 nt, Artificial Sequence
  Description of Artificial Sequence: Synthetic oligonucleotide
  Antisense strand to SEQ ID NO: 897558
cucuugagaagcuaaguga

SEQ ID NO: 897560 - RNA, 19 nt, Artificial Sequence
  Description of Artificial Sequence: Synthetic oligonucleotide
  Sense strand starting at position 695 of SEQ ID NO: 588907
cugguauagcacuacuaau

SEQ ID NO: 897561 - RNA, 19 nt, Artificial Sequence
  Description of Artificial Sequence: Synthetic oligonucleotide
  Antisense strand to SEQ ID NO: 897560
auuaguagugcuauaccag

SEQ ID NO: 897562 - RNA, 19 nt, Artificial Sequence
  Description of Artificial Sequence: Synthetic oligonucleotide
  Sense strand starting at position 756 of SEQ ID NO: 588907
aggaaauguugaucaccuu

SEQ ID NO: 897563 - RNA, 19 nt, Artificial Sequence
  Description of Artificial Sequence: Synthetic oligonucleotide
  Antisense strand to SEQ ID NO: 897562
aaggugaucaacauuuccu

SEQ ID NO: 897564 - RNA, 19 nt, Artificial Sequence
  Description of Artificial Sequence: Synthetic oligonucleotide
  Sense strand starting at position 807 of SEQ ID NO: 588907
uugccaauuguauggaaga

SEQ ID NO: 897565 - RNA, 19 nt, Artificial Sequence
  Description of Artificial Sequence: Synthetic oligonucleotide
  Antisense strand to SEQ ID NO: 897564
ucuuccauacaauuggcaa

SEQ ID NO: 897566 - RNA, 19 nt, Artificial Sequence
  Description of Artificial Sequence: Synthetic oligonucleotide
  Sense strand starting at position 851 of SEQ ID NO: 588907
guuagcacugugcuuguaa

SEQ ID NO: 897567 - RNA, 19 nt, Artificial Sequence
  Description of Artificial Sequence: Synthetic oligonucleotide
  Antisense strand to SEQ ID NO: 897566
uuacaagcacagugcuaac

SEQ ID NO: 897568 - RNA, 19 nt, Artificial Sequence
  Description of Artificial Sequence: Synthetic oligonucleotide
  Sense strand starting at position 981 of SEQ ID NO: 588907
aguagaaaccauggaguca

SEQ ID NO: 897569 - RNA, 19 nt, Artificial Sequence
  Description of Artificial Sequence: Synthetic oligonucleotide
  Antisense strand to SEQ ID NO: 897568
ugacuccaugguuucuacu

SEQ ID NO: 897570 - RNA, 19 nt, Artificial Sequence
  Description of Artificial Sequence: Synthetic oligonucleotide
  Sense strand starting at position 1020 of SEQ ID NO: 588907
uaggaaggauuugguaauu

SEQ ID NO: 897571 - RNA, 19 nt, Artificial Sequence
  Description of Artificial Sequence: Synthetic oligonucleotide
  Antisense strand to SEQ ID NO: 897570
aauuaccaaauccuuccua

SEQ ID NO: 897572 - RNA, 19 nt, Artificial Sequence
  Description of Artificial Sequence: Synthetic oligonucleotide
  Sense strand starting at position 1033 of SEQ ID NO: 588907
guaauuacgaaauagugau

SEQ ID NO: 897573 - RNA, 19 nt, Artificial Sequence
  Description of Artificial Sequence: Synthetic oligonucleotide
  Antisense strand to SEQ ID NO: 897572
aucacuauuucguaauuac

SEQ ID NO: 897574 - RNA, 19 nt, Artificial Sequence
  Description of Artificial Sequence: Synthetic oligonucleotide
  Sense strand starting at position 1039 of SEQ ID NO: 588907
acgaaauagugauugauug

SEQ ID NO: 897575 - RNA, 19 nt, Artificial Sequence
  Description of Artificial Sequence: Synthetic oligonucleotide
  Antisense strand to SEQ ID NO: 897574
caaucaaucacuauuucgu

SEQ ID NO: 897576 - RNA, 19 nt, Artificial Sequence
  Description of Artificial Sequence: Synthetic oligonucleotide
  Sense strand starting at position 1040 of SEQ ID NO: 588907
cgaaauagugauugauuga

SEQ ID NO: 897577 - RNA, 19 nt, Artificial Sequence
  Description of Artificial Sequence: Synthetic oligonucleotide
  Antisense strand to SEQ ID NO: 897576
ucaaucaaucacuauuucg

SEQ ID NO: 897578 - RNA, 19 nt, Artificial Sequence
  Description of Artificial Sequence: Synthetic oligonucleotide
  Sense strand starting at position 1255 of SEQ ID NO: 588907
aaugcaggguuguuugaaa

SEQ ID NO: 897579 - RNA, 19 nt, Artificial Sequence
  Description of Artificial Sequence: Synthetic oligonucleotide
  Antisense strand to SEQ ID NO: 897578
uuucaaacaacccugcauu

SEQ ID NO: 897580 - RNA, 19 nt, Artificial Sequence
  Description of Artificial Sequence: Synthetic oligonucleotide
  Sense strand starting at position 1302 of SEQ ID NO: 588907
gaaacauguuagcuuuaga

SEQ ID NO: 897581 - RNA, 19 nt, Artificial Sequence
  Description of Artificial Sequence: Synthetic oligonucleotide
  Antisense strand to SEQ ID NO: 897580
ucuaaagcuaacauguuuc

SEQ ID NO: 897582 - RNA, 19 nt, Artificial Sequence
  Description of Artificial Sequence: Synthetic oligonucleotide
  Sense strand starting at position 1409 of SEQ ID NO: 588907
cgaucugucccagaagaua

SEQ ID NO: 897583 - RNA, 19 nt, Artificial Sequence
  Description of Artificial Sequence: Synthetic oligonucleotide
  Antisense strand to SEQ ID NO: 897582
uaucuucugggacagaucg

SEQ ID NO: 897584 - RNA, 19 nt, Artificial Sequence
  Description of Artificial Sequence: Synthetic oligonucleotide
  Sense strand starting at position 1654 of SEQ ID NO: 588907
gcugaauaccuagagcaaa

SEQ ID NO: 897585 - RNA, 19 nt, Artificial Sequence
  Description of Artificial Sequence: Synthetic oligonucleotide
  Antisense strand to SEQ ID NO: 897584
uuugcucuagguauucagc

SEQ ID NO: 897586 - RNA, 19 nt, Artificial Sequence
  Description of Artificial Sequence: Synthetic oligonucleotide
  Sense strand starting at position 1666 of SEQ ID NO: 588907
gagcaaauguucccagaag

SEQ ID NO: 897587 - RNA, 19 nt, Artificial Sequence
  Description of Artificial Sequence: Synthetic oligonucleotide
  Antisense strand to SEQ ID NO: 897586
cuucugggaacauuugcuc

SEQ ID NO: 897588 - RNA, 19 nt, Artificial Sequence
  Description of Artificial Sequence: Synthetic oligonucleotide
  Sense strand starting at position 1933 of SEQ ID NO: 588907
gugcuagacggauagagaa

SEQ ID NO: 897589 - RNA, 19 nt, Artificial Sequence
  Description of Artificial Sequence: Synthetic oligonucleotide
  Antisense strand to SEQ ID NO: 897588
uucucuauccgucuagcac

SEQ ID NO: 897590 - RNA, 19 nt, Artificial Sequence
  Description of Artificial Sequence: Synthetic oligonucleotide
  Sense strand starting at position 2041 of SEQ ID NO: 588907
augagaucauaggucuguu

SEQ ID NO: 897591 - RNA, 19 nt, Artificial Sequence
  Description of Artificial Sequence: Synthetic oligonucleotide
  Antisense strand to SEQ ID NO: 897590
aacagaccuaugaucucau

SEQ ID NO: 897592 - RNA, 19 nt, Artificial Sequence
  Description of Artificial Sequence: Synthetic oligonucleotide
  Sense strand starting at position 2044 of SEQ ID NO: 588907
agaucauaggucuguuaua

SEQ ID NO: 897593 - RNA, 19 nt, Artificial Sequence
  Description of Artificial Sequence: Synthetic oligonucleotide
  Antisense strand to SEQ ID NO: 897592
uauaacagaccuaugaucu

SEQ ID NO: 897594 - RNA, 19 nt, Artificial Sequence
  Description of Artificial Sequence: Synthetic oligonucleotide
  Sense strand starting at position 2045 of SEQ ID NO: 588907
gaucauaggucuguuauaa

SEQ ID NO: 897595 - RNA, 19 nt, Artificial Sequence
  Description of Artificial Sequence: Synthetic oligonucleotide
  Antisense strand to SEQ ID NO: 897594
uuauaacagaccuaugauc

SEQ ID NO: 897596 - RNA, 19 nt, Artificial Sequence
  Description of Artificial Sequence: Synthetic oligonucleotide
  Sense strand starting at position 2216 of SEQ ID NO: 588907
acgugugcuaauuagaaau

SEQ ID NO: 897597 - RNA, 19 nt, Artificial Sequence
  Description of Artificial Sequence: Synthetic oligonucleotide
  Antisense strand to SEQ ID NO: 897596
auuucuaauuagcacacgu

SEQ ID NO: 897598 - RNA, 19 nt, Artificial Sequence
  Description of Artificial Sequence: Synthetic oligonucleotide
  Sense strand starting at position 2274 of SEQ ID NO: 588907
cccuguuagcagcaauaga

SEQ ID NO: 897599 - RNA, 19 nt, Artificial Sequence
  Description of Artificial Sequence: Synthetic oligonucleotide
  Antisense strand to SEQ ID NO: 897598
ucuauugcugcuaacaggg

SEQ ID NO: 897600 - RNA, 19 nt, Artificial Sequence
  Description of Artificial Sequence: Synthetic oligonucleotide
  Sense strand starting at position 2290 of SEQ ID NO: 588907
agaaauaugucagucuuuc

SEQ ID NO: 897601 - RNA, 19 nt, Artificial Sequence
  Description of Artificial Sequence: Synthetic oligonucleotide
  Antisense strand to SEQ ID NO: 897600
gaaagacugacauauuucu

SEQ ID NO: 897602 - RNA, 19 nt, Artificial Sequence
  Description of Artificial Sequence: Synthetic oligonucleotide
  Sense strand starting at position 2355 of SEQ ID NO: 588907
ugaguaguccaauggguag

SEQ ID NO: 897603 - RNA, 19 nt, Artificial Sequence
  Description of Artificial Sequence: Synthetic oligonucleotide
  Antisense strand to SEQ ID NO: 897602
cuacccauuggacuacuca

SEQ ID NO: 897604 - RNA, 19 nt, Artificial Sequence
  Description of Artificial Sequence: Synthetic oligonucleotide
  Sense strand starting at position 2359 of SEQ ID NO: 588907
uaguccaauggguaguuau

SEQ ID NO: 897605 - RNA, 19 nt, Artificial Sequence
  Description of Artificial Sequence: Synthetic oligonucleotide
  Antisense strand to SEQ ID NO: 897604
auaacuacccauuggacua

SEQ ID NO: 897606 - RNA, 19 nt, Artificial Sequence
  Description of Artificial Sequence: Synthetic oligonucleotide
  Sense strand starting at position 2433 of SEQ ID NO: 588907
aagaguucugaaugaguag

SEQ ID NO: 897607 - RNA, 19 nt, Artificial Sequence
  Description of Artificial Sequence: Synthetic oligonucleotide
  Antisense strand to SEQ ID NO: 897606
cuacucauucagaacucuu

SEQ ID NO: 897608 - RNA, 19 nt, Artificial Sequence
  Description of Artificial Sequence: Synthetic oligonucleotide
  Sense strand starting at position 2805 of SEQ ID NO: 588907
uaguguccagaucauugau

SEQ ID NO: 897609 - RNA, 19 nt, Artificial Sequence
  Description of Artificial Sequence: Synthetic oligonucleotide
  Antisense strand to SEQ ID NO: 897608
aucaaugaucuggacacua

SEQ ID NO: 897610 - RNA, 19 nt, Artificial Sequence
  Description of Artificial Sequence: Synthetic oligonucleotide
  Sense strand starting at position 2839 of SEQ ID NO: 588907
ugcugacacccagagugau

SEQ ID NO: 897611 - RNA, 19 nt, Artificial Sequence
  Description of Artificial Sequence: Synthetic oligonucleotide
  Antisense strand to SEQ ID NO: 897610
aucacucugggugucagca

SEQ ID NO: 897612 - RNA, 19 nt, Artificial Sequence
  Description of Artificial Sequence: Synthetic oligonucleotide
  Sense strand starting at position 2944 of SEQ ID NO: 588907
aauaaauagccagaguugu

SEQ ID NO: 897613 - RNA, 19 nt, Artificial Sequence
  Description of Artificial Sequence: Synthetic oligonucleotide
  Antisense strand to SEQ ID NO: 897612
acaacucuggcuauuuauu

SEQ ID NO: 897614 - RNA, 19 nt, Artificial Sequence
  Description of Artificial Sequence: Synthetic oligonucleotide
  Sense strand starting at position 3057 of SEQ ID NO: 588907
gggagauauuaucccuauu

SEQ ID NO: 897615 - RNA, 19 nt, Artificial Sequence
  Description of Artificial Sequence: Synthetic oligonucleotide
  Antisense strand to SEQ ID NO: 897614
aauagggauaauaucuccc

SEQ ID NO: 897616 - RNA, 19 nt, Artificial Sequence
  Description of Artificial Sequence: Synthetic oligonucleotide
  Sense strand starting at position 3178 of SEQ ID NO: 588907
gggucugcaauauagacau

SEQ ID NO: 897617 - RNA, 19 nt, Artificial Sequence
  Description of Artificial Sequence: Synthetic oligonucleotide
  Antisense strand to SEQ ID NO: 897616
augucuauauugcagaccc

SEQ ID NO: 897618 - RNA, 19 nt, Artificial Sequence
  Description of Artificial Sequence: Synthetic oligonucleotide
  Sense strand starting at position 3196 of SEQ ID NO: 588907
uccuguugaucucuagaga

SEQ ID NO: 897619 - RNA, 19 nt, Artificial Sequence
  Description of Artificial Sequence: Synthetic oligonucleotide
  Antisense strand to SEQ ID NO: 897618
ucucuagagaucaacagga

SEQ ID NO: 897620 - RNA, 19 nt, Artificial Sequence
  Description of Artificial Sequence: Synthetic oligonucleotide
  Sense strand starting at position 3197 of SEQ ID NO: 588907
ccuguugaucucuagagac

SEQ ID NO: 897621 - RNA, 19 nt, Artificial Sequence
  Description of Artificial Sequence: Synthetic oligonucleotide
  Antisense strand to SEQ ID NO: 897620
gucucuagagaucaacagg

SEQ ID NO: 897622 - RNA, 19 nt, Artificial Sequence
  Description of Artificial Sequence: Synthetic oligonucleotide
  Sense strand starting at position 3585 of SEQ ID NO: 588907
ugugacucuugauuacuau

SEQ ID NO: 897623 - RNA, 19 nt, Artificial Sequence
  Description of Artificial Sequence: Synthetic oligonucleotide
  Antisense strand to SEQ ID NO: 897622
auaguaaucaagagucaca

SEQ ID NO: 897624 - RNA, 19 nt, Artificial Sequence
  Description of Artificial Sequence: Synthetic oligonucleotide
  Sense strand starting at position 3586 of SEQ ID NO: 588907
gugacucuugauuacuauu

SEQ ID NO: 897625 - RNA, 19 nt, Artificial Sequence
  Description of Artificial Sequence: Synthetic oligonucleotide
  Antisense strand to SEQ ID NO: 897624
aauaguaaucaagagucac

SEQ ID NO: 897626 - RNA, 19 nt, Artificial Sequence
  Description of Artificial Sequence: Synthetic oligonucleotide
  Sense strand starting at position 3638 of SEQ ID NO: 588907
gcguuuauacccuaaauag

SEQ ID NO: 897627 - RNA, 19 nt, Artificial Sequence
  Description of Artificial Sequence: Synthetic oligonucleotide
  Antisense strand to SEQ ID NO: 897626
cuauuuaggguauaaacgc

SEQ ID NO: 897628 - RNA, 19 nt, Artificial Sequence
  Description of Artificial Sequence: Synthetic oligonucleotide
  Sense strand starting at position 3718 of SEQ ID NO: 588907
gguuaauguacauggauaa

SEQ ID NO: 897629 - RNA, 19 nt, Artificial Sequence
  Description of Artificial Sequence: Synthetic oligonucleotide
  Antisense strand to SEQ ID NO: 897628
uuauccauguacauuaacc

SEQ ID NO: 897630 - RNA, 19 nt, Artificial Sequence
  Description of Artificial Sequence: Synthetic oligonucleotide
  Sense strand starting at position 3719 of SEQ ID NO: 588907
guuaauguacauggauaaa

SEQ ID NO: 897631 - RNA, 19 nt, Artificial Sequence
  Description of Artificial Sequence: Synthetic oligonucleotide
  Antisense strand to SEQ ID NO: 897630
uuuauccauguacauuaac

SEQ ID NO: 897632 - RNA, 19 nt, Artificial Sequence
  Description of Artificial Sequence: Synthetic oligonucleotide
  Sense strand starting at position 3743 of SEQ ID NO: 588907
gucccaucacaauggguaa

SEQ ID NO: 897633 - RNA, 19 nt, Artificial Sequence
  Description of Artificial Sequence: Synthetic oligonucleotide
  Antisense strand to SEQ ID NO: 897632
uuacccauugugaugggac

SEQ ID NO: 897634 - RNA, 19 nt, Artificial Sequence
  Description of Artificial Sequence: Synthetic oligonucleotide
  Sense strand starting at position 3809 of SEQ ID NO: 588907
aucugcuauggugauauua

SEQ ID NO: 897635 - RNA, 19 nt, Artificial Sequence
  Description of Artificial Sequence: Synthetic oligonucleotide
  Antisense strand to SEQ ID NO: 897634
uaauaucaccauagcagau

SEQ ID NO: 897636 - RNA, 19 nt, Artificial Sequence
  Description of Artificial Sequence: Synthetic oligonucleotide
  Sense strand starting at position 3818 of SEQ ID NO: 588907
ggugauauuaaaugaguug

SEQ ID NO: 897637 - RNA, 19 nt, Artificial Sequence
  Description of Artificial Sequence: Synthetic oligonucleotide
  Antisense strand to SEQ ID NO: 897636
caacucauuuaauaucacc

SEQ ID NO: 897638 - RNA, 19 nt, Artificial Sequence
  Description of Artificial Sequence: Synthetic oligonucleotide
  Sense strand starting at position 1 of SEQ ID NO: 588908
agccaaauuugagacacua

SEQ ID NO: 897639 - RNA, 19 nt, Artificial Sequence
  Description of Artificial Sequence: Synthetic oligonucleotide
  Antisense strand to SEQ ID NO: 897638
uagugucucaaauuuggcu

SEQ ID NO: 897640 - RNA, 19 nt, Artificial Sequence
  Description of Artificial Sequence: Synthetic oligonucleotide
  Sense strand starting at position 148 of SEQ ID NO: 588908
auggcuguuccagggaaca

SEQ ID NO: 897641 - RNA, 19 nt, Artificial Sequence
  Description of Artificial Sequence: Synthetic oligonucleotide
  Antisense strand to SEQ ID NO: 897640
uguucccuggaacagccau

SEQ ID NO: 897642 - RNA, 19 nt, Artificial Sequence
  Description of Artificial Sequence: Synthetic oligonucleotide
  Sense strand starting at position 150 of SEQ ID NO: 588908
ggcuguuccagggaacauc

SEQ ID NO: 897643 - RNA, 19 nt, Artificial Sequence
  Description of Artificial Sequence: Synthetic oligonucleotide
  Antisense strand to SEQ ID NO: 897642
gauguucccuggaacagcc

SEQ ID NO: 897644 - RNA, 19 nt, Artificial Sequence
  Description of Artificial Sequence: Synthetic oligonucleotide
  Sense strand starting at position 307 of SEQ ID NO: 588908
cuaagaaucuaggaucuac

SEQ ID NO: 897645 - RNA, 19 nt, Artificial Sequence
  Description of Artificial Sequence: Synthetic oligonucleotide
  Antisense strand to SEQ ID NO: 897644
guagauccuagauucuuag

SEQ ID NO: 897646 - RNA, 19 nt, Artificial Sequence
  Description of Artificial Sequence: Synthetic oligonucleotide
  Sense strand starting at position 386 of SEQ ID NO: 588908
aacgaacguucuguaaauu

SEQ ID NO: 897647 - RNA, 19 nt, Artificial Sequence
  Description of Artificial Sequence: Synthetic oligonucleotide
  Antisense strand to SEQ ID NO: 897646
aauuuacagaacguucguu

SEQ ID NO: 897648 - RNA, 19 nt, Artificial Sequence
  Description of Artificial Sequence: Synthetic oligonucleotide
  Sense strand starting at position 387 of SEQ ID NO: 588908
acgaacguucuguaaauua

SEQ ID NO: 897649 - RNA, 19 nt, Artificial Sequence
  Description of Artificial Sequence: Synthetic oligonucleotide
  Antisense strand to SEQ ID NO: 897648
uaauuuacagaacguucgu

SEQ ID NO: 897650 - RNA, 19 nt, Artificial Sequence
  Description of Artificial Sequence: Synthetic oligonucleotide
  Sense strand starting at position 394 of SEQ ID NO: 588908
uucuguaaauuaccaggua

SEQ ID NO: 897651 - RNA, 19 nt, Artificial Sequence
  Description of Artificial Sequence: Synthetic oligonucleotide
  Antisense strand to SEQ ID NO: 897650
uaccugguaauuuacagaa

SEQ ID NO: 897652 - RNA, 19 nt, Artificial Sequence
  Description of Artificial Sequence: Synthetic oligonucleotide
  Sense strand starting at position 397 of SEQ ID NO: 588908
uguaaauuaccagguacua

SEQ ID NO: 897653 - RNA, 19 nt, Artificial Sequence
  Description of Artificial Sequence: Synthetic oligonucleotide
  Antisense strand to SEQ ID NO: 897652
uaguaccugguaauuuaca

SEQ ID NO: 897654 - RNA, 19 nt, Artificial Sequence
  Description of Artificial Sequence: Synthetic oligonucleotide
  Sense strand starting at position 534 of SEQ ID NO: 588908
ucaguauauccagguauaa

SEQ ID NO: 897655 - RNA, 19 nt, Artificial Sequence
  Description of Artificial Sequence: Synthetic oligonucleotide
  Antisense strand to SEQ ID NO: 897654
uuauaccuggauauacuga

SEQ ID NO: 897656 - RNA, 19 nt, Artificial Sequence
  Description of Artificial Sequence: Synthetic oligonucleotide
  Sense strand starting at position 545 of SEQ ID NO: 588908
agguauaaaucuccaaguu

SEQ ID NO: 897657 - RNA, 19 nt, Artificial Sequence
  Description of Artificial Sequence: Synthetic oligonucleotide
  Antisense strand to SEQ ID NO: 897656
aacuuggagauuuauaccu

SEQ ID NO: 897658 - RNA, 19 nt, Artificial Sequence
  Description of Artificial Sequence: Synthetic oligonucleotide
  Sense strand starting at position 546 of SEQ ID NO: 588908
gguauaaaucuccaaguuu

SEQ ID NO: 897659 - RNA, 19 nt, Artificial Sequence
  Description of Artificial Sequence: Synthetic oligonucleotide
  Antisense strand to SEQ ID NO: 897658
aaacuuggagauuuauacc

SEQ ID NO: 897660 - RNA, 19 nt, Artificial Sequence
  Description of Artificial Sequence: Synthetic oligonucleotide
  Sense strand starting at position 612 of SEQ ID NO: 588908
cuccauuaauccuuucgga

SEQ ID NO: 897661 - RNA, 19 nt, Artificial Sequence
  Description of Artificial Sequence: Synthetic oligonucleotide
  Antisense strand to SEQ ID NO: 897660
uccgaaaggauuaauggag

SEQ ID NO: 897662 - RNA, 19 nt, Artificial Sequence
  Description of Artificial Sequence: Synthetic oligonucleotide
  Sense strand starting at position 713 of SEQ ID NO: 588908
gcacaagucauguagagug

SEQ ID NO: 897663 - RNA, 19 nt, Artificial Sequence
  Description of Artificial Sequence: Synthetic oligonucleotide
  Antisense strand to SEQ ID NO: 897662
cacucuacaugacuugugc

SEQ ID NO: 897664 - RNA, 19 nt, Artificial Sequence
  Description of Artificial Sequence: Synthetic oligonucleotide
  Sense strand starting at position 718 of SEQ ID NO: 588908
agucauguagagugaaauc

SEQ ID NO: 897665 - RNA, 19 nt, Artificial Sequence
  Description of Artificial Sequence: Synthetic oligonucleotide
  Antisense strand to SEQ ID NO: 897664
gauuucacucuacaugacu

SEQ ID NO: 897666 - RNA, 19 nt, Artificial Sequence
  Description of Artificial Sequence: Synthetic oligonucleotide
  Sense strand starting at position 748 of SEQ ID NO: 588908
uuaaauguuccugguauug

SEQ ID NO: 897667 - RNA, 19 nt, Artificial Sequence
  Description of Artificial Sequence: Synthetic oligonucleotide
  Antisense strand to SEQ ID NO: 897666
caauaccaggaacauuuaa

SEQ ID NO: 897668 - RNA, 19 nt, Artificial Sequence
  Description of Artificial Sequence: Synthetic oligonucleotide
  Sense strand starting at position 769 of SEQ ID NO: 588908
uugugauuaacgugauaaa

SEQ ID NO: 897669 - RNA, 19 nt, Artificial Sequence
  Description of Artificial Sequence: Synthetic oligonucleotide
  Antisense strand to SEQ ID NO: 897668
uuuaucacguuaaucacaa

SEQ ID NO: 897670 - RNA, 19 nt, Artificial Sequence
  Description of Artificial Sequence: Synthetic oligonucleotide
  Sense strand starting at position 799 of SEQ ID NO: 588908
auccauauuuaccaugagu

SEQ ID NO: 897671 - RNA, 19 nt, Artificial Sequence
  Description of Artificial Sequence: Synthetic oligonucleotide
  Antisense strand to SEQ ID NO: 897670
acucaugguaaauauggau

SEQ ID NO: 897672 - RNA, 19 nt, Artificial Sequence
  Description of Artificial Sequence: Synthetic oligonucleotide
  Sense strand starting at position 922 of SEQ ID NO: 588908
cuuugaaaugcguauacga

SEQ ID NO: 897673 - RNA, 19 nt, Artificial Sequence
  Description of Artificial Sequence: Synthetic oligonucleotide
  Antisense strand to SEQ ID NO: 897672
ucguauacgcauuucaaag

SEQ ID NO: 897674 - RNA, 19 nt, Artificial Sequence
  Description of Artificial Sequence: Synthetic oligonucleotide
  Sense strand starting at position 924 of SEQ ID NO: 588908
uugaaaugcguauacgaug

SEQ ID NO: 897675 - RNA, 19 nt, Artificial Sequence
  Description of Artificial Sequence: Synthetic oligonucleotide
  Antisense strand to SEQ ID NO: 897674
caucguauacgcauuucaa

SEQ ID NO: 897676 - RNA, 19 nt, Artificial Sequence
  Description of Artificial Sequence: Synthetic oligonucleotide
  Sense strand starting at position 929 of SEQ ID NO: 588908
augcguauacgaugacauu

SEQ ID NO: 897677 - RNA, 19 nt, Artificial Sequence
  Description of Artificial Sequence: Synthetic oligonucleotide
  Antisense strand to SEQ ID NO: 897676
aaugucaucguauacgcau

SEQ ID NO: 897678 - RNA, 19 nt, Artificial Sequence
  Description of Artificial Sequence: Synthetic oligonucleotide
  Sense strand starting at position 930 of SEQ ID NO: 588908
ugcguauacgaugacauua

SEQ ID NO: 897679 - RNA, 19 nt, Artificial Sequence
  Description of Artificial Sequence: Synthetic oligonucleotide
  Antisense strand to SEQ ID NO: 897678
uaaugucaucguauacgca

SEQ ID NO: 897680 - RNA, 19 nt, Artificial Sequence
  Description of Artificial Sequence: Synthetic oligonucleotide
  Sense strand starting at position 989 of SEQ ID NO: 588908
acgcacaaucaaugcaaua

SEQ ID NO: 897681 - RNA, 19 nt, Artificial Sequence
  Description of Artificial Sequence: Synthetic oligonucleotide
  Antisense strand to SEQ ID NO: 897680
uauugcauugauugugcgu

SEQ ID NO: 897682 - RNA, 19 nt, Artificial Sequence
  Description of Artificial Sequence: Synthetic oligonucleotide
  Sense strand starting at position 2262 of SEQ ID NO: 588908
gcaguaggacguugaagaa

SEQ ID NO: 897683 - RNA, 19 nt, Artificial Sequence
  Description of Artificial Sequence: Synthetic oligonucleotide
  Antisense strand to SEQ ID NO: 897682
uucuucaacguccuacugc

SEQ ID NO: 897684 - RNA, 19 nt, Artificial Sequence
  Description of Artificial Sequence: Synthetic oligonucleotide
  Sense strand starting at position 2291 of SEQ ID NO: 588908
cccuuuguccuggacguaa

SEQ ID NO: 897685 - RNA, 19 nt, Artificial Sequence
  Description of Artificial Sequence: Synthetic oligonucleotide
  Antisense strand to SEQ ID NO: 897684
uuacguccaggacaaaggg

SEQ ID NO: 897686 - RNA, 19 nt, Artificial Sequence
  Description of Artificial Sequence: Synthetic oligonucleotide
  Sense strand starting at position 2310 of SEQ ID NO: 588908
gccgcaagucguccugagu

SEQ ID NO: 897687 - RNA, 19 nt, Artificial Sequence
  Description of Artificial Sequence: Synthetic oligonucleotide
  Antisense strand to SEQ ID NO: 897686
acucaggacgacuugcggc

SEQ ID NO: 897688 - RNA, 19 nt, Artificial Sequence
  Description of Artificial Sequence: Synthetic oligonucleotide
  Sense strand starting at position 2742 of SEQ ID NO: 588908
ccaugaucgcacgcgaauu

SEQ ID NO: 897689 - RNA, 19 nt, Artificial Sequence
  Description of Artificial Sequence: Synthetic oligonucleotide
  Antisense strand to SEQ ID NO: 897688
aauucgcgugcgaucaugg

SEQ ID NO: 897690 - RNA, 19 nt, Artificial Sequence
  Description of Artificial Sequence: Synthetic oligonucleotide
  Sense strand starting at position 3059 of SEQ ID NO: 588908
aguuauuaguuagcaauac

SEQ ID NO: 897691 - RNA, 19 nt, Artificial Sequence
  Description of Artificial Sequence: Synthetic oligonucleotide
  Antisense strand to SEQ ID NO: 897690
guauugcuaacuaauaacu

SEQ ID NO: 897692 - RNA, 19 nt, Artificial Sequence
  Description of Artificial Sequence: Synthetic oligonucleotide
  Sense strand starting at position 3117 of SEQ ID NO: 588908
uugauagaugccugcucaa

SEQ ID NO: 897693 - RNA, 19 nt, Artificial Sequence
  Description of Artificial Sequence: Synthetic oligonucleotide
  Antisense strand to SEQ ID NO: 897692
uugagcaggcaucuaucaa

SEQ ID NO: 897694 - RNA, 19 nt, Artificial Sequence
  Description of Artificial Sequence: Synthetic oligonucleotide
  Sense strand starting at position 3120 of SEQ ID NO: 588908
auagaugccugcucaaaca

SEQ ID NO: 897695 - RNA, 19 nt, Artificial Sequence
  Description of Artificial Sequence: Synthetic oligonucleotide
  Antisense strand to SEQ ID NO: 897694
uguuugagcaggcaucuau

SEQ ID NO: 897696 - RNA, 19 nt, Artificial Sequence
  Description of Artificial Sequence: Synthetic oligonucleotide
  Sense strand starting at position 3139 of SEQ ID NO: 588908
aauugaagugcuugucuca

SEQ ID NO: 897697 - RNA, 19 nt, Artificial Sequence
  Description of Artificial Sequence: Synthetic oligonucleotide
  Antisense strand to SEQ ID NO: 897696
ugagacaagcacuucaauu

SEQ ID NO: 897698 - RNA, 19 nt, Artificial Sequence
  Description of Artificial Sequence: Synthetic oligonucleotide
  Sense strand starting at position 3142 of SEQ ID NO: 588908
ugaagugcuugucucagau

SEQ ID NO: 897699 - RNA, 19 nt, Artificial Sequence
  Description of Artificial Sequence: Synthetic oligonucleotide
  Antisense strand to SEQ ID NO: 897698
aucugagacaagcacuuca

SEQ ID NO: 897700 - RNA, 19 nt, Artificial Sequence
  Description of Artificial Sequence: Synthetic oligonucleotide
  Sense strand starting at position 3279 of SEQ ID NO: 588908
ucauuuguguguuuaaugu

SEQ ID NO: 897701 - RNA, 19 nt, Artificial Sequence
  Description of Artificial Sequence: Synthetic oligonucleotide
  Antisense strand to SEQ ID NO: 897700
acauuaaacacacaaauga

SEQ ID NO: 897702 - RNA, 19 nt, Artificial Sequence
  Description of Artificial Sequence: Synthetic oligonucleotide
  Sense strand starting at position 3587 of SEQ ID NO: 588908
cgcgccuggccuguuuaau

SEQ ID NO: 897703 - RNA, 19 nt, Artificial Sequence
  Description of Artificial Sequence: Synthetic oligonucleotide
  Antisense strand to SEQ ID NO: 897702
auuaaacaggccaggcgcg

SEQ ID NO: 897704 - RNA, 19 nt, Artificial Sequence
  Description of Artificial Sequence: Synthetic oligonucleotide
  Sense strand starting at position 3588 of SEQ ID NO: 588908
gcgccuggccuguuuaaug

SEQ ID NO: 897705 - RNA, 19 nt, Artificial Sequence
  Description of Artificial Sequence: Synthetic oligonucleotide
  Antisense strand to SEQ ID NO: 897704
cauuaaacaggccaggcgc

SEQ ID NO: 897706 - RNA, 19 nt, Artificial Sequence
  Description of Artificial Sequence: Synthetic oligonucleotide
  Sense strand starting at position 3664 of SEQ ID NO: 588908
aagucugcugguuggaaga

SEQ ID NO: 897707 - RNA, 19 nt, Artificial Sequence
  Description of Artificial Sequence: Synthetic oligonucleotide
  Antisense strand to SEQ ID NO: 897706
ucuuccaaccagcagacuu

SEQ ID NO: 897708 - RNA, 19 nt, Artificial Sequence
  Description of Artificial Sequence: Synthetic oligonucleotide
  Sense strand starting at position 3694 of SEQ ID NO: 588908
uggcgagaucccuggguuu

SEQ ID NO: 897709 - RNA, 19 nt, Artificial Sequence
  Description of Artificial Sequence: Synthetic oligonucleotide
  Antisense strand to SEQ ID NO: 897708
aaacccagggaucucgcca

SEQ ID NO: 897710 - RNA, 19 nt, Artificial Sequence
  Description of Artificial Sequence: Synthetic oligonucleotide
  Sense strand starting at position 3764 of SEQ ID NO: 588908
gucuguuccaugcuuugua

SEQ ID NO: 897711 - RNA, 19 nt, Artificial Sequence
  Description of Artificial Sequence: Synthetic oligonucleotide
  Antisense strand to SEQ ID NO: 897710
uacaaagcauggaacagac

SEQ ID NO: 897712 - RNA, 19 nt, Artificial Sequence
  Description of Artificial Sequence: Synthetic oligonucleotide
  Sense strand starting at position 3768 of SEQ ID NO: 588908
guuccaugcuuuguaggau

SEQ ID NO: 897713 - RNA, 19 nt, Artificial Sequence
  Description of Artificial Sequence: Synthetic oligonucleotide
  Antisense strand to SEQ ID NO: 897712
auccuacaaagcauggaac

SEQ ID NO: 897714 - RNA, 19 nt, Artificial Sequence
  Description of Artificial Sequence: Synthetic oligonucleotide
  Sense strand starting at position 3774 of SEQ ID NO: 588908
ugcuuuguaggauguuuga

SEQ ID NO: 897715 - RNA, 19 nt, Artificial Sequence
  Description of Artificial Sequence: Synthetic oligonucleotide
  Antisense strand to SEQ ID NO: 897714
ucaaacauccuacaaagca

SEQ ID NO: 897716 - RNA, 19 nt, Artificial Sequence
  Description of Artificial Sequence: Synthetic oligonucleotide
  Sense strand starting at position 3931 of SEQ ID NO: 588908
ugaugaucucauugggagc

SEQ ID NO: 897717 - RNA, 19 nt, Artificial Sequence
  Description of Artificial Sequence: Synthetic oligonucleotide
  Antisense strand to SEQ ID NO: 897716
gcucccaaugagaucauca

SEQ ID NO: 897718 - RNA, 19 nt, Artificial Sequence
  Description of Artificial Sequence: Synthetic oligonucleotide
  Sense strand starting at position 5 of SEQ ID NO: 588909
cacuguggguguucaggaa

SEQ ID NO: 897719 - RNA, 19 nt, Artificial Sequence
  Description of Artificial Sequence: Synthetic oligonucleotide
  Antisense strand to SEQ ID NO: 897718
uuccugaacacccacagug

SEQ ID NO: 897720 - RNA, 19 nt, Artificial Sequence
  Description of Artificial Sequence: Synthetic oligonucleotide
  Sense strand starting at position 9 of SEQ ID NO: 588909
guggguguucaggaauuga

SEQ ID NO: 897721 - RNA, 19 nt, Artificial Sequence
  Description of Artificial Sequence: Synthetic oligonucleotide
  Antisense strand to SEQ ID NO: 897720
ucaauuccugaacacccac

SEQ ID NO: 897722 - RNA, 19 nt, Artificial Sequence
  Description of Artificial Sequence: Synthetic oligonucleotide
  Sense strand starting at position 30 of SEQ ID NO: 588909
acuaaagugcauuggugua

SEQ ID NO: 897723 - RNA, 19 nt, Artificial Sequence
  Description of Artificial Sequence: Synthetic oligonucleotide
  Antisense strand to SEQ ID NO: 897722
uacaccaaugcacuuuagu

SEQ ID NO: 897724 - RNA, 19 nt, Artificial Sequence
  Description of Artificial Sequence: Synthetic oligonucleotide
  Sense strand starting at position 32 of SEQ ID NO: 588909
uaaagugcauugguguaau

SEQ ID NO: 897725 - RNA, 19 nt, Artificial Sequence
  Description of Artificial Sequence: Synthetic oligonucleotide
  Antisense strand to SEQ ID NO: 897724
auuacaccaaugcacuuua

SEQ ID NO: 897726 - RNA, 19 nt, Artificial Sequence
  Description of Artificial Sequence: Synthetic oligonucleotide
  Sense strand starting at position 472 of SEQ ID NO: 588909
caggcaguagucugaaaug

SEQ ID NO: 897727 - RNA, 19 nt, Artificial Sequence
  Description of Artificial Sequence: Synthetic oligonucleotide
  Antisense strand to SEQ ID NO: 897726
cauuucagacuacugccug

SEQ ID NO: 897728 - RNA, 19 nt, Artificial Sequence
  Description of Artificial Sequence: Synthetic oligonucleotide
  Sense strand starting at position 477 of SEQ ID NO: 588909
aguagucugaaaugugcaa

SEQ ID NO: 897729 - RNA, 19 nt, Artificial Sequence
  Description of Artificial Sequence: Synthetic oligonucleotide
  Antisense strand to SEQ ID NO: 897728
uugcacauuucagacuacu

SEQ ID NO: 897730 - RNA, 19 nt, Artificial Sequence
  Description of Artificial Sequence: Synthetic oligonucleotide
  Sense strand starting at position 676 of SEQ ID NO: 588909
gggaaaugggugugggacu

SEQ ID NO: 897731 - RNA, 19 nt, Artificial Sequence
  Description of Artificial Sequence: Synthetic oligonucleotide
  Antisense strand to SEQ ID NO: 897730
agucccacacccauuuccc

SEQ ID NO: 897732 - RNA, 19 nt, Artificial Sequence
  Description of Artificial Sequence: Synthetic oligonucleotide
  Sense strand starting at position 795 of SEQ ID NO: 588909
guuuauucucaauguacca

SEQ ID NO: 897733 - RNA, 19 nt, Artificial Sequence
  Description of Artificial Sequence: Synthetic oligonucleotide
  Antisense strand to SEQ ID NO: 897732
ugguacauugagaauaaac

SEQ ID NO: 897734 - RNA, 19 nt, Artificial Sequence
  Description of Artificial Sequence: Synthetic oligonucleotide
  Sense strand starting at position 892 of SEQ ID NO: 588909
guucuuauguuggccaaca

SEQ ID NO: 897735 - RNA, 19 nt, Artificial Sequence
  Description of Artificial Sequence: Synthetic oligonucleotide
  Antisense strand to SEQ ID NO: 897734
uguuggccaacauaagaac

SEQ ID NO: 897736 - RNA, 19 nt, Artificial Sequence
  Description of Artificial Sequence: Synthetic oligonucleotide
  Sense strand starting at position 1064 of SEQ ID NO: 588909
ccuggaaucuucucccaga

SEQ ID NO: 897737 - RNA, 19 nt, Artificial Sequence
  Description of Artificial Sequence: Synthetic oligonucleotide
  Antisense strand to SEQ ID NO: 897736
ucugggagaagauuccagg

SEQ ID NO: 897738 - RNA, 19 nt, Artificial Sequence
  Description of Artificial Sequence: Synthetic oligonucleotide
  Sense strand starting at position 1065 of SEQ ID NO: 588909
cuggaaucuucucccagau

SEQ ID NO: 897739 - RNA, 19 nt, Artificial Sequence
  Description of Artificial Sequence: Synthetic oligonucleotide
  Antisense strand to SEQ ID NO: 897738
aucugggagaagauuccag

SEQ ID NO: 897740 - RNA, 19 nt, Artificial Sequence
  Description of Artificial Sequence: Synthetic oligonucleotide
  Sense strand starting at position 1325 of SEQ ID NO: 588909
uucuguuugggucacuaau

SEQ ID NO: 897741 - RNA, 19 nt, Artificial Sequence
  Description of Artificial Sequence: Synthetic oligonucleotide
  Antisense strand to SEQ ID NO: 897740
auuagugacccaaacagaa

SEQ ID NO: 897742 - RNA, 19 nt, Artificial Sequence
  Description of Artificial Sequence: Synthetic oligonucleotide
  Sense strand starting at position 1327 of SEQ ID NO: 588909
cuguuugggucacuaaucu

SEQ ID NO: 897743 - RNA, 19 nt, Artificial Sequence
  Description of Artificial Sequence: Synthetic oligonucleotide
  Antisense strand to SEQ ID NO: 897742
agauuagugacccaaacag

SEQ ID NO: 897744 - RNA, 19 nt, Artificial Sequence
  Description of Artificial Sequence: Synthetic oligonucleotide
  Sense strand starting at position 1334 of SEQ ID NO: 588909
ggucacuaaucugucuuaa

SEQ ID NO: 897745 - RNA, 19 nt, Artificial Sequence
  Description of Artificial Sequence: Synthetic oligonucleotide
  Antisense strand to SEQ ID NO: 897744
uuaagacagauuagugacc

SEQ ID NO: 897746 - RNA, 19 nt, Artificial Sequence
  Description of Artificial Sequence: Synthetic oligonucleotide
  Sense strand starting at position 1336 of SEQ ID NO: 588909
ucacuaaucugucuuaagg

SEQ ID NO: 897747 - RNA, 19 nt, Artificial Sequence
  Description of Artificial Sequence: Synthetic oligonucleotide
  Antisense strand to SEQ ID NO: 897746
ccuuaagacagauuaguga

SEQ ID NO: 897748 - RNA, 19 nt, Artificial Sequence
  Description of Artificial Sequence: Synthetic oligonucleotide
  Sense strand starting at position 1346 of SEQ ID NO: 588909
gucuuaagggcucagaaca

SEQ ID NO: 897749 - RNA, 19 nt, Artificial Sequence
  Description of Artificial Sequence: Synthetic oligonucleotide
  Antisense strand to SEQ ID NO: 897748
uguucugagcccuuaagac

SEQ ID NO: 897750 - RNA, 19 nt, Artificial Sequence
  Description of Artificial Sequence: Synthetic oligonucleotide
  Sense strand starting at position 1370 of SEQ ID NO: 588909
ugacaugguagcugugaga

SEQ ID NO: 897751 - RNA, 19 nt, Artificial Sequence
  Description of Artificial Sequence: Synthetic oligonucleotide
  Antisense strand to SEQ ID NO: 897750
ucucacagcuaccauguca

SEQ ID NO: 897752 - RNA, 19 nt, Artificial Sequence
  Description of Artificial Sequence: Synthetic oligonucleotide
  Sense strand starting at position 1381 of SEQ ID NO: 588909
cugugagauugcagggaug

SEQ ID NO: 897753 - RNA, 19 nt, Artificial Sequence
  Description of Artificial Sequence: Synthetic oligonucleotide
  Antisense strand to SEQ ID NO: 897752
caucccugcaaucucacag

SEQ ID NO: 897754 - RNA, 19 nt, Artificial Sequence
  Description of Artificial Sequence: Synthetic oligonucleotide
  Sense strand starting at position 1453 of SEQ ID NO: 588909
gggcucugucgugcucaca

SEQ ID NO: 897755 - RNA, 19 nt, Artificial Sequence
  Description of Artificial Sequence: Synthetic oligonucleotide
  Antisense strand to SEQ ID NO: 897754
ugugagcacgacagagccc

SEQ ID NO: 897756 - RNA, 19 nt, Artificial Sequence
  Description of Artificial Sequence: Synthetic oligonucleotide
  Sense strand starting at position 1454 of SEQ ID NO: 588909
ggcucugucgugcucacau

SEQ ID NO: 897757 - RNA, 19 nt, Artificial Sequence
  Description of Artificial Sequence: Synthetic oligonucleotide
  Antisense strand to SEQ ID NO: 897756
augugagcacgacagagcc

SEQ ID NO: 897758 - RNA, 19 nt, Artificial Sequence
  Description of Artificial Sequence: Synthetic oligonucleotide
  Sense strand starting at position 1573 of SEQ ID NO: 588909
uugucagucucuccugaga

SEQ ID NO: 897759 - RNA, 19 nt, Artificial Sequence
  Description of Artificial Sequence: Synthetic oligonucleotide
  Antisense strand to SEQ ID NO: 897758
ucucaggagagacugacaa

SEQ ID NO: 897760 - RNA, 19 nt, Artificial Sequence
  Description of Artificial Sequence: Synthetic oligonucleotide
  Sense strand starting at position 1634 of SEQ ID NO: 588909
ccaauaguugcucagugca

SEQ ID NO: 897761 - RNA, 19 nt, Artificial Sequence
  Description of Artificial Sequence: Synthetic oligonucleotide
  Antisense strand to SEQ ID NO: 897760
ugcacugagcaacuauugg

SEQ ID NO: 897762 - RNA, 19 nt, Artificial Sequence
  Description of Artificial Sequence: Synthetic oligonucleotide
  Sense strand starting at position 1722 of SEQ ID NO: 588909
gguaauucugcgccaguca

SEQ ID NO: 897763 - RNA, 19 nt, Artificial Sequence
  Description of Artificial Sequence: Synthetic oligonucleotide
  Antisense strand to SEQ ID NO: 897762
ugacuggcgcagaauuacc

SEQ ID NO: 897764 - RNA, 19 nt, Artificial Sequence
  Description of Artificial Sequence: Synthetic oligonucleotide
  Sense strand starting at position 1798 of SEQ ID NO: 588909
ggugcauaugcagaaugaa

SEQ ID NO: 897765 - RNA, 19 nt, Artificial Sequence
  Description of Artificial Sequence: Synthetic oligonucleotide
  Antisense strand to SEQ ID NO: 897764
uucauucugcauaugcacc

SEQ ID NO: 897766 - RNA, 19 nt, Artificial Sequence
  Description of Artificial Sequence: Synthetic oligonucleotide
  Sense strand starting at position 2134 of SEQ ID NO: 588909
ccggaaagggcuugcucua

SEQ ID NO: 897767 - RNA, 19 nt, Artificial Sequence
  Description of Artificial Sequence: Synthetic oligonucleotide
  Antisense strand to SEQ ID NO: 897766
uagagcaagcccuuuccgg

SEQ ID NO: 897768 - RNA, 19 nt, Artificial Sequence
  Description of Artificial Sequence: Synthetic oligonucleotide
  Sense strand starting at position 2204 of SEQ ID NO: 588909
agguuuccagagugacaaa

SEQ ID NO: 897769 - RNA, 19 nt, Artificial Sequence
  Description of Artificial Sequence: Synthetic oligonucleotide
  Antisense strand to SEQ ID NO: 897768
uuugucacucuggaaaccu

SEQ ID NO: 897770 - RNA, 19 nt, Artificial Sequence
  Description of Artificial Sequence: Synthetic oligonucleotide
  Sense strand starting at position 2236 of SEQ ID NO: 588909
uugcaaagcugacuccaau

SEQ ID NO: 897771 - RNA, 19 nt, Artificial Sequence
  Description of Artificial Sequence: Synthetic oligonucleotide
  Antisense strand to SEQ ID NO: 897770
auuggagucagcuuugcaa

SEQ ID NO: 897772 - RNA, 19 nt, Artificial Sequence
  Description of Artificial Sequence: Synthetic oligonucleotide
  Sense strand starting at position 2543 of SEQ ID NO: 588909
ggugauagcagacgggaaa

SEQ ID NO: 897773 - RNA, 19 nt, Artificial Sequence
  Description of Artificial Sequence: Synthetic oligonucleotide
  Antisense strand to SEQ ID NO: 897772
uuucccgucugcuaucacc

SEQ ID NO: 897774 - RNA, 19 nt, Artificial Sequence
  Description of Artificial Sequence: Synthetic oligonucleotide
  Sense strand starting at position 2577 of SEQ ID NO: 588909
ugaaaugagcuguaaacgu

SEQ ID NO: 897775 - RNA, 19 nt, Artificial Sequence
  Description of Artificial Sequence: Synthetic oligonucleotide
  Antisense strand to SEQ ID NO: 897774
acguuuacagcucauuuca

SEQ ID NO: 897776 - RNA, 19 nt, Artificial Sequence
  Description of Artificial Sequence: Synthetic oligonucleotide
  Sense strand starting at position 2586 of SEQ ID NO: 588909
cuguaaacguaagcagaaa

SEQ ID NO: 897777 - RNA, 19 nt, Artificial Sequence
  Description of Artificial Sequence: Synthetic oligonucleotide
  Antisense strand to SEQ ID NO: 897776
uuucugcuuacguuuacag

SEQ ID NO: 897778 - RNA, 19 nt, Artificial Sequence
  Description of Artificial Sequence: Synthetic oligonucleotide
  Sense strand starting at position 2587 of SEQ ID NO: 588909
uguaaacguaagcagaaau

SEQ ID NO: 897779 - RNA, 19 nt, Artificial Sequence
  Description of Artificial Sequence: Synthetic oligonucleotide
  Antisense strand to SEQ ID NO: 897778
auuucugcuuacguuuaca

SEQ ID NO: 897780 - RNA, 19 nt, Artificial Sequence
  Description of Artificial Sequence: Synthetic oligonucleotide
  Sense strand starting at position 3371 of SEQ ID NO: 588909
uugcaagaauauuccaaug

SEQ ID NO: 897781 - RNA, 19 nt, Artificial Sequence
  Description of Artificial Sequence: Synthetic oligonucleotide
  Antisense strand to SEQ ID NO: 897780
cauuggaauauucuugcaa

SEQ ID NO: 897782 - RNA, 19 nt, Artificial Sequence
  Description of Artificial Sequence: Synthetic oligonucleotide
  Sense strand starting at position 3397 of SEQ ID NO: 588909
gaaggauucuuguuugagg

SEQ ID NO: 897783 - RNA, 19 nt, Artificial Sequence
  Description of Artificial Sequence: Synthetic oligonucleotide
  Antisense strand to SEQ ID NO: 897782
ccucaaacaagaauccuuc

SEQ ID NO: 897784 - RNA, 19 nt, Artificial Sequence
  Description of Artificial Sequence: Synthetic oligonucleotide
  Sense strand starting at position 3398 of SEQ ID NO: 588909
aaggauucuuguuugagga

SEQ ID NO: 897785 - RNA, 19 nt, Artificial Sequence
  Description of Artificial Sequence: Synthetic oligonucleotide
  Antisense strand to SEQ ID NO: 897784
uccucaaacaagaauccuu

SEQ ID NO: 897786 - RNA, 19 nt, Artificial Sequence
  Description of Artificial Sequence: Synthetic oligonucleotide
  Sense strand starting at position 3399 of SEQ ID NO: 588909
aggauucuuguuugaggac

SEQ ID NO: 897787 - RNA, 19 nt, Artificial Sequence
  Description of Artificial Sequence: Synthetic oligonucleotide
  Antisense strand to SEQ ID NO: 897786
guccucaaacaagaauccu

SEQ ID NO: 897788 - RNA, 19 nt, Artificial Sequence
  Description of Artificial Sequence: Synthetic oligonucleotide
  Sense strand starting at position 3658 of SEQ ID NO: 588909
cccagugauccuugacuca

SEQ ID NO: 897789 - RNA, 19 nt, Artificial Sequence
  Description of Artificial Sequence: Synthetic oligonucleotide
  Antisense strand to SEQ ID NO: 897788
ugagucaaggaucacuggg

SEQ ID NO: 897790 - RNA, 19 nt, Artificial Sequence
  Description of Artificial Sequence: Synthetic oligonucleotide
  Sense strand starting at position 3689 of SEQ ID NO: 588909
uuccguuccuccuuaggaa

SEQ ID NO: 897791 - RNA, 19 nt, Artificial Sequence
  Description of Artificial Sequence: Synthetic oligonucleotide
  Antisense strand to SEQ ID NO: 897790
uuccuaaggaggaacggaa

SEQ ID NO: 897792 - RNA, 19 nt, Artificial Sequence
  Description of Artificial Sequence: Synthetic oligonucleotide
  Sense strand starting at position 3690 of SEQ ID NO: 588909
uccguuccuccuuaggaaa

SEQ ID NO: 897793 - RNA, 19 nt, Artificial Sequence
  Description of Artificial Sequence: Synthetic oligonucleotide
  Antisense strand to SEQ ID NO: 897792
uuuccuaaggaggaacgga

SEQ ID NO: 897794 - RNA, 19 nt, Artificial Sequence
  Description of Artificial Sequence: Synthetic oligonucleotide
  Sense strand starting at position 3720 of SEQ ID NO: 588909
cagggaugccucugaggca

SEQ ID NO: 897795 - RNA, 19 nt, Artificial Sequence
  Description of Artificial Sequence: Synthetic oligonucleotide
  Antisense strand to SEQ ID NO: 897794
ugccucagaggcaucccug

SEQ ID NO: 897796 - RNA, 19 nt, Artificial Sequence
  Description of Artificial Sequence: Synthetic oligonucleotide
  Sense strand starting at position 3789 of SEQ ID NO: 588909
augacuuccuguccuaaag

SEQ ID NO: 897797 - RNA, 19 nt, Artificial Sequence
  Description of Artificial Sequence: Synthetic oligonucleotide
  Antisense strand to SEQ ID NO: 897796
cuuuaggacaggaagucau

SEQ ID NO: 897798 - RNA, 19 nt, Artificial Sequence
  Description of Artificial Sequence: Synthetic oligonucleotide
  Sense strand starting at position 152 of SEQ ID NO: 588910
ucaucauauugcuugacag

SEQ ID NO: 897799 - RNA, 19 nt, Artificial Sequence
  Description of Artificial Sequence: Synthetic oligonucleotide
  Antisense strand to SEQ ID NO: 897798
cugucaagcaauaugauga

SEQ ID NO: 897800 - RNA, 19 nt, Artificial Sequence
  Description of Artificial Sequence: Synthetic oligonucleotide
  Sense strand starting at position 176 of SEQ ID NO: 588910
cacugcagccugugacaua

SEQ ID NO: 897801 - RNA, 19 nt, Artificial Sequence
  Description of Artificial Sequence: Synthetic oligonucleotide
  Antisense strand to SEQ ID NO: 897800
uaugucacaggcugcagug

SEQ ID NO: 897802 - RNA, 19 nt, Artificial Sequence
  Description of Artificial Sequence: Synthetic oligonucleotide
  Sense strand starting at position 269 of SEQ ID NO: 588910
ggcugaugguuugccauaa

SEQ ID NO: 897803 - RNA, 19 nt, Artificial Sequence
  Description of Artificial Sequence: Synthetic oligonucleotide
  Antisense strand to SEQ ID NO: 897802
uuauggcaaaccaucagcc

SEQ ID NO: 897804 - RNA, 19 nt, Artificial Sequence
  Description of Artificial Sequence: Synthetic oligonucleotide
  Sense strand starting at position 270 of SEQ ID NO: 588910
gcugaugguuugccauaag

SEQ ID NO: 897805 - RNA, 19 nt, Artificial Sequence
  Description of Artificial Sequence: Synthetic oligonucleotide
  Antisense strand to SEQ ID NO: 897804
cuuauggcaaaccaucagc

SEQ ID NO: 897806 - RNA, 19 nt, Artificial Sequence
  Description of Artificial Sequence: Synthetic oligonucleotide
  Sense strand starting at position 273 of SEQ ID NO: 588910
gaugguuugccauaagaac

SEQ ID NO: 897807 - RNA, 19 nt, Artificial Sequence
  Description of Artificial Sequence: Synthetic oligonucleotide
  Antisense strand to SEQ ID NO: 897806
guucuuauggcaaaccauc

SEQ ID NO: 897808 - RNA, 19 nt, Artificial Sequence
  Description of Artificial Sequence: Synthetic oligonucleotide
  Sense strand starting at position 297 of SEQ ID NO: 588910
cacacuuguccaggaugaa

SEQ ID NO: 897809 - RNA, 19 nt, Artificial Sequence
  Description of Artificial Sequence: Synthetic oligonucleotide
  Antisense strand to SEQ ID NO: 897808
uucauccuggacaagugug

SEQ ID NO: 897810 - RNA, 19 nt, Artificial Sequence
  Description of Artificial Sequence: Synthetic oligonucleotide
  Sense strand starting at position 341 of SEQ ID NO: 588910
ccaucaaggucccuggaua

SEQ ID NO: 897811 - RNA, 19 nt, Artificial Sequence
  Description of Artificial Sequence: Synthetic oligonucleotide
  Antisense strand to SEQ ID NO: 897810
uauccagggaccuugaugg

SEQ ID NO: 897812 - RNA, 19 nt, Artificial Sequence
  Description of Artificial Sequence: Synthetic oligonucleotide
  Sense strand starting at position 342 of SEQ ID NO: 588910
caucaaggucccuggauaa

SEQ ID NO: 897813 - RNA, 19 nt, Artificial Sequence
  Description of Artificial Sequence: Synthetic oligonucleotide
  Antisense strand to SEQ ID NO: 897812
uuauccagggaccuugaug

SEQ ID NO: 897814 - RNA, 19 nt, Artificial Sequence
  Description of Artificial Sequence: Synthetic oligonucleotide
  Sense strand starting at position 378 of SEQ ID NO: 588910
gggucccuuugaguaauua

SEQ ID NO: 897815 - RNA, 19 nt, Artificial Sequence
  Description of Artificial Sequence: Synthetic oligonucleotide
  Antisense strand to SEQ ID NO: 897814
uaauuacucaaagggaccc

SEQ ID NO: 897816 - RNA, 19 nt, Artificial Sequence
  Description of Artificial Sequence: Synthetic oligonucleotide
  Sense strand starting at position 379 of SEQ ID NO: 588910
ggucccuuugaguaauuau

SEQ ID NO: 897817 - RNA, 19 nt, Artificial Sequence
  Description of Artificial Sequence: Synthetic oligonucleotide
  Antisense strand to SEQ ID NO: 897816
auaauuacucaaagggacc

SEQ ID NO: 897818 - RNA, 19 nt, Artificial Sequence
  Description of Artificial Sequence: Synthetic oligonucleotide
  Sense strand starting at position 388 of SEQ ID NO: 588910
gaguaauuauuggcccagu

SEQ ID NO: 897819 - RNA, 19 nt, Artificial Sequence
  Description of Artificial Sequence: Synthetic oligonucleotide
  Antisense strand to SEQ ID NO: 897818
acugggccaauaauuacuc

SEQ ID NO: 897820 - RNA, 19 nt, Artificial Sequence
  Description of Artificial Sequence: Synthetic oligonucleotide
  Sense strand starting at position 389 of SEQ ID NO: 588910
aguaauuauuggcccaguu

SEQ ID NO: 897821 - RNA, 19 nt, Artificial Sequence
  Description of Artificial Sequence: Synthetic oligonucleotide
  Antisense strand to SEQ ID NO: 897820
aacugggccaauaauuacu

SEQ ID NO: 897822 - RNA, 19 nt, Artificial Sequence
  Description of Artificial Sequence: Synthetic oligonucleotide
  Sense strand starting at position 506 of SEQ ID NO: 588910
agacauuaguuagcugcaa

SEQ ID NO: 897823 - RNA, 19 nt, Artificial Sequence
  Description of Artificial Sequence: Synthetic oligonucleotide
  Antisense strand to SEQ ID NO: 897822
uugcagcuaacuaaugucu

SEQ ID NO: 897824 - RNA, 19 nt, Artificial Sequence
  Description of Artificial Sequence: Synthetic oligonucleotide
  Sense strand starting at position 507 of SEQ ID NO: 588910
gacauuaguuagcugcaau

SEQ ID NO: 897825 - RNA, 19 nt, Artificial Sequence
  Description of Artificial Sequence: Synthetic oligonucleotide
  Antisense strand to SEQ ID NO: 897824
auugcagcuaacuaauguc

SEQ ID NO: 897826 - RNA, 19 nt, Artificial Sequence
  Description of Artificial Sequence: Synthetic oligonucleotide
  Sense strand starting at position 510 of SEQ ID NO: 588910
auuaguuagcugcaaugaa

SEQ ID NO: 897827 - RNA, 19 nt, Artificial Sequence
  Description of Artificial Sequence: Synthetic oligonucleotide
  Antisense strand to SEQ ID NO: 897826
uucauugcagcuaacuaau

SEQ ID NO: 897828 - RNA, 19 nt, Artificial Sequence
  Description of Artificial Sequence: Synthetic oligonucleotide
  Sense strand starting at position 620 of SEQ ID NO: 588910
guuuccuggcuccaagaca

SEQ ID NO: 897829 - RNA, 19 nt, Artificial Sequence
  Description of Artificial Sequence: Synthetic oligonucleotide
  Antisense strand to SEQ ID NO: 897828
ugucuuggagccaggaaac

SEQ ID NO: 897830 - RNA, 19 nt, Artificial Sequence
  Description of Artificial Sequence: Synthetic oligonucleotide
  Sense strand starting at position 679 of SEQ ID NO: 588910
ggccaauugcuaugacgac

SEQ ID NO: 897831 - RNA, 19 nt, Artificial Sequence
  Description of Artificial Sequence: Synthetic oligonucleotide
  Antisense strand to SEQ ID NO: 897830
gucgucauagcaauuggcc

SEQ ID NO: 897832 - RNA, 19 nt, Artificial Sequence
  Description of Artificial Sequence: Synthetic oligonucleotide
  Sense strand starting at position 883 of SEQ ID NO: 588910
ccagcuuucugagcuauuu

SEQ ID NO: 897833 - RNA, 19 nt, Artificial Sequence
  Description of Artificial Sequence: Synthetic oligonucleotide
  Antisense strand to SEQ ID NO: 897832
aaauagcucagaaagcugg

SEQ ID NO: 897834 - RNA, 19 nt, Artificial Sequence
  Description of Artificial Sequence: Synthetic oligonucleotide
  Sense strand starting at position 1001 of SEQ ID NO: 588910
ggaagcgucuaaucaaauu

SEQ ID NO: 897835 - RNA, 19 nt, Artificial Sequence
  Description of Artificial Sequence: Synthetic oligonucleotide
  Antisense strand to SEQ ID NO: 897834
aauuugauuagacgcuucc

SEQ ID NO: 897836 - RNA, 19 nt, Artificial Sequence
  Description of Artificial Sequence: Synthetic oligonucleotide
  Sense strand starting at position 1058 of SEQ ID NO: 588910
ucaacagugguaugguaga

SEQ ID NO: 897837 - RNA, 19 nt, Artificial Sequence
  Description of Artificial Sequence: Synthetic oligonucleotide
  Antisense strand to SEQ ID NO: 897836
ucuaccauaccacuguuga

SEQ ID NO: 897838 - RNA, 19 nt, Artificial Sequence
  Description of Artificial Sequence: Synthetic oligonucleotide
  Sense strand starting at position 1088 of SEQ ID NO: 588910
uguaucucgacucgaaaga

SEQ ID NO: 897839 - RNA, 19 nt, Artificial Sequence
  Description of Artificial Sequence: Synthetic oligonucleotide
  Antisense strand to SEQ ID NO: 897838
ucuuucgagucgagauaca

SEQ ID NO: 897840 - RNA, 19 nt, Artificial Sequence
  Description of Artificial Sequence: Synthetic oligonucleotide
  Sense strand starting at position 1300 of SEQ ID NO: 588910
ggcagagauucgccaugca

SEQ ID NO: 897841 - RNA, 19 nt, Artificial Sequence
  Description of Artificial Sequence: Synthetic oligonucleotide
  Antisense strand to SEQ ID NO: 897840
ugcauggcgaaucucugcc

SEQ ID NO: 897842 - RNA, 19 nt, Artificial Sequence
  Description of Artificial Sequence: Synthetic oligonucleotide
  Sense strand starting at position 1303 of SEQ ID NO: 588910
agagauucgccaugcagga

SEQ ID NO: 897843 - RNA, 19 nt, Artificial Sequence
  Description of Artificial Sequence: Synthetic oligonucleotide
  Antisense strand to SEQ ID NO: 897842
uccugcauggcgaaucucu

SEQ ID NO: 897844 - RNA, 19 nt, Artificial Sequence
  Description of Artificial Sequence: Synthetic oligonucleotide
  Sense strand starting at position 1310 of SEQ ID NO: 588910
cgccaugcaggaugaaauu

SEQ ID NO: 897845 - RNA, 19 nt, Artificial Sequence
  Description of Artificial Sequence: Synthetic oligonucleotide
  Antisense strand to SEQ ID NO: 897844
aauuucauccugcauggcg

SEQ ID NO: 897846 - RNA, 19 nt, Artificial Sequence
  Description of Artificial Sequence: Synthetic oligonucleotide
  Sense strand starting at position 1334 of SEQ ID NO: 588910
cagagagccguuuacgcua

SEQ ID NO: 897847 - RNA, 19 nt, Artificial Sequence
  Description of Artificial Sequence: Synthetic oligonucleotide
  Antisense strand to SEQ ID NO: 897846
uagcguaaacggcucucug

SEQ ID NO: 897848 - RNA, 19 nt, Artificial Sequence
  Description of Artificial Sequence: Synthetic oligonucleotide
  Sense strand starting at position 2581 of SEQ ID NO: 588910
caagaagacgcggaugauu

SEQ ID NO: 897849 - RNA, 19 nt, Artificial Sequence
  Description of Artificial Sequence: Synthetic oligonucleotide
  Antisense strand to SEQ ID NO: 897848
aaucauccgcgucuucuug

SEQ ID NO: 897850 - RNA, 19 nt, Artificial Sequence
  Description of Artificial Sequence: Synthetic oligonucleotide
  Sense strand starting at position 2715 of SEQ ID NO: 588910
uuucuuauguucuuggaga

SEQ ID NO: 897851 - RNA, 19 nt, Artificial Sequence
  Description of Artificial Sequence: Synthetic oligonucleotide
  Antisense strand to SEQ ID NO: 897850
ucuccaagaacauaagaaa

SEQ ID NO: 897852 - RNA, 19 nt, Artificial Sequence
  Description of Artificial Sequence: Synthetic oligonucleotide
  Sense strand starting at position 2717 of SEQ ID NO: 588910
ucuuauguucuuggagauu

SEQ ID NO: 897853 - RNA, 19 nt, Artificial Sequence
  Description of Artificial Sequence: Synthetic oligonucleotide
  Antisense strand to SEQ ID NO: 897852
aaucuccaagaacauaaga

SEQ ID NO: 897854 - RNA, 19 nt, Artificial Sequence
  Description of Artificial Sequence: Synthetic oligonucleotide
  Sense strand starting at position 2800 of SEQ ID NO: 588910
acaggucgccaguggaaua

SEQ ID NO: 897855 - RNA, 19 nt, Artificial Sequence
  Description of Artificial Sequence: Synthetic oligonucleotide
  Antisense strand to SEQ ID NO: 897854
uauuccacuggcgaccugu

SEQ ID NO: 897856 - RNA, 19 nt, Artificial Sequence
  Description of Artificial Sequence: Synthetic oligonucleotide
  Sense strand starting at position 3055 of SEQ ID NO: 588910
ggauuuacaucucagcagu

SEQ ID NO: 897857 - RNA, 19 nt, Artificial Sequence
  Description of Artificial Sequence: Synthetic oligonucleotide
  Antisense strand to SEQ ID NO: 897856
acugcugagauguaaaucc

SEQ ID NO: 897858 - RNA, 19 nt, Artificial Sequence
  Description of Artificial Sequence: Synthetic oligonucleotide
  Sense strand starting at position 3208 of SEQ ID NO: 588910
guuuaagguccuggcucua

SEQ ID NO: 897859 - RNA, 19 nt, Artificial Sequence
  Description of Artificial Sequence: Synthetic oligonucleotide
  Antisense strand to SEQ ID NO: 897858
uagagccaggaccuuaaac

SEQ ID NO: 897860 - RNA, 19 nt, Artificial Sequence
  Description of Artificial Sequence: Synthetic oligonucleotide
  Sense strand starting at position 3221 of SEQ ID NO: 588910
gcucuaaacucuguagcca

SEQ ID NO: 897861 - RNA, 19 nt, Artificial Sequence
  Description of Artificial Sequence: Synthetic oligonucleotide
  Antisense strand to SEQ ID NO: 897860
uggcuacagaguuuagagc

SEQ ID NO: 897862 - RNA, 19 nt, Artificial Sequence
  Description of Artificial Sequence: Synthetic oligonucleotide
  Sense strand starting at position 3317 of SEQ ID NO: 588910
agaucauuccugugcaguc

SEQ ID NO: 897863 - RNA, 19 nt, Artificial Sequence
  Description of Artificial Sequence: Synthetic oligonucleotide
  Antisense strand to SEQ ID NO: 897862
gacugcacaggaaugaucu

SEQ ID NO: 897864 - RNA, 19 nt, Artificial Sequence
  Description of Artificial Sequence: Synthetic oligonucleotide
  Sense strand starting at position 3318 of SEQ ID NO: 588910
gaucauuccugugcaguca

SEQ ID NO: 897865 - RNA, 19 nt, Artificial Sequence
  Description of Artificial Sequence: Synthetic oligonucleotide
  Antisense strand to SEQ ID NO: 897864
ugacugcacaggaaugauc

SEQ ID NO: 897866 - RNA, 19 nt, Artificial Sequence
  Description of Artificial Sequence: Synthetic oligonucleotide
  Sense strand starting at position 3497 of SEQ ID NO: 588910
gugccugggaccugcaaua

SEQ ID NO: 897867 - RNA, 19 nt, Artificial Sequence
  Description of Artificial Sequence: Synthetic oligonucleotide
  Antisense strand to SEQ ID NO: 897866
uauugcaggucccaggcac

SEQ ID NO: 897868 - RNA, 19 nt, Artificial Sequence
  Description of Artificial Sequence: Synthetic oligonucleotide
  Sense strand starting at position 3531 of SEQ ID NO: 588910
ccuggcuguagccaugaua

SEQ ID NO: 897869 - RNA, 19 nt, Artificial Sequence
  Description of Artificial Sequence: Synthetic oligonucleotide
  Antisense strand to SEQ ID NO: 897868
uaucauggcuacagccagg

SEQ ID NO: 897870 - RNA, 19 nt, Artificial Sequence
  Description of Artificial Sequence: Synthetic oligonucleotide
  Sense strand starting at position 3626 of SEQ ID NO: 588910
uagagaaucuguguaggag

SEQ ID NO: 897871 - RNA, 19 nt, Artificial Sequence
  Description of Artificial Sequence: Synthetic oligonucleotide
  Antisense strand to SEQ ID NO: 897870
cuccuacacagauucucua

SEQ ID NO: 897872 - RNA, 19 nt, Artificial Sequence
  Description of Artificial Sequence: Synthetic oligonucleotide
  Sense strand starting at position 3671 of SEQ ID NO: 588910
ugcaaucuucuauguagag

SEQ ID NO: 897873 - RNA, 19 nt, Artificial Sequence
  Description of Artificial Sequence: Synthetic oligonucleotide
  Antisense strand to SEQ ID NO: 897872
cucuacauagaagauugca

SEQ ID NO: 897874 - RNA, 19 nt, Artificial Sequence
  Description of Artificial Sequence: Synthetic oligonucleotide
  Sense strand starting at position 3672 of SEQ ID NO: 588910
gcaaucuucuauguagaga

SEQ ID NO: 897875 - RNA, 19 nt, Artificial Sequence
  Description of Artificial Sequence: Synthetic oligonucleotide
  Antisense strand to SEQ ID NO: 897874
ucucuacauagaagauugc

SEQ ID NO: 897876 - RNA, 19 nt, Artificial Sequence
  Description of Artificial Sequence: Synthetic oligonucleotide
  Sense strand starting at position 3719 of SEQ ID NO: 588910
gugugcauuucugagaaca

SEQ ID NO: 897877 - RNA, 19 nt, Artificial Sequence
  Description of Artificial Sequence: Synthetic oligonucleotide
  Antisense strand to SEQ ID NO: 897876
uguucucagaaaugcacac

SEQ ID NO: 897878 - RNA, 19 nt, Artificial Sequence
  Description of Artificial Sequence: Synthetic oligonucleotide
  Sense strand starting at position 273 of SEQ ID NO: 588911
caguauguccugcaaugga

SEQ ID NO: 897879 - RNA, 19 nt, Artificial Sequence
  Description of Artificial Sequence: Synthetic oligonucleotide
  Antisense strand to SEQ ID NO: 897878
uccauugcaggacauacug

SEQ ID NO: 897880 - RNA, 19 nt, Artificial Sequence
  Description of Artificial Sequence: Synthetic oligonucleotide
  Sense strand starting at position 286 of SEQ ID NO: 588911
aauggaagacacugucauu

SEQ ID NO: 897881 - RNA, 19 nt, Artificial Sequence
  Description of Artificial Sequence: Synthetic oligonucleotide
  Antisense strand to SEQ ID NO: 897880
aaugacagugucuuccauu

SEQ ID NO: 897882 - RNA, 19 nt, Artificial Sequence
  Description of Artificial Sequence: Synthetic oligonucleotide
  Sense strand starting at position 311 of SEQ ID NO: 588911
accaguagacggugauauu

SEQ ID NO: 897883 - RNA, 19 nt, Artificial Sequence
  Description of Artificial Sequence: Synthetic oligonucleotide
  Antisense strand to SEQ ID NO: 897882
aauaucaccgucuacuggu

SEQ ID NO: 897884 - RNA, 19 nt, Artificial Sequence
  Description of Artificial Sequence: Synthetic oligonucleotide
  Sense strand starting at position 312 of SEQ ID NO: 588911
ccaguagacggugauauua

SEQ ID NO: 897885 - RNA, 19 nt, Artificial Sequence
  Description of Artificial Sequence: Synthetic oligonucleotide
  Antisense strand to SEQ ID NO: 897884
uaauaucaccgucuacugg

SEQ ID NO: 897886 - RNA, 19 nt, Artificial Sequence
  Description of Artificial Sequence: Synthetic oligonucleotide
  Sense strand starting at position 323 of SEQ ID NO: 588911
ugauauuaaguuuggugau

SEQ ID NO: 897887 - RNA, 19 nt, Artificial Sequence
  Description of Artificial Sequence: Synthetic oligonucleotide
  Antisense strand to SEQ ID NO: 897886
aucaccaaacuuaauauca

SEQ ID NO: 897888 - RNA, 19 nt, Artificial Sequence
  Description of Artificial Sequence: Synthetic oligonucleotide
  Sense strand starting at position 444 of SEQ ID NO: 588911
agaucugugugguccaaug

SEQ ID NO: 897889 - RNA, 19 nt, Artificial Sequence
  Description of Artificial Sequence: Synthetic oligonucleotide
  Antisense strand to SEQ ID NO: 897888
cauuggaccacacagaucu

SEQ ID NO: 897890 - RNA, 19 nt, Artificial Sequence
  Description of Artificial Sequence: Synthetic oligonucleotide
  Sense strand starting at position 461 of SEQ ID NO: 588911
uguggacagucacuaaguu

SEQ ID NO: 897891 - RNA, 19 nt, Artificial Sequence
  Description of Artificial Sequence: Synthetic oligonucleotide
  Antisense strand to SEQ ID NO: 897890
aacuuagugacuguccaca

SEQ ID NO: 897892 - RNA, 19 nt, Artificial Sequence
  Description of Artificial Sequence: Synthetic oligonucleotide
  Sense strand starting at position 462 of SEQ ID NO: 588911
guggacagucacuaaguua

SEQ ID NO: 897893 - RNA, 19 nt, Artificial Sequence
  Description of Artificial Sequence: Synthetic oligonucleotide
  Antisense strand to SEQ ID NO: 897892
uaacuuagugacuguccac

SEQ ID NO: 897894 - RNA, 19 nt, Artificial Sequence
  Description of Artificial Sequence: Synthetic oligonucleotide
  Sense strand starting at position 476 of SEQ ID NO: 588911
aguuacacguggcuauuua

SEQ ID NO: 897895 - RNA, 19 nt, Artificial Sequence
  Description of Artificial Sequence: Synthetic oligonucleotide
  Antisense strand to SEQ ID NO: 897894
uaaauagccacguguaacu

SEQ ID NO: 897896 - RNA, 19 nt, Artificial Sequence
  Description of Artificial Sequence: Synthetic oligonucleotide
  Sense strand starting at position 834 of SEQ ID NO: 588911
augaauagcucugcaagac

SEQ ID NO: 897897 - RNA, 19 nt, Artificial Sequence
  Description of Artificial Sequence: Synthetic oligonucleotide
  Antisense strand to SEQ ID NO: 897896
gucuugcagagcuauucau

SEQ ID NO: 897898 - RNA, 19 nt, Artificial Sequence
  Description of Artificial Sequence: Synthetic oligonucleotide
  Sense strand starting at position 835 of SEQ ID NO: 588911
ugaauagcucugcaagaca

SEQ ID NO: 897899 - RNA, 19 nt, Artificial Sequence
  Description of Artificial Sequence: Synthetic oligonucleotide
  Antisense strand to SEQ ID NO: 897898
ugucuugcagagcuauuca

SEQ ID NO: 897900 - RNA, 19 nt, Artificial Sequence
  Description of Artificial Sequence: Synthetic oligonucleotide
  Sense strand starting at position 894 of SEQ ID NO: 588911
uugacauucugguuucuua

SEQ ID NO: 897901 - RNA, 19 nt, Artificial Sequence
  Description of Artificial Sequence: Synthetic oligonucleotide
  Antisense strand to SEQ ID NO: 897900
uaagaaaccagaaugucaa

SEQ ID NO: 897902 - RNA, 19 nt, Artificial Sequence
  Description of Artificial Sequence: Synthetic oligonucleotide
  Sense strand starting at position 897 of SEQ ID NO: 588911
acauucugguuucuuauua

SEQ ID NO: 897903 - RNA, 19 nt, Artificial Sequence
  Description of Artificial Sequence: Synthetic oligonucleotide
  Antisense strand to SEQ ID NO: 897902
uaauaagaaaccagaaugu

SEQ ID NO: 897904 - RNA, 19 nt, Artificial Sequence
  Description of Artificial Sequence: Synthetic oligonucleotide
  Sense strand starting at position 1303 of SEQ ID NO: 588911
cuaguuguaucuuuauaag

SEQ ID NO: 897905 - RNA, 19 nt, Artificial Sequence
  Description of Artificial Sequence: Synthetic oligonucleotide
  Antisense strand to SEQ ID NO: 897904
cuuauaaagauacaacuag

SEQ ID NO: 897906 - RNA, 19 nt, Artificial Sequence
  Description of Artificial Sequence: Synthetic oligonucleotide
  Sense strand starting at position 1448 of SEQ ID NO: 588911
cguaguuccaaagagcuga

SEQ ID NO: 897907 - RNA, 19 nt, Artificial Sequence
  Description of Artificial Sequence: Synthetic oligonucleotide
  Antisense strand to SEQ ID NO: 897906
ucagcucuuuggaacuacg

SEQ ID NO: 897908 - RNA, 19 nt, Artificial Sequence
  Description of Artificial Sequence: Synthetic oligonucleotide
  Sense strand starting at position 1459 of SEQ ID NO: 588911
agagcugacuuccuuagga

SEQ ID NO: 897909 - RNA, 19 nt, Artificial Sequence
  Description of Artificial Sequence: Synthetic oligonucleotide
  Antisense strand to SEQ ID NO: 897908
uccuaaggaagucagcucu

SEQ ID NO: 897910 - RNA, 19 nt, Artificial Sequence
  Description of Artificial Sequence: Synthetic oligonucleotide
  Sense strand starting at position 1753 of SEQ ID NO: 588911
gaggucucaggccacaaau

SEQ ID NO: 897911 - RNA, 19 nt, Artificial Sequence
  Description of Artificial Sequence: Synthetic oligonucleotide
  Antisense strand to SEQ ID NO: 897910
auuuguggccugagaccuc

SEQ ID NO: 897912 - RNA, 19 nt, Artificial Sequence
  Description of Artificial Sequence: Synthetic oligonucleotide
  Sense strand starting at position 2077 of SEQ ID NO: 588911
ccaagaauuguuuaccuug

SEQ ID NO: 897913 - RNA, 19 nt, Artificial Sequence
  Description of Artificial Sequence: Synthetic oligonucleotide
  Antisense strand to SEQ ID NO: 897912
caagguaaacaauucuugg

SEQ ID NO: 897914 - RNA, 19 nt, Artificial Sequence
  Description of Artificial Sequence: Synthetic oligonucleotide
  Sense strand starting at position 2186 of SEQ ID NO: 588911
aaaugauugcaauacguuu

SEQ ID NO: 897915 - RNA, 19 nt, Artificial Sequence
  Description of Artificial Sequence: Synthetic oligonucleotide
  Antisense strand to SEQ ID NO: 897914
aaacguauugcaaucauuu

SEQ ID NO: 897916 - RNA, 19 nt, Artificial Sequence
  Description of Artificial Sequence: Synthetic oligonucleotide
  Sense strand starting at position 2625 of SEQ ID NO: 588911
aggcuuugcagguauuaaa

SEQ ID NO: 897917 - RNA, 19 nt, Artificial Sequence
  Description of Artificial Sequence: Synthetic oligonucleotide
  Antisense strand to SEQ ID NO: 897916
uuuaauaccugcaaagccu

SEQ ID NO: 897918 - RNA, 19 nt, Artificial Sequence
  Description of Artificial Sequence: Synthetic oligonucleotide
  Sense strand starting at position 2645 of SEQ ID NO: 588911
cauauagcaguuugguaaa

SEQ ID NO: 897919 - RNA, 19 nt, Artificial Sequence
  Description of Artificial Sequence: Synthetic oligonucleotide
  Antisense strand to SEQ ID NO: 897918
uuuaccaaacugcuauaug

SEQ ID NO: 897920 - RNA, 19 nt, Artificial Sequence
  Description of Artificial Sequence: Synthetic oligonucleotide
  Sense strand starting at position 2673 of SEQ ID NO: 588911
agagccuuccaaugcauau

SEQ ID NO: 897921 - RNA, 19 nt, Artificial Sequence
  Description of Artificial Sequence: Synthetic oligonucleotide
  Antisense strand to SEQ ID NO: 897920
auaugcauuggaaggcucu

SEQ ID NO: 897922 - RNA, 19 nt, Artificial Sequence
  Description of Artificial Sequence: Synthetic oligonucleotide
  Sense strand starting at position 2709 of SEQ ID NO: 588911
gcacauacuuaauuggauu

SEQ ID NO: 897923 - RNA, 19 nt, Artificial Sequence
  Description of Artificial Sequence: Synthetic oligonucleotide
  Antisense strand to SEQ ID NO: 897922
aauccaauuaaguaugugc

SEQ ID NO: 897924 - RNA, 19 nt, Artificial Sequence
  Description of Artificial Sequence: Synthetic oligonucleotide
  Sense strand starting at position 2887 of SEQ ID NO: 588911
guuucccuauuggugaaua

SEQ ID NO: 897925 - RNA, 19 nt, Artificial Sequence
  Description of Artificial Sequence: Synthetic oligonucleotide
  Antisense strand to SEQ ID NO: 897924
uauucaccaauagggaaac

SEQ ID NO: 897926 - RNA, 19 nt, Artificial Sequence
  Description of Artificial Sequence: Synthetic oligonucleotide
  Sense strand starting at position 2889 of SEQ ID NO: 588911
uucccuauuggugaauacu

SEQ ID NO: 897927 - RNA, 19 nt, Artificial Sequence
  Description of Artificial Sequence: Synthetic oligonucleotide
  Antisense strand to SEQ ID NO: 897926
aguauucaccaauagggaa

SEQ ID NO: 897928 - RNA, 19 nt, Artificial Sequence
  Description of Artificial Sequence: Synthetic oligonucleotide
  Sense strand starting at position 2892 of SEQ ID NO: 588911
ccuauuggugaauacuuau

SEQ ID NO: 897929 - RNA, 19 nt, Artificial Sequence
  Description of Artificial Sequence: Synthetic oligonucleotide
  Antisense strand to SEQ ID NO: 897928
auaaguauucaccaauagg

SEQ ID NO: 897930 - RNA, 19 nt, Artificial Sequence
  Description of Artificial Sequence: Synthetic oligonucleotide
  Sense strand starting at position 2895 of SEQ ID NO: 588911
auuggugaauacuuauguu

SEQ ID NO: 897931 - RNA, 19 nt, Artificial Sequence
  Description of Artificial Sequence: Synthetic oligonucleotide
  Antisense strand to SEQ ID NO: 897930
aacauaaguauucaccaau

SEQ ID NO: 897932 - RNA, 19 nt, Artificial Sequence
  Description of Artificial Sequence: Synthetic oligonucleotide
  Sense strand starting at position 3036 of SEQ ID NO: 588911
gacuaugcacguuauuaau

SEQ ID NO: 897933 - RNA, 19 nt, Artificial Sequence
  Description of Artificial Sequence: Synthetic oligonucleotide
  Antisense strand to SEQ ID NO: 897932
auuaauaacgugcauaguc

SEQ ID NO: 897934 - RNA, 19 nt, Artificial Sequence
  Description of Artificial Sequence: Synthetic oligonucleotide
  Sense strand starting at position 3038 of SEQ ID NO: 588911
cuaugcacguuauuaauuu

SEQ ID NO: 897935 - RNA, 19 nt, Artificial Sequence
  Description of Artificial Sequence: Synthetic oligonucleotide
  Antisense strand to SEQ ID NO: 897934
aaauuaauaacgugcauag

SEQ ID NO: 897936 - RNA, 19 nt, Artificial Sequence
  Description of Artificial Sequence: Synthetic oligonucleotide
  Sense strand starting at position 3112 of SEQ ID NO: 588911
ugcucuaguccaugaugga

SEQ ID NO: 897937 - RNA, 19 nt, Artificial Sequence
  Description of Artificial Sequence: Synthetic oligonucleotide
  Antisense strand to SEQ ID NO: 897936
uccaucauggacuagagca

SEQ ID NO: 897938 - RNA, 19 nt, Artificial Sequence
  Description of Artificial Sequence: Synthetic oligonucleotide
  Sense strand starting at position 3113 of SEQ ID NO: 588911
gcucuaguccaugauggau

SEQ ID NO: 897939 - RNA, 19 nt, Artificial Sequence
  Description of Artificial Sequence: Synthetic oligonucleotide
  Antisense strand to SEQ ID NO: 897938
auccaucauggacuagagc

SEQ ID NO: 897940 - RNA, 19 nt, Artificial Sequence
  Description of Artificial Sequence: Synthetic oligonucleotide
  Sense strand starting at position 3116 of SEQ ID NO: 588911
cuaguccaugauggauauu

SEQ ID NO: 897941 - RNA, 19 nt, Artificial Sequence
  Description of Artificial Sequence: Synthetic oligonucleotide
  Antisense strand to SEQ ID NO: 897940
aauauccaucauggacuag

SEQ ID NO: 897942 - RNA, 19 nt, Artificial Sequence
  Description of Artificial Sequence: Synthetic oligonucleotide
  Sense strand starting at position 3202 of SEQ ID NO: 588911
gaugcuucugguuacucau

SEQ ID NO: 897943 - RNA, 19 nt, Artificial Sequence
  Description of Artificial Sequence: Synthetic oligonucleotide
  Antisense strand to SEQ ID NO: 897942
augaguaaccagaagcauc

SEQ ID NO: 897944 - RNA, 19 nt, Artificial Sequence
  Description of Artificial Sequence: Synthetic oligonucleotide
  Sense strand starting at position 3482 of SEQ ID NO: 588911
aucugcauauugcuuagaa

SEQ ID NO: 897945 - RNA, 19 nt, Artificial Sequence
  Description of Artificial Sequence: Synthetic oligonucleotide
  Antisense strand to SEQ ID NO: 897944
uucuaagcaauaugcagau

SEQ ID NO: 897946 - RNA, 19 nt, Artificial Sequence
  Description of Artificial Sequence: Synthetic oligonucleotide
  Sense strand starting at position 3483 of SEQ ID NO: 588911
ucugcauauugcuuagaaa

SEQ ID NO: 897947 - RNA, 19 nt, Artificial Sequence
  Description of Artificial Sequence: Synthetic oligonucleotide
  Antisense strand to SEQ ID NO: 897946
uuucuaagcaauaugcaga

SEQ ID NO: 897948 - RNA, 19 nt, Artificial Sequence
  Description of Artificial Sequence: Synthetic oligonucleotide
  Sense strand starting at position 3484 of SEQ ID NO: 588911
cugcauauugcuuagaaag

SEQ ID NO: 897949 - RNA, 19 nt, Artificial Sequence
  Description of Artificial Sequence: Synthetic oligonucleotide
  Antisense strand to SEQ ID NO: 897948
cuuucuaagcaauaugcag

SEQ ID NO: 897950 - RNA, 19 nt, Artificial Sequence
  Description of Artificial Sequence: Synthetic oligonucleotide
  Sense strand starting at position 3546 of SEQ ID NO: 588911
guuuguuguuauuugcaau

SEQ ID NO: 897951 - RNA, 19 nt, Artificial Sequence
  Description of Artificial Sequence: Synthetic oligonucleotide
  Antisense strand to SEQ ID NO: 897950
auugcaaauaacaacaaac

SEQ ID NO: 897952 - RNA, 19 nt, Artificial Sequence
  Description of Artificial Sequence: Synthetic oligonucleotide
  Sense strand starting at position 3564 of SEQ ID NO: 588911
uuagcucuuuacucuggaa

SEQ ID NO: 897953 - RNA, 19 nt, Artificial Sequence
  Description of Artificial Sequence: Synthetic oligonucleotide
  Antisense strand to SEQ ID NO: 897952
uuccagaguaaagagcuaa

SEQ ID NO: 897954 - RNA, 19 nt, Artificial Sequence
  Description of Artificial Sequence: Synthetic oligonucleotide
  Sense strand starting at position 3655 of SEQ ID NO: 588911
ugccauuuauuugaguaac

SEQ ID NO: 897955 - RNA, 19 nt, Artificial Sequence
  Description of Artificial Sequence: Synthetic oligonucleotide
  Antisense strand to SEQ ID NO: 897954
guuacucaaauaaauggca

SEQ ID NO: 897956 - RNA, 19 nt, Artificial Sequence
  Description of Artificial Sequence: Synthetic oligonucleotide
  Sense strand starting at position 3665 of SEQ ID NO: 588911
uugaguaacccugacuuuc

SEQ ID NO: 897957 - RNA, 19 nt, Artificial Sequence
  Description of Artificial Sequence: Synthetic oligonucleotide
  Antisense strand to SEQ ID NO: 897956
gaaagucaggguuacucaa

SEQ ID NO: 897958 - RNA, 19 nt, Artificial Sequence
  Description of Artificial Sequence: Synthetic oligonucleotide
  Sense strand starting at position 85 of SEQ ID NO: 588912
agcggugucccugaggcua

SEQ ID NO: 897959 - RNA, 19 nt, Artificial Sequence
  Description of Artificial Sequence: Synthetic oligonucleotide
  Antisense strand to SEQ ID NO: 897958
uagccucagggacaccgcu

SEQ ID NO: 897960 - RNA, 19 nt, Artificial Sequence
  Description of Artificial Sequence: Synthetic oligonucleotide
  Sense strand starting at position 226 of SEQ ID NO: 588912
uggcacggaucuuuacaaa

SEQ ID NO: 897961 - RNA, 19 nt, Artificial Sequence
  Description of Artificial Sequence: Synthetic oligonucleotide
  Antisense strand to SEQ ID NO: 897960
uuuguaaagauccgugcca

SEQ ID NO: 897962 - RNA, 19 nt, Artificial Sequence
  Description of Artificial Sequence: Synthetic oligonucleotide
  Sense strand starting at position 809 of SEQ ID NO: 588912
aagugagaagguuguuaau

SEQ ID NO: 897963 - RNA, 19 nt, Artificial Sequence
  Description of Artificial Sequence: Synthetic oligonucleotide
  Antisense strand to SEQ ID NO: 897962
auuaacaaccuucucacuu

SEQ ID NO: 897964 - RNA, 19 nt, Artificial Sequence
  Description of Artificial Sequence: Synthetic oligonucleotide
  Sense strand starting at position 811 of SEQ ID NO: 588912
gugagaagguuguuaaugu

SEQ ID NO: 897965 - RNA, 19 nt, Artificial Sequence
  Description of Artificial Sequence: Synthetic oligonucleotide
  Antisense strand to SEQ ID NO: 897964
acauuaacaaccuucucac

SEQ ID NO: 897966 - RNA, 19 nt, Artificial Sequence
  Description of Artificial Sequence: Synthetic oligonucleotide
  Sense strand starting at position 2126 of SEQ ID NO: 588912
aguuguuaguggccuggaa

SEQ ID NO: 897967 - RNA, 19 nt, Artificial Sequence
  Description of Artificial Sequence: Synthetic oligonucleotide
  Antisense strand to SEQ ID NO: 897966
uuccaggccacuaacaacu

SEQ ID NO: 897968 - RNA, 19 nt, Artificial Sequence
  Description of Artificial Sequence: Synthetic oligonucleotide
  Sense strand starting at position 2128 of SEQ ID NO: 588912
uuguuaguggccuggaaca

SEQ ID NO: 897969 - RNA, 19 nt, Artificial Sequence
  Description of Artificial Sequence: Synthetic oligonucleotide
  Antisense strand to SEQ ID NO: 897968
uguuccaggccacuaacaa

SEQ ID NO: 897970 - RNA, 19 nt, Artificial Sequence
  Description of Artificial Sequence: Synthetic oligonucleotide
  Sense strand starting at position 2220 of SEQ ID NO: 588912
cggaguuuccgggaccgua

SEQ ID NO: 897971 - RNA, 19 nt, Artificial Sequence
  Description of Artificial Sequence: Synthetic oligonucleotide
  Antisense strand to SEQ ID NO: 897970
uacggucccggaaacuccg

SEQ ID NO: 897972 - RNA, 19 nt, Artificial Sequence
  Description of Artificial Sequence: Synthetic oligonucleotide
  Sense strand starting at position 2662 of SEQ ID NO: 588912
gccaucucccaaugcgaga

SEQ ID NO: 897973 - RNA, 19 nt, Artificial Sequence
  Description of Artificial Sequence: Synthetic oligonucleotide
  Antisense strand to SEQ ID NO: 897972
ucucgcauugggagauggc

SEQ ID NO: 897974 - RNA, 19 nt, Artificial Sequence
  Description of Artificial Sequence: Synthetic oligonucleotide
  Sense strand starting at position 2673 of SEQ ID NO: 588912
augcgagaacucugcggau

SEQ ID NO: 897975 - RNA, 19 nt, Artificial Sequence
  Description of Artificial Sequence: Synthetic oligonucleotide
  Antisense strand to SEQ ID NO: 897974
auccgcagaguucucgcau

SEQ ID NO: 897976 - RNA, 19 nt, Artificial Sequence
  Description of Artificial Sequence: Synthetic oligonucleotide
  Sense strand starting at position 2675 of SEQ ID NO: 588912
gcgagaacucugcggauga

SEQ ID NO: 897977 - RNA, 19 nt, Artificial Sequence
  Description of Artificial Sequence: Synthetic oligonucleotide
  Antisense strand to SEQ ID NO: 897976
ucauccgcagaguucucgc

SEQ ID NO: 897978 - RNA, 19 nt, Artificial Sequence
  Description of Artificial Sequence: Synthetic oligonucleotide
  Sense strand starting at position 2766 of SEQ ID NO: 588912
ccuagagcugcuggagaaa

SEQ ID NO: 897979 - RNA, 19 nt, Artificial Sequence
  Description of Artificial Sequence: Synthetic oligonucleotide
  Antisense strand to SEQ ID NO: 897978
uuucuccagcagcucuagg

SEQ ID NO: 897980 - RNA, 19 nt, Artificial Sequence
  Description of Artificial Sequence: Synthetic oligonucleotide
  Sense strand starting at position 2857 of SEQ ID NO: 588912
ggagucuuguucuuuagca

SEQ ID NO: 897981 - RNA, 19 nt, Artificial Sequence
  Description of Artificial Sequence: Synthetic oligonucleotide
  Antisense strand to SEQ ID NO: 897980
ugcuaaagaacaagacucc

SEQ ID NO: 897982 - RNA, 19 nt, Artificial Sequence
  Description of Artificial Sequence: Synthetic oligonucleotide
  Sense strand starting at position 2858 of SEQ ID NO: 588912
gagucuuguucuuuagcac

SEQ ID NO: 897983 - RNA, 19 nt, Artificial Sequence
  Description of Artificial Sequence: Synthetic oligonucleotide
  Antisense strand to SEQ ID NO: 897982
gugcuaaagaacaagacuc

SEQ ID NO: 897984 - RNA, 19 nt, Artificial Sequence
  Description of Artificial Sequence: Synthetic oligonucleotide
  Sense strand starting at position 2878 of SEQ ID NO: 588912
cccagaaccuuccaagaga

SEQ ID NO: 897985 - RNA, 19 nt, Artificial Sequence
  Description of Artificial Sequence: Synthetic oligonucleotide
  Antisense strand to SEQ ID NO: 897984
ucucuuggaagguucuggg

SEQ ID NO: 897986 - RNA, 19 nt, Artificial Sequence
  Description of Artificial Sequence: Synthetic oligonucleotide
  Sense strand starting at position 2925 of SEQ ID NO: 588912
gagagucuauaugcagagu

SEQ ID NO: 897987 - RNA, 19 nt, Artificial Sequence
  Description of Artificial Sequence: Synthetic oligonucleotide
  Antisense strand to SEQ ID NO: 897986
acucugcauauagacucuc

SEQ ID NO: 897988 - RNA, 19 nt, Artificial Sequence
  Description of Artificial Sequence: Synthetic oligonucleotide
  Sense strand starting at position 2926 of SEQ ID NO: 588912
agagucuauaugcagagua

SEQ ID NO: 897989 - RNA, 19 nt, Artificial Sequence
  Description of Artificial Sequence: Synthetic oligonucleotide
  Antisense strand to SEQ ID NO: 897988
uacucugcauauagacucu

SEQ ID NO: 897990 - RNA, 19 nt, Artificial Sequence
  Description of Artificial Sequence: Synthetic oligonucleotide
  Sense strand starting at position 2928 of SEQ ID NO: 588912
agucuauaugcagaguaag

SEQ ID NO: 897991 - RNA, 19 nt, Artificial Sequence
  Description of Artificial Sequence: Synthetic oligonucleotide
  Antisense strand to SEQ ID NO: 897990
cuuacucugcauauagacu

SEQ ID NO: 897992 - RNA, 19 nt, Artificial Sequence
  Description of Artificial Sequence: Synthetic oligonucleotide
  Sense strand starting at position 3115 of SEQ ID NO: 588912
caggucuugugaguagucu

SEQ ID NO: 897993 - RNA, 19 nt, Artificial Sequence
  Description of Artificial Sequence: Synthetic oligonucleotide
  Antisense strand to SEQ ID NO: 897992
agacuacucacaagaccug

SEQ ID NO: 897994 - RNA, 19 nt, Artificial Sequence
  Description of Artificial Sequence: Synthetic oligonucleotide
  Sense strand starting at position 3124 of SEQ ID NO: 588912
ugaguagucugucccgaug

SEQ ID NO: 897995 - RNA, 19 nt, Artificial Sequence
  Description of Artificial Sequence: Synthetic oligonucleotide
  Antisense strand to SEQ ID NO: 897994
caucgggacagacuacuca

SEQ ID NO: 897996 - RNA, 19 nt, Artificial Sequence
  Description of Artificial Sequence: Synthetic oligonucleotide
  Sense strand starting at position 3206 of SEQ ID NO: 588912
gcuggugagccguccugau

SEQ ID NO: 897997 - RNA, 19 nt, Artificial Sequence
  Description of Artificial Sequence: Synthetic oligonucleotide
  Antisense strand to SEQ ID NO: 897996
aucaggacggcucaccagc

SEQ ID NO: 897998 - RNA, 19 nt, Artificial Sequence
  Description of Artificial Sequence: Synthetic oligonucleotide
  Sense strand starting at position 3243 of SEQ ID NO: 588912
gagagagucccagggauuc

SEQ ID NO: 897999 - RNA, 19 nt, Artificial Sequence
  Description of Artificial Sequence: Synthetic oligonucleotide
  Antisense strand to SEQ ID NO: 897998
gaaucccugggacucucuc

SEQ ID NO: 898000 - RNA, 19 nt, Artificial Sequence
  Description of Artificial Sequence: Synthetic oligonucleotide
  Sense strand starting at position 3284 of SEQ ID NO: 588912
aggugucucucuucuguca

SEQ ID NO: 898001 - RNA, 19 nt, Artificial Sequence
  Description of Artificial Sequence: Synthetic oligonucleotide
  Antisense strand to SEQ ID NO: 898000
ugacagaagagagacaccu

SEQ ID NO: 898002 - RNA, 19 nt, Artificial Sequence
  Description of Artificial Sequence: Synthetic oligonucleotide
  Sense strand starting at position 3394 of SEQ ID NO: 588912
cuuccuggacucugcagaa

SEQ ID NO: 898003 - RNA, 19 nt, Artificial Sequence
  Description of Artificial Sequence: Synthetic oligonucleotide
  Antisense strand to SEQ ID NO: 898002
uucugcagaguccaggaag

SEQ ID NO: 898004 - RNA, 19 nt, Artificial Sequence
  Description of Artificial Sequence: Synthetic oligonucleotide
  Sense strand starting at position 3407 of SEQ ID NO: 588912
gcagaauuccacugugccu

SEQ ID NO: 898005 - RNA, 19 nt, Artificial Sequence
  Description of Artificial Sequence: Synthetic oligonucleotide
  Antisense strand to SEQ ID NO: 898004
aggcacaguggaauucugc

SEQ ID NO: 898006 - RNA, 19 nt, Artificial Sequence
  Description of Artificial Sequence: Synthetic oligonucleotide
  Sense strand starting at position 3444 of SEQ ID NO: 588912
gaaugauucucacccucgu

SEQ ID NO: 898007 - RNA, 19 nt, Artificial Sequence
  Description of Artificial Sequence: Synthetic oligonucleotide
  Antisense strand to SEQ ID NO: 898006
acgagggugagaaucauuc

SEQ ID NO: 898008 - RNA, 19 nt, Artificial Sequence
  Description of Artificial Sequence: Synthetic oligonucleotide
  Sense strand starting at position 3463 of SEQ ID NO: 588912
cgacauuccuugcccugua

SEQ ID NO: 898009 - RNA, 19 nt, Artificial Sequence
  Description of Artificial Sequence: Synthetic oligonucleotide
  Antisense strand to SEQ ID NO: 898008
uacagggcaaggaaugucg

SEQ ID NO: 898010 - RNA, 19 nt, Artificial Sequence
  Description of Artificial Sequence: Synthetic oligonucleotide
  Sense strand starting at position 3501 of SEQ ID NO: 588912
ugcugcuucucuccaggaa

SEQ ID NO: 898011 - RNA, 19 nt, Artificial Sequence
  Description of Artificial Sequence: Synthetic oligonucleotide
  Antisense strand to SEQ ID NO: 898010
uuccuggagagaagcagca

SEQ ID NO: 898012 - RNA, 19 nt, Artificial Sequence
  Description of Artificial Sequence: Synthetic oligonucleotide
  Sense strand starting at position 3541 of SEQ ID NO: 588912
agcagucucuuguuaguuu

SEQ ID NO: 898013 - RNA, 19 nt, Artificial Sequence
  Description of Artificial Sequence: Synthetic oligonucleotide
  Antisense strand to SEQ ID NO: 898012
aaacuaacaagagacugcu

SEQ ID NO: 898014 - RNA, 19 nt, Artificial Sequence
  Description of Artificial Sequence: Synthetic oligonucleotide
  Sense strand starting at position 3549 of SEQ ID NO: 588912
cuuguuaguuuggagagga

SEQ ID NO: 898015 - RNA, 19 nt, Artificial Sequence
  Description of Artificial Sequence: Synthetic oligonucleotide
  Antisense strand to SEQ ID NO: 898014
uccucuccaaacuaacaag

SEQ ID NO: 898016 - RNA, 19 nt, Artificial Sequence
  Description of Artificial Sequence: Synthetic oligonucleotide
  Sense strand starting at position 3550 of SEQ ID NO: 588912
uuguuaguuuggagaggag

SEQ ID NO: 898017 - RNA, 19 nt, Artificial Sequence
  Description of Artificial Sequence: Synthetic oligonucleotide
  Antisense strand to SEQ ID NO: 898016
cuccucuccaaacuaacaa

SEQ ID NO: 898018 - RNA, 19 nt, Artificial Sequence
  Description of Artificial Sequence: Synthetic oligonucleotide
  Sense strand starting at position 3595 of SEQ ID NO: 588912
uguuguaguucucuagcaa

SEQ ID NO: 898019 - RNA, 19 nt, Artificial Sequence
  Description of Artificial Sequence: Synthetic oligonucleotide
  Antisense strand to SEQ ID NO: 898018
uugcuagagaacuacaaca

SEQ ID NO: 898020 - RNA, 19 nt, Artificial Sequence
  Description of Artificial Sequence: Synthetic oligonucleotide
  Sense strand starting at position 3596 of SEQ ID NO: 588912
guuguaguucucuagcaau

SEQ ID NO: 898021 - RNA, 19 nt, Artificial Sequence
  Description of Artificial Sequence: Synthetic oligonucleotide
  Antisense strand to SEQ ID NO: 898020
auugcuagagaacuacaac

SEQ ID NO: 898022 - RNA, 19 nt, Artificial Sequence
  Description of Artificial Sequence: Synthetic oligonucleotide
  Sense strand starting at position 3614 of SEQ ID NO: 588912
uugucauacccuuggccau

SEQ ID NO: 898023 - RNA, 19 nt, Artificial Sequence
  Description of Artificial Sequence: Synthetic oligonucleotide
  Antisense strand to SEQ ID NO: 898022
auggccaaggguaugacaa

SEQ ID NO: 898024 - RNA, 19 nt, Artificial Sequence
  Description of Artificial Sequence: Synthetic oligonucleotide
  Sense strand starting at position 3674 of SEQ ID NO: 588912
agcuacuugagaggucuua

SEQ ID NO: 898025 - RNA, 19 nt, Artificial Sequence
  Description of Artificial Sequence: Synthetic oligonucleotide
  Antisense strand to SEQ ID NO: 898024
uaagaccucucaaguagcu

SEQ ID NO: 898026 - RNA, 19 nt, Artificial Sequence
  Description of Artificial Sequence: Synthetic oligonucleotide
  Sense strand starting at position 3683 of SEQ ID NO: 588912
agaggucuuagguggacua

SEQ ID NO: 898027 - RNA, 19 nt, Artificial Sequence
  Description of Artificial Sequence: Synthetic oligonucleotide
  Antisense strand to SEQ ID NO: 898026
uaguccaccuaagaccucu

SEQ ID NO: 898028 - RNA, 19 nt, Artificial Sequence
  Description of Artificial Sequence: Synthetic oligonucleotide
  Sense strand starting at position 3684 of SEQ ID NO: 588912
gaggucuuagguggacuaa

SEQ ID NO: 898029 - RNA, 19 nt, Artificial Sequence
  Description of Artificial Sequence: Synthetic oligonucleotide
  Antisense strand to SEQ ID NO: 898028
uuaguccaccuaagaccuc

SEQ ID NO: 898030 - RNA, 19 nt, Artificial Sequence
  Description of Artificial Sequence: Synthetic oligonucleotide
  Sense strand starting at position 3765 of SEQ ID NO: 588912
uugggcucaucccugcaaa

SEQ ID NO: 898031 - RNA, 19 nt, Artificial Sequence
  Description of Artificial Sequence: Synthetic oligonucleotide
  Antisense strand to SEQ ID NO: 898030
uuugcagggaugagcccaa

SEQ ID NO: 898032 - RNA, 19 nt, Artificial Sequence
  Description of Artificial Sequence: Synthetic oligonucleotide
  Sense strand starting at position 3903 of SEQ ID NO: 588912
uugguugucguuucagagu

SEQ ID NO: 898033 - RNA, 19 nt, Artificial Sequence
  Description of Artificial Sequence: Synthetic oligonucleotide
  Antisense strand to SEQ ID NO: 898032
acucugaaacgacaaccaa

SEQ ID NO: 898034 - RNA, 19 nt, Artificial Sequence
  Description of Artificial Sequence: Synthetic oligonucleotide
  Sense strand starting at position 3916 of SEQ ID NO: 588912
cagaguugauccuaggaga

SEQ ID NO: 898035 - RNA, 19 nt, Artificial Sequence
  Description of Artificial Sequence: Synthetic oligonucleotide
  Antisense strand to SEQ ID NO: 898034
ucuccuaggaucaacucug

SEQ ID NO: 898036 - RNA, 19 nt, Artificial Sequence
  Description of Artificial Sequence: Synthetic oligonucleotide
  Sense strand starting at position 3919 of SEQ ID NO: 588912
aguugauccuaggagauaa

SEQ ID NO: 898037 - RNA, 19 nt, Artificial Sequence
  Description of Artificial Sequence: Synthetic oligonucleotide
  Antisense strand to SEQ ID NO: 898036
uuaucuccuaggaucaacu

SEQ ID NO: 898038 - RNA, 19 nt, Artificial Sequence
  Description of Artificial Sequence: Synthetic oligonucleotide
  Sense strand starting at position 6 of SEQ ID NO: 588913
cggagauaacacuguuauc

SEQ ID NO: 898039 - RNA, 19 nt, Artificial Sequence
  Description of Artificial Sequence: Synthetic oligonucleotide
  Antisense strand to SEQ ID NO: 898038
gauaacaguguuaucuccg

SEQ ID NO: 898040 - RNA, 19 nt, Artificial Sequence
  Description of Artificial Sequence: Synthetic oligonucleotide
  Sense strand starting at position 45 of SEQ ID NO: 588913
gaaagcaguuuggagugaa

SEQ ID NO: 898041 - RNA, 19 nt, Artificial Sequence
  Description of Artificial Sequence: Synthetic oligonucleotide
  Antisense strand to SEQ ID NO: 898040
uucacuccaaacugcuuuc

SEQ ID NO: 898042 - RNA, 19 nt, Artificial Sequence
  Description of Artificial Sequence: Synthetic oligonucleotide
  Sense strand starting at position 49 of SEQ ID NO: 588913
gcaguuuggagugaagugu

SEQ ID NO: 898043 - RNA, 19 nt, Artificial Sequence
  Description of Artificial Sequence: Synthetic oligonucleotide
  Antisense strand to SEQ ID NO: 898042
acacuucacuccaaacugc

SEQ ID NO: 898044 - RNA, 19 nt, Artificial Sequence
  Description of Artificial Sequence: Synthetic oligonucleotide
  Sense strand starting at position 55 of SEQ ID NO: 588913
uggagugaaguguguagua

SEQ ID NO: 898045 - RNA, 19 nt, Artificial Sequence
  Description of Artificial Sequence: Synthetic oligonucleotide
  Antisense strand to SEQ ID NO: 898044
uacuacacacuucacucca

SEQ ID NO: 898046 - RNA, 19 nt, Artificial Sequence
  Description of Artificial Sequence: Synthetic oligonucleotide
  Sense strand starting at position 57 of SEQ ID NO: 588913
gagugaaguguguaguaca

SEQ ID NO: 898047 - RNA, 19 nt, Artificial Sequence
  Description of Artificial Sequence: Synthetic oligonucleotide
  Antisense strand to SEQ ID NO: 898046
uguacuacacacuucacuc

SEQ ID NO: 898048 - RNA, 19 nt, Artificial Sequence
  Description of Artificial Sequence: Synthetic oligonucleotide
  Sense strand starting at position 109 of SEQ ID NO: 588913
cuuaaauacuggcuggaaa

SEQ ID NO: 898049 - RNA, 19 nt, Artificial Sequence
  Description of Artificial Sequence: Synthetic oligonucleotide
  Antisense strand to SEQ ID NO: 898048
uuuccagccaguauuuaag

SEQ ID NO: 898050 - RNA, 19 nt, Artificial Sequence
  Description of Artificial Sequence: Synthetic oligonucleotide
  Sense strand starting at position 152 of SEQ ID NO: 588913
ggguguacugugcgaccua

SEQ ID NO: 898051 - RNA, 19 nt, Artificial Sequence
  Description of Artificial Sequence: Synthetic oligonucleotide
  Antisense strand to SEQ ID NO: 898050
uaggucgcacaguacaccc

SEQ ID NO: 898052 - RNA, 19 nt, Artificial Sequence
  Description of Artificial Sequence: Synthetic oligonucleotide
  Sense strand starting at position 153 of SEQ ID NO: 588913
gguguacugugcgaccuau

SEQ ID NO: 898053 - RNA, 19 nt, Artificial Sequence
  Description of Artificial Sequence: Synthetic oligonucleotide
  Antisense strand to SEQ ID NO: 898052
auaggucgcacaguacacc

SEQ ID NO: 898054 - RNA, 19 nt, Artificial Sequence
  Description of Artificial Sequence: Synthetic oligonucleotide
  Sense strand starting at position 188 of SEQ ID NO: 588913
gggccuguuuccuccucua

SEQ ID NO: 898055 - RNA, 19 nt, Artificial Sequence
  Description of Artificial Sequence: Synthetic oligonucleotide
  Antisense strand to SEQ ID NO: 898054
uagaggaggaaacaggccc

SEQ ID NO: 898056 - RNA, 19 nt, Artificial Sequence
  Description of Artificial Sequence: Synthetic oligonucleotide
  Sense strand starting at position 257 of SEQ ID NO: 588913
gugaaagccuucuguauac

SEQ ID NO: 898057 - RNA, 19 nt, Artificial Sequence
  Description of Artificial Sequence: Synthetic oligonucleotide
  Antisense strand to SEQ ID NO: 898056
guauacagaaggcuuucac

SEQ ID NO: 898058 - RNA, 19 nt, Artificial Sequence
  Description of Artificial Sequence: Synthetic oligonucleotide
  Sense strand starting at position 456 of SEQ ID NO: 588913
gagcaaaggucacucaaga

SEQ ID NO: 898059 - RNA, 19 nt, Artificial Sequence
  Description of Artificial Sequence: Synthetic oligonucleotide
  Antisense strand to SEQ ID NO: 898058
ucuugagugaccuuugcuc

SEQ ID NO: 898060 - RNA, 19 nt, Artificial Sequence
  Description of Artificial Sequence: Synthetic oligonucleotide
  Sense strand starting at position 677 of SEQ ID NO: 588913
gggcuagucacuggguagu

SEQ ID NO: 898061 - RNA, 19 nt, Artificial Sequence
  Description of Artificial Sequence: Synthetic oligonucleotide
  Antisense strand to SEQ ID NO: 898060
acuacccagugacuagccc

SEQ ID NO: 898062 - RNA, 19 nt, Artificial Sequence
  Description of Artificial Sequence: Synthetic oligonucleotide
  Sense strand starting at position 1065 of SEQ ID NO: 588913
gggcuucugcaguaaagac

SEQ ID NO: 898063 - RNA, 19 nt, Artificial Sequence
  Description of Artificial Sequence: Synthetic oligonucleotide
  Antisense strand to SEQ ID NO: 898062
gucuuuacugcagaagccc

SEQ ID NO: 898064 - RNA, 19 nt, Artificial Sequence
  Description of Artificial Sequence: Synthetic oligonucleotide
  Sense strand starting at position 1134 of SEQ ID NO: 588913
uggugagcucguagcguua

SEQ ID NO: 898065 - RNA, 19 nt, Artificial Sequence
  Description of Artificial Sequence: Synthetic oligonucleotide
  Antisense strand to SEQ ID NO: 898064
uaacgcuacgagcucacca

SEQ ID NO: 898066 - RNA, 19 nt, Artificial Sequence
  Description of Artificial Sequence: Synthetic oligonucleotide
  Sense strand starting at position 1641 of SEQ ID NO: 588913
gcaggaaucagcgacguuu

SEQ ID NO: 898067 - RNA, 19 nt, Artificial Sequence
  Description of Artificial Sequence: Synthetic oligonucleotide
  Antisense strand to SEQ ID NO: 898066
aaacgucgcugauuccugc

SEQ ID NO: 898068 - RNA, 19 nt, Artificial Sequence
  Description of Artificial Sequence: Synthetic oligonucleotide
  Sense strand starting at position 2367 of SEQ ID NO: 588913
ggacuugagugucuccauu

SEQ ID NO: 898069 - RNA, 19 nt, Artificial Sequence
  Description of Artificial Sequence: Synthetic oligonucleotide
  Antisense strand to SEQ ID NO: 898068
aauggagacacucaagucc

SEQ ID NO: 898070 - RNA, 19 nt, Artificial Sequence
  Description of Artificial Sequence: Synthetic oligonucleotide
  Sense strand starting at position 2376 of SEQ ID NO: 588913
ugucuccauuucugaaaug

SEQ ID NO: 898071 - RNA, 19 nt, Artificial Sequence
  Description of Artificial Sequence: Synthetic oligonucleotide
  Antisense strand to SEQ ID NO: 898070
cauuucagaaauggagaca

SEQ ID NO: 898072 - RNA, 19 nt, Artificial Sequence
  Description of Artificial Sequence: Synthetic oligonucleotide
  Sense strand starting at position 2441 of SEQ ID NO: 588913
cguuucaacugguaggauu

SEQ ID NO: 898073 - RNA, 19 nt, Artificial Sequence
  Description of Artificial Sequence: Synthetic oligonucleotide
  Antisense strand to SEQ ID NO: 898072
aauccuaccaguugaaacg

SEQ ID NO: 898074 - RNA, 19 nt, Artificial Sequence
  Description of Artificial Sequence: Synthetic oligonucleotide
  Sense strand starting at position 2459 of SEQ ID NO: 588913
ugcugcauuuaucaaguaa

SEQ ID NO: 898075 - RNA, 19 nt, Artificial Sequence
  Description of Artificial Sequence: Synthetic oligonucleotide
  Antisense strand to SEQ ID NO: 898074
uuacuugauaaaugcagca

SEQ ID NO: 898076 - RNA, 19 nt, Artificial Sequence
  Description of Artificial Sequence: Synthetic oligonucleotide
  Sense strand starting at position 2554 of SEQ ID NO: 588913
uuaugauuaugucagugug

SEQ ID NO: 898077 - RNA, 19 nt, Artificial Sequence
  Description of Artificial Sequence: Synthetic oligonucleotide
  Antisense strand to SEQ ID NO: 898076
cacacugacauaaucauaa

SEQ ID NO: 898078 - RNA, 19 nt, Artificial Sequence
  Description of Artificial Sequence: Synthetic oligonucleotide
  Sense strand starting at position 2556 of SEQ ID NO: 588913
augauuaugucagugugac

SEQ ID NO: 898079 - RNA, 19 nt, Artificial Sequence
  Description of Artificial Sequence: Synthetic oligonucleotide
  Antisense strand to SEQ ID NO: 898078
gucacacugacauaaucau

SEQ ID NO: 898080 - RNA, 19 nt, Artificial Sequence
  Description of Artificial Sequence: Synthetic oligonucleotide
  Sense strand starting at position 2570 of SEQ ID NO: 588913
gugacagucaccugagucu

SEQ ID NO: 898081 - RNA, 19 nt, Artificial Sequence
  Description of Artificial Sequence: Synthetic oligonucleotide
  Antisense strand to SEQ ID NO: 898080
agacucaggugacugucac

SEQ ID NO: 898082 - RNA, 19 nt, Artificial Sequence
  Description of Artificial Sequence: Synthetic oligonucleotide
  Sense strand starting at position 2640 of SEQ ID NO: 588913
auucgaacccaggaaguuu

SEQ ID NO: 898083 - RNA, 19 nt, Artificial Sequence
  Description of Artificial Sequence: Synthetic oligonucleotide
  Antisense strand to SEQ ID NO: 898082
aaacuuccuggguucgaau

SEQ ID NO: 898084 - RNA, 19 nt, Artificial Sequence
  Description of Artificial Sequence: Synthetic oligonucleotide
  Sense strand starting at position 2712 of SEQ ID NO: 588913
gcuggaauguccuccaaau

SEQ ID NO: 898085 - RNA, 19 nt, Artificial Sequence
  Description of Artificial Sequence: Synthetic oligonucleotide
  Antisense strand to SEQ ID NO: 898084
auuuggaggacauuccagc

SEQ ID NO: 898086 - RNA, 19 nt, Artificial Sequence
  Description of Artificial Sequence: Synthetic oligonucleotide
  Sense strand starting at position 2884 of SEQ ID NO: 588913
acacuuccugucuaggauu

SEQ ID NO: 898087 - RNA, 19 nt, Artificial Sequence
  Description of Artificial Sequence: Synthetic oligonucleotide
  Antisense strand to SEQ ID NO: 898086
aauccuagacaggaagugu

SEQ ID NO: 898088 - RNA, 19 nt, Artificial Sequence
  Description of Artificial Sequence: Synthetic oligonucleotide
  Sense strand starting at position 3174 of SEQ ID NO: 588913
aauguugaauuggccagaa

SEQ ID NO: 898089 - RNA, 19 nt, Artificial Sequence
  Description of Artificial Sequence: Synthetic oligonucleotide
  Antisense strand to SEQ ID NO: 898088
uucuggccaauucaacauu

SEQ ID NO: 898090 - RNA, 19 nt, Artificial Sequence
  Description of Artificial Sequence: Synthetic oligonucleotide
  Sense strand starting at position 3665 of SEQ ID NO: 588913
gcacaauggugagaaguuc

SEQ ID NO: 898091 - RNA, 19 nt, Artificial Sequence
  Description of Artificial Sequence: Synthetic oligonucleotide
  Antisense strand to SEQ ID NO: 898090
gaacuucucaccauugugc

SEQ ID NO: 898092 - RNA, 19 nt, Artificial Sequence
  Description of Artificial Sequence: Synthetic oligonucleotide
  Sense strand starting at position 3673 of SEQ ID NO: 588913
gugagaaguucccuaugga

SEQ ID NO: 898093 - RNA, 19 nt, Artificial Sequence
  Description of Artificial Sequence: Synthetic oligonucleotide
  Antisense strand to SEQ ID NO: 898092
uccauagggaacuucucac

SEQ ID NO: 898094 - RNA, 19 nt, Artificial Sequence
  Description of Artificial Sequence: Synthetic oligonucleotide
  Sense strand starting at position 3676 of SEQ ID NO: 588913
agaaguucccuauggauuc

SEQ ID NO: 898095 - RNA, 19 nt, Artificial Sequence
  Description of Artificial Sequence: Synthetic oligonucleotide
  Antisense strand to SEQ ID NO: 898094
gaauccauagggaacuucu

SEQ ID NO: 898096 - RNA, 19 nt, Artificial Sequence
  Description of Artificial Sequence: Synthetic oligonucleotide
  Sense strand starting at position 3711 of SEQ ID NO: 588913
ggcuggugaggugaugauu

SEQ ID NO: 898097 - RNA, 19 nt, Artificial Sequence
  Description of Artificial Sequence: Synthetic oligonucleotide
  Antisense strand to SEQ ID NO: 898096
aaucaucaccucaccagcc

SEQ ID NO: 898098 - RNA, 19 nt, Artificial Sequence
  Description of Artificial Sequence: Synthetic oligonucleotide
  Sense strand starting at position 3796 of SEQ ID NO: 588913
ccgugcucccaggguagau

SEQ ID NO: 898099 - RNA, 19 nt, Artificial Sequence
  Description of Artificial Sequence: Synthetic oligonucleotide
  Antisense strand to SEQ ID NO: 898098
aucuacccugggagcacgg

SEQ ID NO: 898100 - RNA, 19 nt, Artificial Sequence
  Description of Artificial Sequence: Synthetic oligonucleotide
  Sense strand starting at position 3833 of SEQ ID NO: 588913
guagaacugugaccaggaa

SEQ ID NO: 898101 - RNA, 19 nt, Artificial Sequence
  Description of Artificial Sequence: Synthetic oligonucleotide
  Antisense strand to SEQ ID NO: 898100
uuccuggucacaguucuac

SEQ ID NO: 898102 - RNA, 19 nt, Artificial Sequence
  Description of Artificial Sequence: Synthetic oligonucleotide
  Sense strand starting at position 231 of SEQ ID NO: 588914
ucacaauccugcucugaga

SEQ ID NO: 898103 - RNA, 19 nt, Artificial Sequence
  Description of Artificial Sequence: Synthetic oligonucleotide
  Antisense strand to SEQ ID NO: 898102
ucucagagcaggauuguga

SEQ ID NO: 898104 - RNA, 19 nt, Artificial Sequence
  Description of Artificial Sequence: Synthetic oligonucleotide
  Sense strand starting at position 233 of SEQ ID NO: 588914
acaauccugcucugagaag

SEQ ID NO: 898105 - RNA, 19 nt, Artificial Sequence
  Description of Artificial Sequence: Synthetic oligonucleotide
  Antisense strand to SEQ ID NO: 898104
cuucucagagcaggauugu

SEQ ID NO: 898106 - RNA, 19 nt, Artificial Sequence
  Description of Artificial Sequence: Synthetic oligonucleotide
  Sense strand starting at position 282 of SEQ ID NO: 588914
gugcgaaucccgguuucac

SEQ ID NO: 898107 - RNA, 19 nt, Artificial Sequence
  Description of Artificial Sequence: Synthetic oligonucleotide
  Antisense strand to SEQ ID NO: 898106
gugaaaccgggauucgcac

SEQ ID NO: 898108 - RNA, 19 nt, Artificial Sequence
  Description of Artificial Sequence: Synthetic oligonucleotide
  Sense strand starting at position 376 of SEQ ID NO: 588914
acaauaagagucgguaacu

SEQ ID NO: 898109 - RNA, 19 nt, Artificial Sequence
  Description of Artificial Sequence: Synthetic oligonucleotide
  Antisense strand to SEQ ID NO: 898108
aguuaccgacucuuauugu

SEQ ID NO: 898110 - RNA, 19 nt, Artificial Sequence
  Description of Artificial Sequence: Synthetic oligonucleotide
  Sense strand starting at position 377 of SEQ ID NO: 588914
caauaagagucgguaacuc

SEQ ID NO: 898111 - RNA, 19 nt, Artificial Sequence
  Description of Artificial Sequence: Synthetic oligonucleotide
  Antisense strand to SEQ ID NO: 898110
gaguuaccgacucuuauug

SEQ ID NO: 898112 - RNA, 19 nt, Artificial Sequence
  Description of Artificial Sequence: Synthetic oligonucleotide
  Sense strand starting at position 444 of SEQ ID NO: 588914
gcuugaaagugcucccaca

SEQ ID NO: 898113 - RNA, 19 nt, Artificial Sequence
  Description of Artificial Sequence: Synthetic oligonucleotide
  Antisense strand to SEQ ID NO: 898112
ugugggagcacuuucaagc

SEQ ID NO: 898114 - RNA, 19 nt, Artificial Sequence
  Description of Artificial Sequence: Synthetic oligonucleotide
  Sense strand starting at position 825 of SEQ ID NO: 588914
gcuguuagucuugugguua

SEQ ID NO: 898115 - RNA, 19 nt, Artificial Sequence
  Description of Artificial Sequence: Synthetic oligonucleotide
  Antisense strand to SEQ ID NO: 898114
uaaccacaagacuaacagc

SEQ ID NO: 898116 - RNA, 19 nt, Artificial Sequence
  Description of Artificial Sequence: Synthetic oligonucleotide
  Sense strand starting at position 826 of SEQ ID NO: 588914
cuguuagucuugugguuaa

SEQ ID NO: 898117 - RNA, 19 nt, Artificial Sequence
  Description of Artificial Sequence: Synthetic oligonucleotide
  Antisense strand to SEQ ID NO: 898116
uuaaccacaagacuaacag

SEQ ID NO: 898118 - RNA, 19 nt, Artificial Sequence
  Description of Artificial Sequence: Synthetic oligonucleotide
  Sense strand starting at position 829 of SEQ ID NO: 588914
uuagucuugugguuaauca

SEQ ID NO: 898119 - RNA, 19 nt, Artificial Sequence
  Description of Artificial Sequence: Synthetic oligonucleotide
  Antisense strand to SEQ ID NO: 898118
ugauuaaccacaagacuaa

SEQ ID NO: 898120 - RNA, 19 nt, Artificial Sequence
  Description of Artificial Sequence: Synthetic oligonucleotide
  Sense strand starting at position 864 of SEQ ID NO: 588914
ucuccagugugucagugaa

SEQ ID NO: 898121 - RNA, 19 nt, Artificial Sequence
  Description of Artificial Sequence: Synthetic oligonucleotide
  Antisense strand to SEQ ID NO: 898120
uucacugacacacuggaga

SEQ ID NO: 898122 - RNA, 19 nt, Artificial Sequence
  Description of Artificial Sequence: Synthetic oligonucleotide
  Sense strand starting at position 866 of SEQ ID NO: 588914
uccagugugucagugaaac

SEQ ID NO: 898123 - RNA, 19 nt, Artificial Sequence
  Description of Artificial Sequence: Synthetic oligonucleotide
  Antisense strand to SEQ ID NO: 898122
guuucacugacacacugga

SEQ ID NO: 898124 - RNA, 19 nt, Artificial Sequence
  Description of Artificial Sequence: Synthetic oligonucleotide
  Sense strand starting at position 906 of SEQ ID NO: 588914
cagcgacuuucccggaaua

SEQ ID NO: 898125 - RNA, 19 nt, Artificial Sequence
  Description of Artificial Sequence: Synthetic oligonucleotide
  Antisense strand to SEQ ID NO: 898124
uauuccgggaaagucgcug

SEQ ID NO: 898126 - RNA, 19 nt, Artificial Sequence
  Description of Artificial Sequence: Synthetic oligonucleotide
  Sense strand starting at position 907 of SEQ ID NO: 588914
agcgacuuucccggaauau

SEQ ID NO: 898127 - RNA, 19 nt, Artificial Sequence
  Description of Artificial Sequence: Synthetic oligonucleotide
  Antisense strand to SEQ ID NO: 898126
auauuccgggaaagucgcu

SEQ ID NO: 898128 - RNA, 19 nt, Artificial Sequence
  Description of Artificial Sequence: Synthetic oligonucleotide
  Sense strand starting at position 908 of SEQ ID NO: 588914
gcgacuuucccggaauauc

SEQ ID NO: 898129 - RNA, 19 nt, Artificial Sequence
  Description of Artificial Sequence: Synthetic oligonucleotide
  Antisense strand to SEQ ID NO: 898128
gauauuccgggaaagucgc

SEQ ID NO: 898130 - RNA, 19 nt, Artificial Sequence
  Description of Artificial Sequence: Synthetic oligonucleotide
  Sense strand starting at position 917 of SEQ ID NO: 588914
ccggaauaucaaggaaugu

SEQ ID NO: 898131 - RNA, 19 nt, Artificial Sequence
  Description of Artificial Sequence: Synthetic oligonucleotide
  Antisense strand to SEQ ID NO: 898130
acauuccuugauauuccgg

SEQ ID NO: 898132 - RNA, 19 nt, Artificial Sequence
  Description of Artificial Sequence: Synthetic oligonucleotide
  Sense strand starting at position 926 of SEQ ID NO: 588914
caaggaaugugugggaaug

SEQ ID NO: 898133 - RNA, 19 nt, Artificial Sequence
  Description of Artificial Sequence: Synthetic oligonucleotide
  Antisense strand to SEQ ID NO: 898132
cauucccacacauuccuug

SEQ ID NO: 898134 - RNA, 19 nt, Artificial Sequence
  Description of Artificial Sequence: Synthetic oligonucleotide
  Sense strand starting at position 938 of SEQ ID NO: 588914
gggaaugcguucuaagcau

SEQ ID NO: 898135 - RNA, 19 nt, Artificial Sequence
  Description of Artificial Sequence: Synthetic oligonucleotide
  Antisense strand to SEQ ID NO: 898134
augcuuagaacgcauuccc

SEQ ID NO: 898136 - RNA, 19 nt, Artificial Sequence
  Description of Artificial Sequence: Synthetic oligonucleotide
  Sense strand starting at position 1070 of SEQ ID NO: 588914
gcuccagagccuuguuuac

SEQ ID NO: 898137 - RNA, 19 nt, Artificial Sequence
  Description of Artificial Sequence: Synthetic oligonucleotide
  Antisense strand to SEQ ID NO: 898136
guaaacaaggcucuggagc

SEQ ID NO: 898138 - RNA, 19 nt, Artificial Sequence
  Description of Artificial Sequence: Synthetic oligonucleotide
  Sense strand starting at position 1115 of SEQ ID NO: 588914
cuucgucucccuggaggau

SEQ ID NO: 898139 - RNA, 19 nt, Artificial Sequence
  Description of Artificial Sequence: Synthetic oligonucleotide
  Antisense strand to SEQ ID NO: 898138
auccuccagggagacgaag

SEQ ID NO: 898140 - RNA, 19 nt, Artificial Sequence
  Description of Artificial Sequence: Synthetic oligonucleotide
  Sense strand starting at position 2262 of SEQ ID NO: 588914
gcuugcacucaguggaguu

SEQ ID NO: 898141 - RNA, 19 nt, Artificial Sequence
  Description of Artificial Sequence: Synthetic oligonucleotide
  Antisense strand to SEQ ID NO: 898140
aacuccacugagugcaagc

SEQ ID NO: 898142 - RNA, 19 nt, Artificial Sequence
  Description of Artificial Sequence: Synthetic oligonucleotide
  Sense strand starting at position 2327 of SEQ ID NO: 588914
ccuguagucaccugggcaa

SEQ ID NO: 898143 - RNA, 19 nt, Artificial Sequence
  Description of Artificial Sequence: Synthetic oligonucleotide
  Antisense strand to SEQ ID NO: 898142
uugcccaggugacuacagg

SEQ ID NO: 898144 - RNA, 19 nt, Artificial Sequence
  Description of Artificial Sequence: Synthetic oligonucleotide
  Sense strand starting at position 2475 of SEQ ID NO: 588914
uuaagauguuccuucuugu

SEQ ID NO: 898145 - RNA, 19 nt, Artificial Sequence
  Description of Artificial Sequence: Synthetic oligonucleotide
  Antisense strand to SEQ ID NO: 898144
acaagaaggaacaucuuaa

SEQ ID NO: 898146 - RNA, 19 nt, Artificial Sequence
  Description of Artificial Sequence: Synthetic oligonucleotide
  Sense strand starting at position 2478 of SEQ ID NO: 588914
agauguuccuucuuguaau

SEQ ID NO: 898147 - RNA, 19 nt, Artificial Sequence
  Description of Artificial Sequence: Synthetic oligonucleotide
  Antisense strand to SEQ ID NO: 898146
auuacaagaaggaacaucu

SEQ ID NO: 898148 - RNA, 19 nt, Artificial Sequence
  Description of Artificial Sequence: Synthetic oligonucleotide
  Sense strand starting at position 2481 of SEQ ID NO: 588914
uguuccuucuuguaauuac

SEQ ID NO: 898149 - RNA, 19 nt, Artificial Sequence
  Description of Artificial Sequence: Synthetic oligonucleotide
  Antisense strand to SEQ ID NO: 898148
guaauuacaagaaggaaca

SEQ ID NO: 898150 - RNA, 19 nt, Artificial Sequence
  Description of Artificial Sequence: Synthetic oligonucleotide
  Sense strand starting at position 2490 of SEQ ID NO: 588914
uuguaauuaccagggcauc

SEQ ID NO: 898151 - RNA, 19 nt, Artificial Sequence
  Description of Artificial Sequence: Synthetic oligonucleotide
  Antisense strand to SEQ ID NO: 898150
gaugcccugguaauuacaa

SEQ ID NO: 898152 - RNA, 19 nt, Artificial Sequence
  Description of Artificial Sequence: Synthetic oligonucleotide
  Sense strand starting at position 2510 of SEQ ID NO: 588914
augacaucacucuacguga

SEQ ID NO: 898153 - RNA, 19 nt, Artificial Sequence
  Description of Artificial Sequence: Synthetic oligonucleotide
  Antisense strand to SEQ ID NO: 898152
ucacguagagugaugucau

SEQ ID NO: 898154 - RNA, 19 nt, Artificial Sequence
  Description of Artificial Sequence: Synthetic oligonucleotide
  Sense strand starting at position 2512 of SEQ ID NO: 588914
gacaucacucuacgugaua

SEQ ID NO: 898155 - RNA, 19 nt, Artificial Sequence
  Description of Artificial Sequence: Synthetic oligonucleotide
  Antisense strand to SEQ ID NO: 898154
uaucacguagagugauguc

SEQ ID NO: 898156 - RNA, 19 nt, Artificial Sequence
  Description of Artificial Sequence: Synthetic oligonucleotide
  Sense strand starting at position 2517 of SEQ ID NO: 588914
cacucuacgugauagggaa

SEQ ID NO: 898157 - RNA, 19 nt, Artificial Sequence
  Description of Artificial Sequence: Synthetic oligonucleotide
  Antisense strand to SEQ ID NO: 898156
uucccuaucacguagagug

SEQ ID NO: 898158 - RNA, 19 nt, Artificial Sequence
  Description of Artificial Sequence: Synthetic oligonucleotide
  Sense strand starting at position 2596 of SEQ ID NO: 588914
gcacgaggaggcuguuaaa

SEQ ID NO: 898159 - RNA, 19 nt, Artificial Sequence
  Description of Artificial Sequence: Synthetic oligonucleotide
  Antisense strand to SEQ ID NO: 898158
uuuaacagccuccucgugc

SEQ ID NO: 898160 - RNA, 19 nt, Artificial Sequence
  Description of Artificial Sequence: Synthetic oligonucleotide
  Sense strand starting at position 2951 of SEQ ID NO: 588914
ucaguaugucuuggcagga

SEQ ID NO: 898161 - RNA, 19 nt, Artificial Sequence
  Description of Artificial Sequence: Synthetic oligonucleotide
  Antisense strand to SEQ ID NO: 898160
uccugccaagacauacuga

SEQ ID NO: 898162 - RNA, 19 nt, Artificial Sequence
  Description of Artificial Sequence: Synthetic oligonucleotide
  Sense strand starting at position 2952 of SEQ ID NO: 588914
caguaugucuuggcaggaa

SEQ ID NO: 898163 - RNA, 19 nt, Artificial Sequence
  Description of Artificial Sequence: Synthetic oligonucleotide
  Antisense strand to SEQ ID NO: 898162
uuccugccaagacauacug

SEQ ID NO: 898164 - RNA, 19 nt, Artificial Sequence
  Description of Artificial Sequence: Synthetic oligonucleotide
  Sense strand starting at position 2978 of SEQ ID NO: 588914
ccaggauauuuauaggaua

SEQ ID NO: 898165 - RNA, 19 nt, Artificial Sequence
  Description of Artificial Sequence: Synthetic oligonucleotide
  Antisense strand to SEQ ID NO: 898164
uauccuauaaauauccugg

SEQ ID NO: 898166 - RNA, 19 nt, Artificial Sequence
  Description of Artificial Sequence: Synthetic oligonucleotide
  Sense strand starting at position 2989 of SEQ ID NO: 588914
auaggauauuuacgugaag

SEQ ID NO: 898167 - RNA, 19 nt, Artificial Sequence
  Description of Artificial Sequence: Synthetic oligonucleotide
  Antisense strand to SEQ ID NO: 898166
cuucacguaaauauccuau

SEQ ID NO: 898168 - RNA, 19 nt, Artificial Sequence
  Description of Artificial Sequence: Synthetic oligonucleotide
  Sense strand starting at position 3327 of SEQ ID NO: 588914
gggcuaaacucccuaucaa

SEQ ID NO: 898169 - RNA, 19 nt, Artificial Sequence
  Description of Artificial Sequence: Synthetic oligonucleotide
  Antisense strand to SEQ ID NO: 898168
uugauagggaguuuagccc

SEQ ID NO: 898170 - RNA, 19 nt, Artificial Sequence
  Description of Artificial Sequence: Synthetic oligonucleotide
  Sense strand starting at position 3417 of SEQ ID NO: 588914
guacacaugcccuggagaa

SEQ ID NO: 898171 - RNA, 19 nt, Artificial Sequence
  Description of Artificial Sequence: Synthetic oligonucleotide
  Antisense strand to SEQ ID NO: 898170
uucuccagggcauguguac

SEQ ID NO: 898172 - RNA, 19 nt, Artificial Sequence
  Description of Artificial Sequence: Synthetic oligonucleotide
  Sense strand starting at position 3429 of SEQ ID NO: 588914
uggagaaauucuugcagau

SEQ ID NO: 898173 - RNA, 19 nt, Artificial Sequence
  Description of Artificial Sequence: Synthetic oligonucleotide
  Antisense strand to SEQ ID NO: 898172
aucugcaagaauuucucca

SEQ ID NO: 898174 - RNA, 19 nt, Artificial Sequence
  Description of Artificial Sequence: Synthetic oligonucleotide
  Sense strand starting at position 3431 of SEQ ID NO: 588914
gagaaauucuugcagaugu

SEQ ID NO: 898175 - RNA, 19 nt, Artificial Sequence
  Description of Artificial Sequence: Synthetic oligonucleotide
  Antisense strand to SEQ ID NO: 898174
acaucugcaagaauuucuc

SEQ ID NO: 898176 - RNA, 19 nt, Artificial Sequence
  Description of Artificial Sequence: Synthetic oligonucleotide
  Sense strand starting at position 3591 of SEQ ID NO: 588914
auggaugaaucuuagagac

SEQ ID NO: 898177 - RNA, 19 nt, Artificial Sequence
  Description of Artificial Sequence: Synthetic oligonucleotide
  Antisense strand to SEQ ID NO: 898176
gucucuaagauucauccau

SEQ ID NO: 898178 - RNA, 19 nt, Artificial Sequence
  Description of Artificial Sequence: Synthetic oligonucleotide
  Sense strand starting at position 3593 of SEQ ID NO: 588914
ggaugaaucuuagagacac

SEQ ID NO: 898179 - RNA, 19 nt, Artificial Sequence
  Description of Artificial Sequence: Synthetic oligonucleotide
  Antisense strand to SEQ ID NO: 898178
gugucucuaagauucaucc

SEQ ID NO: 898180 - RNA, 19 nt, Artificial Sequence
  Description of Artificial Sequence: Synthetic oligonucleotide
  Sense strand starting at position 3810 of SEQ ID NO: 588914
ggcacaugcuuacuuggaa

SEQ ID NO: 898181 - RNA, 19 nt, Artificial Sequence
  Description of Artificial Sequence: Synthetic oligonucleotide
  Antisense strand to SEQ ID NO: 898180
uuccaaguaagcaugugcc

SEQ ID NO: 898182 - RNA, 19 nt, Artificial Sequence
  Description of Artificial Sequence: Synthetic oligonucleotide
  Sense strand starting at position 210 of SEQ ID NO: 588915
uuacucuaguguccuauua

SEQ ID NO: 898183 - RNA, 19 nt, Artificial Sequence
  Description of Artificial Sequence: Synthetic oligonucleotide
  Antisense strand to SEQ ID NO: 898182
uaauaggacacuagaguaa

SEQ ID NO: 898184 - RNA, 19 nt, Artificial Sequence
  Description of Artificial Sequence: Synthetic oligonucleotide
  Sense strand starting at position 220 of SEQ ID NO: 588915
guccuauuauagucaauaa

SEQ ID NO: 898185 - RNA, 19 nt, Artificial Sequence
  Description of Artificial Sequence: Synthetic oligonucleotide
  Antisense strand to SEQ ID NO: 898184
uuauugacuauaauaggac

SEQ ID NO: 898186 - RNA, 19 nt, Artificial Sequence
  Description of Artificial Sequence: Synthetic oligonucleotide
  Sense strand starting at position 257 of SEQ ID NO: 588915
uccguuuaaucacugugua

SEQ ID NO: 898187 - RNA, 19 nt, Artificial Sequence
  Description of Artificial Sequence: Synthetic oligonucleotide
  Antisense strand to SEQ ID NO: 898186
uacacagugauuaaacgga

SEQ ID NO: 898188 - RNA, 19 nt, Artificial Sequence
  Description of Artificial Sequence: Synthetic oligonucleotide
  Sense strand starting at position 258 of SEQ ID NO: 588915
ccguuuaaucacuguguag

SEQ ID NO: 898189 - RNA, 19 nt, Artificial Sequence
  Description of Artificial Sequence: Synthetic oligonucleotide
  Antisense strand to SEQ ID NO: 898188
cuacacagugauuaaacgg

SEQ ID NO: 898190 - RNA, 19 nt, Artificial Sequence
  Description of Artificial Sequence: Synthetic oligonucleotide
  Sense strand starting at position 260 of SEQ ID NO: 588915
guuuaaucacuguguaguu

SEQ ID NO: 898191 - RNA, 19 nt, Artificial Sequence
  Description of Artificial Sequence: Synthetic oligonucleotide
  Antisense strand to SEQ ID NO: 898190
aacuacacagugauuaaac

SEQ ID NO: 898192 - RNA, 19 nt, Artificial Sequence
  Description of Artificial Sequence: Synthetic oligonucleotide
  Sense strand starting at position 261 of SEQ ID NO: 588915
uuuaaucacuguguaguuu

SEQ ID NO: 898193 - RNA, 19 nt, Artificial Sequence
  Description of Artificial Sequence: Synthetic oligonucleotide
  Antisense strand to SEQ ID NO: 898192
aaacuacacagugauuaaa

SEQ ID NO: 898194 - RNA, 19 nt, Artificial Sequence
  Description of Artificial Sequence: Synthetic oligonucleotide
  Sense strand starting at position 380 of SEQ ID NO: 588915
gggccagucauguaguaag

SEQ ID NO: 898195 - RNA, 19 nt, Artificial Sequence
  Description of Artificial Sequence: Synthetic oligonucleotide
  Antisense strand to SEQ ID NO: 898194
cuuacuacaugacuggccc

SEQ ID NO: 898196 - RNA, 19 nt, Artificial Sequence
  Description of Artificial Sequence: Synthetic oligonucleotide
  Sense strand starting at position 390 of SEQ ID NO: 588915
uguaguaagugcuuaggaa

SEQ ID NO: 898197 - RNA, 19 nt, Artificial Sequence
  Description of Artificial Sequence: Synthetic oligonucleotide
  Antisense strand to SEQ ID NO: 898196
uuccuaagcacuuacuaca

SEQ ID NO: 898198 - RNA, 19 nt, Artificial Sequence
  Description of Artificial Sequence: Synthetic oligonucleotide
  Sense strand starting at position 391 of SEQ ID NO: 588915
guaguaagugcuuaggaaa

SEQ ID NO: 898199 - RNA, 19 nt, Artificial Sequence
  Description of Artificial Sequence: Synthetic oligonucleotide
  Antisense strand to SEQ ID NO: 898198
uuuccuaagcacuuacuac

SEQ ID NO: 898200 - RNA, 19 nt, Artificial Sequence
  Description of Artificial Sequence: Synthetic oligonucleotide
  Sense strand starting at position 442 of SEQ ID NO: 588915
ugacauucucagggucaug

SEQ ID NO: 898201 - RNA, 19 nt, Artificial Sequence
  Description of Artificial Sequence: Synthetic oligonucleotide
  Antisense strand to SEQ ID NO: 898200
caugacccugagaauguca

SEQ ID NO: 898202 - RNA, 19 nt, Artificial Sequence
  Description of Artificial Sequence: Synthetic oligonucleotide
  Sense strand starting at position 454 of SEQ ID NO: 588915
ggucaugcucgggcuguau

SEQ ID NO: 898203 - RNA, 19 nt, Artificial Sequence
  Description of Artificial Sequence: Synthetic oligonucleotide
  Antisense strand to SEQ ID NO: 898202
auacagcccgagcaugacc

SEQ ID NO: 898204 - RNA, 19 nt, Artificial Sequence
  Description of Artificial Sequence: Synthetic oligonucleotide
  Sense strand starting at position 565 of SEQ ID NO: 588915
ucggcuaguccuugaccau

SEQ ID NO: 898205 - RNA, 19 nt, Artificial Sequence
  Description of Artificial Sequence: Synthetic oligonucleotide
  Antisense strand to SEQ ID NO: 898204
auggucaaggacuagccga

SEQ ID NO: 898206 - RNA, 19 nt, Artificial Sequence
  Description of Artificial Sequence: Synthetic oligonucleotide
  Sense strand starting at position 751 of SEQ ID NO: 588915
gggucugagacagguccaa

SEQ ID NO: 898207 - RNA, 19 nt, Artificial Sequence
  Description of Artificial Sequence: Synthetic oligonucleotide
  Antisense strand to SEQ ID NO: 898206
uuggaccugucucagaccc

SEQ ID NO: 898208 - RNA, 19 nt, Artificial Sequence
  Description of Artificial Sequence: Synthetic oligonucleotide
  Sense strand starting at position 1086 of SEQ ID NO: 588915
ccaggaaucugccugaggu

SEQ ID NO: 898209 - RNA, 19 nt, Artificial Sequence
  Description of Artificial Sequence: Synthetic oligonucleotide
  Antisense strand to SEQ ID NO: 898208
accucaggcagauuccugg

SEQ ID NO: 898210 - RNA, 19 nt, Artificial Sequence
  Description of Artificial Sequence: Synthetic oligonucleotide
  Sense strand starting at position 1087 of SEQ ID NO: 588915
caggaaucugccugagguc

SEQ ID NO: 898211 - RNA, 19 nt, Artificial Sequence
  Description of Artificial Sequence: Synthetic oligonucleotide
  Antisense strand to SEQ ID NO: 898210
gaccucaggcagauuccug

SEQ ID NO: 898212 - RNA, 19 nt, Artificial Sequence
  Description of Artificial Sequence: Synthetic oligonucleotide
  Sense strand starting at position 1088 of SEQ ID NO: 588915
aggaaucugccugagguca

SEQ ID NO: 898213 - RNA, 19 nt, Artificial Sequence
  Description of Artificial Sequence: Synthetic oligonucleotide
  Antisense strand to SEQ ID NO: 898212
ugaccucaggcagauuccu

SEQ ID NO: 898214 - RNA, 19 nt, Artificial Sequence
  Description of Artificial Sequence: Synthetic oligonucleotide
  Sense strand starting at position 1515 of SEQ ID NO: 588915
ucaggaauaucgcugaaug

SEQ ID NO: 898215 - RNA, 19 nt, Artificial Sequence
  Description of Artificial Sequence: Synthetic oligonucleotide
  Antisense strand to SEQ ID NO: 898214
cauucagcgauauuccuga

SEQ ID NO: 898216 - RNA, 19 nt, Artificial Sequence
  Description of Artificial Sequence: Synthetic oligonucleotide
  Sense strand starting at position 1516 of SEQ ID NO: 588915
caggaauaucgcugaauga

SEQ ID NO: 898217 - RNA, 19 nt, Artificial Sequence
  Description of Artificial Sequence: Synthetic oligonucleotide
  Antisense strand to SEQ ID NO: 898216
ucauucagcgauauuccug

SEQ ID NO: 898218 - RNA, 19 nt, Artificial Sequence
  Description of Artificial Sequence: Synthetic oligonucleotide
  Sense strand starting at position 1527 of SEQ ID NO: 588915
cugaaugaauuagugcauu

SEQ ID NO: 898219 - RNA, 19 nt, Artificial Sequence
  Description of Artificial Sequence: Synthetic oligonucleotide
  Antisense strand to SEQ ID NO: 898218
aaugcacuaauucauucag

SEQ ID NO: 898220 - RNA, 19 nt, Artificial Sequence
  Description of Artificial Sequence: Synthetic oligonucleotide
  Sense strand starting at position 1632 of SEQ ID NO: 588915
gcugacuccucaucuguca

SEQ ID NO: 898221 - RNA, 19 nt, Artificial Sequence
  Description of Artificial Sequence: Synthetic oligonucleotide
  Antisense strand to SEQ ID NO: 898220
ugacagaugaggagucagc

SEQ ID NO: 898222 - RNA, 19 nt, Artificial Sequence
  Description of Artificial Sequence: Synthetic oligonucleotide
  Sense strand starting at position 1644 of SEQ ID NO: 588915
ucugucaaauggcuguaau

SEQ ID NO: 898223 - RNA, 19 nt, Artificial Sequence
  Description of Artificial Sequence: Synthetic oligonucleotide
  Antisense strand to SEQ ID NO: 898222
auuacagccauuugacaga

SEQ ID NO: 898224 - RNA, 19 nt, Artificial Sequence
  Description of Artificial Sequence: Synthetic oligonucleotide
  Sense strand starting at position 1645 of SEQ ID NO: 588915
cugucaaauggcuguaauc

SEQ ID NO: 898225 - RNA, 19 nt, Artificial Sequence
  Description of Artificial Sequence: Synthetic oligonucleotide
  Antisense strand to SEQ ID NO: 898224
gauuacagccauuugacag

SEQ ID NO: 898226 - RNA, 19 nt, Artificial Sequence
  Description of Artificial Sequence: Synthetic oligonucleotide
  Sense strand starting at position 1647 of SEQ ID NO: 588915
gucaaauggcuguaaucac

SEQ ID NO: 898227 - RNA, 19 nt, Artificial Sequence
  Description of Artificial Sequence: Synthetic oligonucleotide
  Antisense strand to SEQ ID NO: 898226
gugauuacagccauuugac

SEQ ID NO: 898228 - RNA, 19 nt, Artificial Sequence
  Description of Artificial Sequence: Synthetic oligonucleotide
  Sense strand starting at position 1939 of SEQ ID NO: 588915
uguauucucugagcccuuu

SEQ ID NO: 898229 - RNA, 19 nt, Artificial Sequence
  Description of Artificial Sequence: Synthetic oligonucleotide
  Antisense strand to SEQ ID NO: 898228
aaagggcucagagaauaca

SEQ ID NO: 898230 - RNA, 19 nt, Artificial Sequence
  Description of Artificial Sequence: Synthetic oligonucleotide
  Sense strand starting at position 1945 of SEQ ID NO: 588915
cucugagcccuuugaccua

SEQ ID NO: 898231 - RNA, 19 nt, Artificial Sequence
  Description of Artificial Sequence: Synthetic oligonucleotide
  Antisense strand to SEQ ID NO: 898230
uaggucaaagggcucagag

SEQ ID NO: 898232 - RNA, 19 nt, Artificial Sequence
  Description of Artificial Sequence: Synthetic oligonucleotide
  Sense strand starting at position 2040 of SEQ ID NO: 588915
cgcuccugauugguuagau

SEQ ID NO: 898233 - RNA, 19 nt, Artificial Sequence
  Description of Artificial Sequence: Synthetic oligonucleotide
  Antisense strand to SEQ ID NO: 898232
aucuaaccaaucaggagcg

SEQ ID NO: 898234 - RNA, 19 nt, Artificial Sequence
  Description of Artificial Sequence: Synthetic oligonucleotide
  Sense strand starting at position 2041 of SEQ ID NO: 588915
gcuccugauugguuagauc

SEQ ID NO: 898235 - RNA, 19 nt, Artificial Sequence
  Description of Artificial Sequence: Synthetic oligonucleotide
  Antisense strand to SEQ ID NO: 898234
gaucuaaccaaucaggagc

SEQ ID NO: 898236 - RNA, 19 nt, Artificial Sequence
  Description of Artificial Sequence: Synthetic oligonucleotide
  Sense strand starting at position 2471 of SEQ ID NO: 588915
ucacaauccugcucugaga

SEQ ID NO: 898237 - RNA, 19 nt, Artificial Sequence
  Description of Artificial Sequence: Synthetic oligonucleotide
  Antisense strand to SEQ ID NO: 898236
ucucagagcaggauuguga

SEQ ID NO: 898238 - RNA, 19 nt, Artificial Sequence
  Description of Artificial Sequence: Synthetic oligonucleotide
  Sense strand starting at position 2473 of SEQ ID NO: 588915
acaauccugcucugagaag

SEQ ID NO: 898239 - RNA, 19 nt, Artificial Sequence
  Description of Artificial Sequence: Synthetic oligonucleotide
  Antisense strand to SEQ ID NO: 898238
cuucucagagcaggauugu

SEQ ID NO: 898240 - RNA, 19 nt, Artificial Sequence
  Description of Artificial Sequence: Synthetic oligonucleotide
  Sense strand starting at position 2522 of SEQ ID NO: 588915
gugcgaaucccgguuucac

SEQ ID NO: 898241 - RNA, 19 nt, Artificial Sequence
  Description of Artificial Sequence: Synthetic oligonucleotide
  Antisense strand to SEQ ID NO: 898240
gugaaaccgggauucgcac

SEQ ID NO: 898242 - RNA, 19 nt, Artificial Sequence
  Description of Artificial Sequence: Synthetic oligonucleotide
  Sense strand starting at position 2616 of SEQ ID NO: 588915
acaauaagagucgguaacu

SEQ ID NO: 898243 - RNA, 19 nt, Artificial Sequence
  Description of Artificial Sequence: Synthetic oligonucleotide
  Antisense strand to SEQ ID NO: 898242
aguuaccgacucuuauugu

SEQ ID NO: 898244 - RNA, 19 nt, Artificial Sequence
  Description of Artificial Sequence: Synthetic oligonucleotide
  Sense strand starting at position 2617 of SEQ ID NO: 588915
caauaagagucgguaacuc

SEQ ID NO: 898245 - RNA, 19 nt, Artificial Sequence
  Description of Artificial Sequence: Synthetic oligonucleotide
  Antisense strand to SEQ ID NO: 898244
gaguuaccgacucuuauug

SEQ ID NO: 898246 - RNA, 19 nt, Artificial Sequence
  Description of Artificial Sequence: Synthetic oligonucleotide
  Sense strand starting at position 2684 of SEQ ID NO: 588915
gcuugaaagugcucccaca

SEQ ID NO: 898247 - RNA, 19 nt, Artificial Sequence
  Description of Artificial Sequence: Synthetic oligonucleotide
  Antisense strand to SEQ ID NO: 898246
ugugggagcacuuucaagc

SEQ ID NO: 898248 - RNA, 19 nt, Artificial Sequence
  Description of Artificial Sequence: Synthetic oligonucleotide
  Sense strand starting at position 3065 of SEQ ID NO: 588915
gcuguuagucuugugguua

SEQ ID NO: 898249 - RNA, 19 nt, Artificial Sequence
  Description of Artificial Sequence: Synthetic oligonucleotide
  Antisense strand to SEQ ID NO: 898248
uaaccacaagacuaacagc

SEQ ID NO: 898250 - RNA, 19 nt, Artificial Sequence
  Description of Artificial Sequence: Synthetic oligonucleotide
  Sense strand starting at position 3069 of SEQ ID NO: 588915
uuagucuugugguuaauca

SEQ ID NO: 898251 - RNA, 19 nt, Artificial Sequence
  Description of Artificial Sequence: Synthetic oligonucleotide
  Antisense strand to SEQ ID NO: 898250
ugauuaaccacaagacuaa

SEQ ID NO: 898252 - RNA, 19 nt, Artificial Sequence
  Description of Artificial Sequence: Synthetic oligonucleotide
  Sense strand starting at position 3106 of SEQ ID NO: 588915
uccagugugucagugaaac

SEQ ID NO: 898253 - RNA, 19 nt, Artificial Sequence
  Description of Artificial Sequence: Synthetic oligonucleotide
  Antisense strand to SEQ ID NO: 898252
guuucacugacacacugga

SEQ ID NO: 898254 - RNA, 19 nt, Artificial Sequence
  Description of Artificial Sequence: Synthetic oligonucleotide
  Sense strand starting at position 3147 of SEQ ID NO: 588915
agcgacuuucccggaauau

SEQ ID NO: 898255 - RNA, 19 nt, Artificial Sequence
  Description of Artificial Sequence: Synthetic oligonucleotide
  Antisense strand to SEQ ID NO: 898254
auauuccgggaaagucgcu

SEQ ID NO: 898256 - RNA, 19 nt, Artificial Sequence
  Description of Artificial Sequence: Synthetic oligonucleotide
  Sense strand starting at position 3148 of SEQ ID NO: 588915
gcgacuuucccggaauauc

SEQ ID NO: 898257 - RNA, 19 nt, Artificial Sequence
  Description of Artificial Sequence: Synthetic oligonucleotide
  Antisense strand to SEQ ID NO: 898256
gauauuccgggaaagucgc

SEQ ID NO: 898258 - RNA, 19 nt, Artificial Sequence
  Description of Artificial Sequence: Synthetic oligonucleotide
  Sense strand starting at position 3157 of SEQ ID NO: 588915
ccggaauaucaaggaaugu

SEQ ID NO: 898259 - RNA, 19 nt, Artificial Sequence
  Description of Artificial Sequence: Synthetic oligonucleotide
  Antisense strand to SEQ ID NO: 898258
acauuccuugauauuccgg

SEQ ID NO: 898260 - RNA, 19 nt, Artificial Sequence
  Description of Artificial Sequence: Synthetic oligonucleotide
  Sense strand starting at position 3355 of SEQ ID NO: 588915
cuucgucucccuggaggau

SEQ ID NO: 898261 - RNA, 19 nt, Artificial Sequence
  Description of Artificial Sequence: Synthetic oligonucleotide
  Antisense strand to SEQ ID NO: 898260
auccuccagggagacgaag

SEQ ID NO: 898262 - RNA, 19 nt, Artificial Sequence
  Description of Artificial Sequence: Synthetic oligonucleotide
  Sense strand starting at position 35 of SEQ ID NO: 588916
agcaguugauucccuguua

SEQ ID NO: 898263 - RNA, 19 nt, Artificial Sequence
  Description of Artificial Sequence: Synthetic oligonucleotide
  Antisense strand to SEQ ID NO: 898262
uaacagggaaucaacugcu

SEQ ID NO: 898264 - RNA, 19 nt, Artificial Sequence
  Description of Artificial Sequence: Synthetic oligonucleotide
  Sense strand starting at position 36 of SEQ ID NO: 588916
gcaguugauucccuguuaa

SEQ ID NO: 898265 - RNA, 19 nt, Artificial Sequence
  Description of Artificial Sequence: Synthetic oligonucleotide
  Antisense strand to SEQ ID NO: 898264
uuaacagggaaucaacugc

SEQ ID NO: 898266 - RNA, 19 nt, Artificial Sequence
  Description of Artificial Sequence: Synthetic oligonucleotide
  Sense strand starting at position 40 of SEQ ID NO: 588916
uugauucccuguuaaagug

SEQ ID NO: 898267 - RNA, 19 nt, Artificial Sequence
  Description of Artificial Sequence: Synthetic oligonucleotide
  Antisense strand to SEQ ID NO: 898266
cacuuuaacagggaaucaa

SEQ ID NO: 898268 - RNA, 19 nt, Artificial Sequence
  Description of Artificial Sequence: Synthetic oligonucleotide
  Sense strand starting at position 114 of SEQ ID NO: 588916
gguuguuugcacuguacuu

SEQ ID NO: 898269 - RNA, 19 nt, Artificial Sequence
  Description of Artificial Sequence: Synthetic oligonucleotide
  Antisense strand to SEQ ID NO: 898268
aaguacagugcaaacaacc

SEQ ID NO: 898270 - RNA, 19 nt, Artificial Sequence
  Description of Artificial Sequence: Synthetic oligonucleotide
  Sense strand starting at position 124 of SEQ ID NO: 588916
acuguacuuauaugggaag

SEQ ID NO: 898271 - RNA, 19 nt, Artificial Sequence
  Description of Artificial Sequence: Synthetic oligonucleotide
  Antisense strand to SEQ ID NO: 898270
cuucccauauaaguacagu

SEQ ID NO: 898272 - RNA, 19 nt, Artificial Sequence
  Description of Artificial Sequence: Synthetic oligonucleotide
  Sense strand starting at position 125 of SEQ ID NO: 588916
cuguacuuauaugggaagu

SEQ ID NO: 898273 - RNA, 19 nt, Artificial Sequence
  Description of Artificial Sequence: Synthetic oligonucleotide
  Antisense strand to SEQ ID NO: 898272
acuucccauauaaguacag

SEQ ID NO: 898274 - RNA, 19 nt, Artificial Sequence
  Description of Artificial Sequence: Synthetic oligonucleotide
  Sense strand starting at position 126 of SEQ ID NO: 588916
uguacuuauaugggaaguu

SEQ ID NO: 898275 - RNA, 19 nt, Artificial Sequence
  Description of Artificial Sequence: Synthetic oligonucleotide
  Antisense strand to SEQ ID NO: 898274
aacuucccauauaaguaca

SEQ ID NO: 898276 - RNA, 19 nt, Artificial Sequence
  Description of Artificial Sequence: Synthetic oligonucleotide
  Sense strand starting at position 127 of SEQ ID NO: 588916
guacuuauaugggaaguua

SEQ ID NO: 898277 - RNA, 19 nt, Artificial Sequence
  Description of Artificial Sequence: Synthetic oligonucleotide
  Antisense strand to SEQ ID NO: 898276
uaacuucccauauaaguac

SEQ ID NO: 898278 - RNA, 19 nt, Artificial Sequence
  Description of Artificial Sequence: Synthetic oligonucleotide
  Sense strand starting at position 146 of SEQ ID NO: 588916
auaccaguuuguuuccaau

SEQ ID NO: 898279 - RNA, 19 nt, Artificial Sequence
  Description of Artificial Sequence: Synthetic oligonucleotide
  Antisense strand to SEQ ID NO: 898278
auuggaaacaaacugguau

SEQ ID NO: 898280 - RNA, 19 nt, Artificial Sequence
  Description of Artificial Sequence: Synthetic oligonucleotide
  Sense strand starting at position 148 of SEQ ID NO: 588916
accaguuuguuuccaauua

SEQ ID NO: 898281 - RNA, 19 nt, Artificial Sequence
  Description of Artificial Sequence: Synthetic oligonucleotide
  Antisense strand to SEQ ID NO: 898280
uaauuggaaacaaacuggu

SEQ ID NO: 898282 - RNA, 19 nt, Artificial Sequence
  Description of Artificial Sequence: Synthetic oligonucleotide
  Sense strand starting at position 420 of SEQ ID NO: 588916
gaacuugacuucugaggac

SEQ ID NO: 898283 - RNA, 19 nt, Artificial Sequence
  Description of Artificial Sequence: Synthetic oligonucleotide
  Antisense strand to SEQ ID NO: 898282
guccucagaagucaaguuc

SEQ ID NO: 898284 - RNA, 19 nt, Artificial Sequence
  Description of Artificial Sequence: Synthetic oligonucleotide
  Sense strand starting at position 423 of SEQ ID NO: 588916
cuugacuucugaggacuca

SEQ ID NO: 898285 - RNA, 19 nt, Artificial Sequence
  Description of Artificial Sequence: Synthetic oligonucleotide
  Antisense strand to SEQ ID NO: 898284
ugaguccucagaagucaag

SEQ ID NO: 898286 - RNA, 19 nt, Artificial Sequence
  Description of Artificial Sequence: Synthetic oligonucleotide
  Sense strand starting at position 636 of SEQ ID NO: 588916
ggcucacuccagcaggauu

SEQ ID NO: 898287 - RNA, 19 nt, Artificial Sequence
  Description of Artificial Sequence: Synthetic oligonucleotide
  Antisense strand to SEQ ID NO: 898286
aauccugcuggagugagcc

SEQ ID NO: 898288 - RNA, 19 nt, Artificial Sequence
  Description of Artificial Sequence: Synthetic oligonucleotide
  Sense strand starting at position 775 of SEQ ID NO: 588916
cucauugaauccuuauggu

SEQ ID NO: 898289 - RNA, 19 nt, Artificial Sequence
  Description of Artificial Sequence: Synthetic oligonucleotide
  Antisense strand to SEQ ID NO: 898288
accauaaggauucaaugag

SEQ ID NO: 898290 - RNA, 19 nt, Artificial Sequence
  Description of Artificial Sequence: Synthetic oligonucleotide
  Sense strand starting at position 794 of SEQ ID NO: 588916
ggccuaugaguuggguacu

SEQ ID NO: 898291 - RNA, 19 nt, Artificial Sequence
  Description of Artificial Sequence: Synthetic oligonucleotide
  Antisense strand to SEQ ID NO: 898290
aguacccaacucauaggcc

SEQ ID NO: 898292 - RNA, 19 nt, Artificial Sequence
  Description of Artificial Sequence: Synthetic oligonucleotide
  Sense strand starting at position 882 of SEQ ID NO: 588916
cuaggccugucuguuuaau

SEQ ID NO: 898293 - RNA, 19 nt, Artificial Sequence
  Description of Artificial Sequence: Synthetic oligonucleotide
  Antisense strand to SEQ ID NO: 898292
auuaaacagacaggccuag

SEQ ID NO: 898294 - RNA, 19 nt, Artificial Sequence
  Description of Artificial Sequence: Synthetic oligonucleotide
  Sense strand starting at position 884 of SEQ ID NO: 588916
aggccugucuguuuaauaa

SEQ ID NO: 898295 - RNA, 19 nt, Artificial Sequence
  Description of Artificial Sequence: Synthetic oligonucleotide
  Antisense strand to SEQ ID NO: 898294
uuauuaaacagacaggccu

SEQ ID NO: 898296 - RNA, 19 nt, Artificial Sequence
  Description of Artificial Sequence: Synthetic oligonucleotide
  Sense strand starting at position 924 of SEQ ID NO: 588916
aagccuugggucugugaga

SEQ ID NO: 898297 - RNA, 19 nt, Artificial Sequence
  Description of Artificial Sequence: Synthetic oligonucleotide
  Antisense strand to SEQ ID NO: 898296
ucucacagacccaaggcuu

SEQ ID NO: 898298 - RNA, 19 nt, Artificial Sequence
  Description of Artificial Sequence: Synthetic oligonucleotide
  Sense strand starting at position 1076 of SEQ ID NO: 588916
guaggagaggcccguguau

SEQ ID NO: 898299 - RNA, 19 nt, Artificial Sequence
  Description of Artificial Sequence: Synthetic oligonucleotide
  Antisense strand to SEQ ID NO: 898298
auacacgggccucuccuac

SEQ ID NO: 898300 - RNA, 19 nt, Artificial Sequence
  Description of Artificial Sequence: Synthetic oligonucleotide
  Sense strand starting at position 1117 of SEQ ID NO: 588916
aaacuucuuugagccguua

SEQ ID NO: 898301 - RNA, 19 nt, Artificial Sequence
  Description of Artificial Sequence: Synthetic oligonucleotide
  Antisense strand to SEQ ID NO: 898300
uaacggcucaaagaaguuu

SEQ ID NO: 898302 - RNA, 19 nt, Artificial Sequence
  Description of Artificial Sequence: Synthetic oligonucleotide
  Sense strand starting at position 1146 of SEQ ID NO: 588916
cuuccaugguauucuggaa

SEQ ID NO: 898303 - RNA, 19 nt, Artificial Sequence
  Description of Artificial Sequence: Synthetic oligonucleotide
  Antisense strand to SEQ ID NO: 898302
uuccagaauaccauggaag

SEQ ID NO: 898304 - RNA, 19 nt, Artificial Sequence
  Description of Artificial Sequence: Synthetic oligonucleotide
  Sense strand starting at position 1353 of SEQ ID NO: 588916
aggagaggccugugagagu

SEQ ID NO: 898305 - RNA, 19 nt, Artificial Sequence
  Description of Artificial Sequence: Synthetic oligonucleotide
  Antisense strand to SEQ ID NO: 898304
acucucacaggccucuccu

SEQ ID NO: 898306 - RNA, 19 nt, Artificial Sequence
  Description of Artificial Sequence: Synthetic oligonucleotide
  Sense strand starting at position 1538 of SEQ ID NO: 588916
gccagauguuccuguucuc

SEQ ID NO: 898307 - RNA, 19 nt, Artificial Sequence
  Description of Artificial Sequence: Synthetic oligonucleotide
  Antisense strand to SEQ ID NO: 898306
gagaacaggaacaucuggc

SEQ ID NO: 898308 - RNA, 19 nt, Artificial Sequence
  Description of Artificial Sequence: Synthetic oligonucleotide
  Sense strand starting at position 1903 of SEQ ID NO: 588916
ucaguuuccugaucaagac

SEQ ID NO: 898309 - RNA, 19 nt, Artificial Sequence
  Description of Artificial Sequence: Synthetic oligonucleotide
  Antisense strand to SEQ ID NO: 898308
gucuugaucaggaaacuga

SEQ ID NO: 898310 - RNA, 19 nt, Artificial Sequence
  Description of Artificial Sequence: Synthetic oligonucleotide
  Sense strand starting at position 1950 of SEQ ID NO: 588916
cagaccugucaaggaucau

SEQ ID NO: 898311 - RNA, 19 nt, Artificial Sequence
  Description of Artificial Sequence: Synthetic oligonucleotide
  Antisense strand to SEQ ID NO: 898310
augauccuugacaggucug

SEQ ID NO: 898312 - RNA, 19 nt, Artificial Sequence
  Description of Artificial Sequence: Synthetic oligonucleotide
  Sense strand starting at position 1956 of SEQ ID NO: 588916
ugucaaggaucaucuccau

SEQ ID NO: 898313 - RNA, 19 nt, Artificial Sequence
  Description of Artificial Sequence: Synthetic oligonucleotide
  Antisense strand to SEQ ID NO: 898312
auggagaugauccuugaca

SEQ ID NO: 898314 - RNA, 19 nt, Artificial Sequence
  Description of Artificial Sequence: Synthetic oligonucleotide
  Sense strand starting at position 1969 of SEQ ID NO: 588916
cuccaucugccuggaggaa

SEQ ID NO: 898315 - RNA, 19 nt, Artificial Sequence
  Description of Artificial Sequence: Synthetic oligonucleotide
  Antisense strand to SEQ ID NO: 898314
uuccuccaggcagauggag

SEQ ID NO: 898316 - RNA, 19 nt, Artificial Sequence
  Description of Artificial Sequence: Synthetic oligonucleotide
  Sense strand starting at position 2358 of SEQ ID NO: 588916
ccugcuauguccuaagcca

SEQ ID NO: 898317 - RNA, 19 nt, Artificial Sequence
  Description of Artificial Sequence: Synthetic oligonucleotide
  Antisense strand to SEQ ID NO: 898316
uggcuuaggacauagcagg

SEQ ID NO: 898318 - RNA, 19 nt, Artificial Sequence
  Description of Artificial Sequence: Synthetic oligonucleotide
  Sense strand starting at position 2379 of SEQ ID NO: 588916
gggauaguccacugucuga

SEQ ID NO: 898319 - RNA, 19 nt, Artificial Sequence
  Description of Artificial Sequence: Synthetic oligonucleotide
  Antisense strand to SEQ ID NO: 898318
ucagacaguggacuauccc

SEQ ID NO: 898320 - RNA, 19 nt, Artificial Sequence
  Description of Artificial Sequence: Synthetic oligonucleotide
  Sense strand starting at position 2455 of SEQ ID NO: 588916
ggguacuaaucugccaaga

SEQ ID NO: 898321 - RNA, 19 nt, Artificial Sequence
  Description of Artificial Sequence: Synthetic oligonucleotide
  Antisense strand to SEQ ID NO: 898320
ucuuggcagauuaguaccc

SEQ ID NO: 898322 - RNA, 19 nt, Artificial Sequence
  Description of Artificial Sequence: Synthetic oligonucleotide
  Sense strand starting at position 2692 of SEQ ID NO: 588916
gcagaaacuucugggucca

SEQ ID NO: 898323 - RNA, 19 nt, Artificial Sequence
  Description of Artificial Sequence: Synthetic oligonucleotide
  Antisense strand to SEQ ID NO: 898322
uggacccagaaguuucugc

SEQ ID NO: 898324 - RNA, 19 nt, Artificial Sequence
  Description of Artificial Sequence: Synthetic oligonucleotide
  Sense strand starting at position 2833 of SEQ ID NO: 588916
cgggacuacuggcuacaua

SEQ ID NO: 898325 - RNA, 19 nt, Artificial Sequence
  Description of Artificial Sequence: Synthetic oligonucleotide
  Antisense strand to SEQ ID NO: 898324
uauguagccaguagucccg

SEQ ID NO: 898326 - RNA, 19 nt, Artificial Sequence
  Description of Artificial Sequence: Synthetic oligonucleotide
  Sense strand starting at position 2845 of SEQ ID NO: 588916
cuacauaauuucugggauc

SEQ ID NO: 898327 - RNA, 19 nt, Artificial Sequence
  Description of Artificial Sequence: Synthetic oligonucleotide
  Antisense strand to SEQ ID NO: 898326
gaucccagaaauuauguag

SEQ ID NO: 898328 - RNA, 19 nt, Artificial Sequence
  Description of Artificial Sequence: Synthetic oligonucleotide
  Sense strand starting at position 2954 of SEQ ID NO: 588916
acagcagagcauuagcaua

SEQ ID NO: 898329 - RNA, 19 nt, Artificial Sequence
  Description of Artificial Sequence: Synthetic oligonucleotide
  Antisense strand to SEQ ID NO: 898328
uaugcuaaugcucugcugu

SEQ ID NO: 898330 - RNA, 19 nt, Artificial Sequence
  Description of Artificial Sequence: Synthetic oligonucleotide
  Sense strand starting at position 3041 of SEQ ID NO: 588916
ggcccaguccucugagucu

SEQ ID NO: 898331 - RNA, 19 nt, Artificial Sequence
  Description of Artificial Sequence: Synthetic oligonucleotide
  Antisense strand to SEQ ID NO: 898330
agacucagaggacugggcc

SEQ ID NO: 898332 - RNA, 19 nt, Artificial Sequence
  Description of Artificial Sequence: Synthetic oligonucleotide
  Sense strand starting at position 3216 of SEQ ID NO: 588916
ggccucagcucaucuguaa

SEQ ID NO: 898333 - RNA, 19 nt, Artificial Sequence
  Description of Artificial Sequence: Synthetic oligonucleotide
  Antisense strand to SEQ ID NO: 898332
uuacagaugagcugaggcc

SEQ ID NO: 898334 - RNA, 19 nt, Artificial Sequence
  Description of Artificial Sequence: Synthetic oligonucleotide
  Sense strand starting at position 3312 of SEQ ID NO: 588916
gaaaguaaggccugagcca

SEQ ID NO: 898335 - RNA, 19 nt, Artificial Sequence
  Description of Artificial Sequence: Synthetic oligonucleotide
  Antisense strand to SEQ ID NO: 898334
uggcucaggccuuacuuuc

SEQ ID NO: 898336 - RNA, 19 nt, Artificial Sequence
  Description of Artificial Sequence: Synthetic oligonucleotide
  Sense strand starting at position 3982 of SEQ ID NO: 588916
gggucaguuuccugggcca

SEQ ID NO: 898337 - RNA, 19 nt, Artificial Sequence
  Description of Artificial Sequence: Synthetic oligonucleotide
  Antisense strand to SEQ ID NO: 898336
uggcccaggaaacugaccc

SEQ ID NO: 898338 - RNA, 19 nt, Artificial Sequence
  Description of Artificial Sequence: Synthetic oligonucleotide
  Sense strand starting at position 170 of SEQ ID NO: 588917
gucuuaggagucuguaauc

SEQ ID NO: 898339 - RNA, 19 nt, Artificial Sequence
  Description of Artificial Sequence: Synthetic oligonucleotide
  Antisense strand to SEQ ID NO: 898338
gauuacagacuccuaagac

SEQ ID NO: 898340 - RNA, 19 nt, Artificial Sequence
  Description of Artificial Sequence: Synthetic oligonucleotide
  Sense strand starting at position 206 of SEQ ID NO: 588917
ugcucaugacacuggauau

SEQ ID NO: 898341 - RNA, 19 nt, Artificial Sequence
  Description of Artificial Sequence: Synthetic oligonucleotide
  Antisense strand to SEQ ID NO: 898340
auauccagugucaugagca

SEQ ID NO: 898342 - RNA, 19 nt, Artificial Sequence
  Description of Artificial Sequence: Synthetic oligonucleotide
  Sense strand starting at position 452 of SEQ ID NO: 588917
ugcuccuuaugagaaacaa

SEQ ID NO: 898343 - RNA, 19 nt, Artificial Sequence
  Description of Artificial Sequence: Synthetic oligonucleotide
  Antisense strand to SEQ ID NO: 898342
uuguuucucauaaggagca

SEQ ID NO: 898344 - RNA, 19 nt, Artificial Sequence
  Description of Artificial Sequence: Synthetic oligonucleotide
  Sense strand starting at position 504 of SEQ ID NO: 588917
ccgagaggauggucuaguu

SEQ ID NO: 898345 - RNA, 19 nt, Artificial Sequence
  Description of Artificial Sequence: Synthetic oligonucleotide
  Antisense strand to SEQ ID NO: 898344
aacuagaccauccucucgg

SEQ ID NO: 898346 - RNA, 19 nt, Artificial Sequence
  Description of Artificial Sequence: Synthetic oligonucleotide
  Sense strand starting at position 512 of SEQ ID NO: 588917
auggucuaguugcaagaaa

SEQ ID NO: 898347 - RNA, 19 nt, Artificial Sequence
  Description of Artificial Sequence: Synthetic oligonucleotide
  Antisense strand to SEQ ID NO: 898346
uuucuugcaacuagaccau

SEQ ID NO: 898348 - RNA, 19 nt, Artificial Sequence
  Description of Artificial Sequence: Synthetic oligonucleotide
  Sense strand starting at position 624 of SEQ ID NO: 588917
cuaaguguaaugugcuuga

SEQ ID NO: 898349 - RNA, 19 nt, Artificial Sequence
  Description of Artificial Sequence: Synthetic oligonucleotide
  Antisense strand to SEQ ID NO: 898348
ucaagcacauuacacuuag

SEQ ID NO: 898350 - RNA, 19 nt, Artificial Sequence
  Description of Artificial Sequence: Synthetic oligonucleotide
  Sense strand starting at position 663 of SEQ ID NO: 588917
ccgccuccaucuguggaaa

SEQ ID NO: 898351 - RNA, 19 nt, Artificial Sequence
  Description of Artificial Sequence: Synthetic oligonucleotide
  Antisense strand to SEQ ID NO: 898350
uuuccacagauggaggcgg

SEQ ID NO: 898352 - RNA, 19 nt, Artificial Sequence
  Description of Artificial Sequence: Synthetic oligonucleotide
  Sense strand starting at position 1075 of SEQ ID NO: 588917
gugugagagcguucaagcu

SEQ ID NO: 898353 - RNA, 19 nt, Artificial Sequence
  Description of Artificial Sequence: Synthetic oligonucleotide
  Antisense strand to SEQ ID NO: 898352
agcuugaacgcucucacac

SEQ ID NO: 898354 - RNA, 19 nt, Artificial Sequence
  Description of Artificial Sequence: Synthetic oligonucleotide
  Sense strand starting at position 1159 of SEQ ID NO: 588917
gcagguauauuccugaaac

SEQ ID NO: 898355 - RNA, 19 nt, Artificial Sequence
  Description of Artificial Sequence: Synthetic oligonucleotide
  Antisense strand to SEQ ID NO: 898354
guuucaggaauauaccugc

SEQ ID NO: 898356 - RNA, 19 nt, Artificial Sequence
  Description of Artificial Sequence: Synthetic oligonucleotide
  Sense strand starting at position 1160 of SEQ ID NO: 588917
cagguauauuccugaaacg

SEQ ID NO: 898357 - RNA, 19 nt, Artificial Sequence
  Description of Artificial Sequence: Synthetic oligonucleotide
  Antisense strand to SEQ ID NO: 898356
cguuucaggaauauaccug

SEQ ID NO: 898358 - RNA, 19 nt, Artificial Sequence
  Description of Artificial Sequence: Synthetic oligonucleotide
  Sense strand starting at position 1161 of SEQ ID NO: 588917
agguauauuccugaaacgu

SEQ ID NO: 898359 - RNA, 19 nt, Artificial Sequence
  Description of Artificial Sequence: Synthetic oligonucleotide
  Antisense strand to SEQ ID NO: 898358
acguuucaggaauauaccu

SEQ ID NO: 898360 - RNA, 19 nt, Artificial Sequence
  Description of Artificial Sequence: Synthetic oligonucleotide
  Sense strand starting at position 1262 of SEQ ID NO: 588917
gcccuauaguccucucaca

SEQ ID NO: 898361 - RNA, 19 nt, Artificial Sequence
  Description of Artificial Sequence: Synthetic oligonucleotide
  Antisense strand to SEQ ID NO: 898360
ugugagaggacuauagggc

SEQ ID NO: 898362 - RNA, 19 nt, Artificial Sequence
  Description of Artificial Sequence: Synthetic oligonucleotide
  Sense strand starting at position 1518 of SEQ ID NO: 588917
ccaauuauguacucgggau

SEQ ID NO: 898363 - RNA, 19 nt, Artificial Sequence
  Description of Artificial Sequence: Synthetic oligonucleotide
  Antisense strand to SEQ ID NO: 898362
aucccgaguacauaauugg

SEQ ID NO: 898364 - RNA, 19 nt, Artificial Sequence
  Description of Artificial Sequence: Synthetic oligonucleotide
  Sense strand starting at position 1520 of SEQ ID NO: 588917
aauuauguacucgggaugu

SEQ ID NO: 898365 - RNA, 19 nt, Artificial Sequence
  Description of Artificial Sequence: Synthetic oligonucleotide
  Antisense strand to SEQ ID NO: 898364
acaucccgaguacauaauu

SEQ ID NO: 898366 - RNA, 19 nt, Artificial Sequence
  Description of Artificial Sequence: Synthetic oligonucleotide
  Sense strand starting at position 1631 of SEQ ID NO: 588917
gcuggagaauccuuaguca

SEQ ID NO: 898367 - RNA, 19 nt, Artificial Sequence
  Description of Artificial Sequence: Synthetic oligonucleotide
  Antisense strand to SEQ ID NO: 898366
ugacuaaggauucuccagc

SEQ ID NO: 898368 - RNA, 19 nt, Artificial Sequence
  Description of Artificial Sequence: Synthetic oligonucleotide
  Sense strand starting at position 1634 of SEQ ID NO: 588917
ggagaauccuuagucaauu

SEQ ID NO: 898369 - RNA, 19 nt, Artificial Sequence
  Description of Artificial Sequence: Synthetic oligonucleotide
  Antisense strand to SEQ ID NO: 898368
aauugacuaaggauucucc

SEQ ID NO: 898370 - RNA, 19 nt, Artificial Sequence
  Description of Artificial Sequence: Synthetic oligonucleotide
  Sense strand starting at position 3137 of SEQ ID NO: 588917
agccuaucucccugauagu

SEQ ID NO: 898371 - RNA, 19 nt, Artificial Sequence
  Description of Artificial Sequence: Synthetic oligonucleotide
  Antisense strand to SEQ ID NO: 898370
acuaucagggagauaggcu

SEQ ID NO: 898372 - RNA, 19 nt, Artificial Sequence
  Description of Artificial Sequence: Synthetic oligonucleotide
  Sense strand starting at position 3138 of SEQ ID NO: 588917
gccuaucucccugauaguc

SEQ ID NO: 898373 - RNA, 19 nt, Artificial Sequence
  Description of Artificial Sequence: Synthetic oligonucleotide
  Antisense strand to SEQ ID NO: 898372
gacuaucagggagauaggc

SEQ ID NO: 898374 - RNA, 19 nt, Artificial Sequence
  Description of Artificial Sequence: Synthetic oligonucleotide
  Sense strand starting at position 3146 of SEQ ID NO: 588917
cccugauagucuccuucca

SEQ ID NO: 898375 - RNA, 19 nt, Artificial Sequence
  Description of Artificial Sequence: Synthetic oligonucleotide
  Antisense strand to SEQ ID NO: 898374
uggaaggagacuaucaggg

SEQ ID NO: 898376 - RNA, 19 nt, Artificial Sequence
  Description of Artificial Sequence: Synthetic oligonucleotide
  Sense strand starting at position 3148 of SEQ ID NO: 588917
cugauagucuccuuccaga

SEQ ID NO: 898377 - RNA, 19 nt, Artificial Sequence
  Description of Artificial Sequence: Synthetic oligonucleotide
  Antisense strand to SEQ ID NO: 898376
ucuggaaggagacuaucag

SEQ ID NO: 898378 - RNA, 19 nt, Artificial Sequence
  Description of Artificial Sequence: Synthetic oligonucleotide
  Sense strand starting at position 3153 of SEQ ID NO: 588917
agucuccuuccagaagugu

SEQ ID NO: 898379 - RNA, 19 nt, Artificial Sequence
  Description of Artificial Sequence: Synthetic oligonucleotide
  Antisense strand to SEQ ID NO: 898378
acacuucuggaaggagacu

SEQ ID NO: 898380 - RNA, 19 nt, Artificial Sequence
  Description of Artificial Sequence: Synthetic oligonucleotide
  Sense strand starting at position 3192 of SEQ ID NO: 588917
cagggaagccuuugaaaca

SEQ ID NO: 898381 - RNA, 19 nt, Artificial Sequence
  Description of Artificial Sequence: Synthetic oligonucleotide
  Antisense strand to SEQ ID NO: 898380
uguuucaaaggcuucccug

SEQ ID NO: 898382 - RNA, 19 nt, Artificial Sequence
  Description of Artificial Sequence: Synthetic oligonucleotide
  Sense strand starting at position 3219 of SEQ ID NO: 588917
gguaacuguugagagcauu

SEQ ID NO: 898383 - RNA, 19 nt, Artificial Sequence
  Description of Artificial Sequence: Synthetic oligonucleotide
  Antisense strand to SEQ ID NO: 898382
aaugcucucaacaguuacc

SEQ ID NO: 898384 - RNA, 19 nt, Artificial Sequence
  Description of Artificial Sequence: Synthetic oligonucleotide
  Sense strand starting at position 3301 of SEQ ID NO: 588917
cuugauuaagcuugacaga

SEQ ID NO: 898385 - RNA, 19 nt, Artificial Sequence
  Description of Artificial Sequence: Synthetic oligonucleotide
  Antisense strand to SEQ ID NO: 898384
ucugucaagcuuaaucaag

SEQ ID NO: 898386 - RNA, 19 nt, Artificial Sequence
  Description of Artificial Sequence: Synthetic oligonucleotide
  Sense strand starting at position 3387 of SEQ ID NO: 588917
ccguuaugucgacaaauua

SEQ ID NO: 898387 - RNA, 19 nt, Artificial Sequence
  Description of Artificial Sequence: Synthetic oligonucleotide
  Antisense strand to SEQ ID NO: 898386
uaauuugucgacauaacgg

SEQ ID NO: 898388 - RNA, 19 nt, Artificial Sequence
  Description of Artificial Sequence: Synthetic oligonucleotide
  Sense strand starting at position 3464 of SEQ ID NO: 588917
uuacuuaauguguucgugu

SEQ ID NO: 898389 - RNA, 19 nt, Artificial Sequence
  Description of Artificial Sequence: Synthetic oligonucleotide
  Antisense strand to SEQ ID NO: 898388
acacgaacacauuaaguaa

SEQ ID NO: 898390 - RNA, 19 nt, Artificial Sequence
  Description of Artificial Sequence: Synthetic oligonucleotide
  Sense strand starting at position 3469 of SEQ ID NO: 588917
uaauguguucguguggcuu

SEQ ID NO: 898391 - RNA, 19 nt, Artificial Sequence
  Description of Artificial Sequence: Synthetic oligonucleotide
  Antisense strand to SEQ ID NO: 898390
aagccacacgaacacauua

SEQ ID NO: 898392 - RNA, 19 nt, Artificial Sequence
  Description of Artificial Sequence: Synthetic oligonucleotide
  Sense strand starting at position 3498 of SEQ ID NO: 588917
uuaaguagugaugguuaaa

SEQ ID NO: 898393 - RNA, 19 nt, Artificial Sequence
  Description of Artificial Sequence: Synthetic oligonucleotide
  Antisense strand to SEQ ID NO: 898392
uuuaaccaucacuacuuaa

SEQ ID NO: 898394 - RNA, 19 nt, Artificial Sequence
  Description of Artificial Sequence: Synthetic oligonucleotide
  Sense strand starting at position 3532 of SEQ ID NO: 588917
ggaggugguagugagucau

SEQ ID NO: 898395 - RNA, 19 nt, Artificial Sequence
  Description of Artificial Sequence: Synthetic oligonucleotide
  Antisense strand to SEQ ID NO: 898394
augacucacuaccaccucc

SEQ ID NO: 898396 - RNA, 19 nt, Artificial Sequence
  Description of Artificial Sequence: Synthetic oligonucleotide
  Sense strand starting at position 3536 of SEQ ID NO: 588917
gugguagugagucaucaaa

SEQ ID NO: 898397 - RNA, 19 nt, Artificial Sequence
  Description of Artificial Sequence: Synthetic oligonucleotide
  Antisense strand to SEQ ID NO: 898396
uuugaugacucacuaccac

SEQ ID NO: 898398 - RNA, 19 nt, Artificial Sequence
  Description of Artificial Sequence: Synthetic oligonucleotide
  Sense strand starting at position 3538 of SEQ ID NO: 588917
gguagugagucaucaaacu

SEQ ID NO: 898399 - RNA, 19 nt, Artificial Sequence
  Description of Artificial Sequence: Synthetic oligonucleotide
  Antisense strand to SEQ ID NO: 898398
aguuugaugacucacuacc

SEQ ID NO: 898400 - RNA, 19 nt, Artificial Sequence
  Description of Artificial Sequence: Synthetic oligonucleotide
  Sense strand starting at position 3555 of SEQ ID NO: 588917
cucugaggccuagacuuau

SEQ ID NO: 898401 - RNA, 19 nt, Artificial Sequence
  Description of Artificial Sequence: Synthetic oligonucleotide
  Antisense strand to SEQ ID NO: 898400
auaagucuaggccucagag

SEQ ID NO: 898402 - RNA, 19 nt, Artificial Sequence
  Description of Artificial Sequence: Synthetic oligonucleotide
  Sense strand starting at position 3559 of SEQ ID NO: 588917
gaggccuagacuuaucgga

SEQ ID NO: 898403 - RNA, 19 nt, Artificial Sequence
  Description of Artificial Sequence: Synthetic oligonucleotide
  Antisense strand to SEQ ID NO: 898402
uccgauaagucuaggccuc

SEQ ID NO: 898404 - RNA, 19 nt, Artificial Sequence
  Description of Artificial Sequence: Synthetic oligonucleotide
  Sense strand starting at position 3561 of SEQ ID NO: 588917
ggccuagacuuaucggaag

SEQ ID NO: 898405 - RNA, 19 nt, Artificial Sequence
  Description of Artificial Sequence: Synthetic oligonucleotide
  Antisense strand to SEQ ID NO: 898404
cuuccgauaagucuaggcc

SEQ ID NO: 898406 - RNA, 19 nt, Artificial Sequence
  Description of Artificial Sequence: Synthetic oligonucleotide
  Sense strand starting at position 3564 of SEQ ID NO: 588917
cuagacuuaucggaaggcu

SEQ ID NO: 898407 - RNA, 19 nt, Artificial Sequence
  Description of Artificial Sequence: Synthetic oligonucleotide
  Antisense strand to SEQ ID NO: 898406
agccuuccgauaagucuag

SEQ ID NO: 898408 - RNA, 19 nt, Artificial Sequence
  Description of Artificial Sequence: Synthetic oligonucleotide
  Sense strand starting at position 3567 of SEQ ID NO: 588917
gacuuaucggaaggcuugu

SEQ ID NO: 898409 - RNA, 19 nt, Artificial Sequence
  Description of Artificial Sequence: Synthetic oligonucleotide
  Antisense strand to SEQ ID NO: 898408
acaagccuuccgauaaguc

SEQ ID NO: 898410 - RNA, 19 nt, Artificial Sequence
  Description of Artificial Sequence: Synthetic oligonucleotide
  Sense strand starting at position 3580 of SEQ ID NO: 588917
gcuuguauaugugugguuu

SEQ ID NO: 898411 - RNA, 19 nt, Artificial Sequence
  Description of Artificial Sequence: Synthetic oligonucleotide
  Antisense strand to SEQ ID NO: 898410
aaaccacacauauacaagc

SEQ ID NO: 898412 - RNA, 19 nt, Artificial Sequence
  Description of Artificial Sequence: Synthetic oligonucleotide
  Sense strand starting at position 3581 of SEQ ID NO: 588917
cuuguauaugugugguuua

SEQ ID NO: 898413 - RNA, 19 nt, Artificial Sequence
  Description of Artificial Sequence: Synthetic oligonucleotide
  Antisense strand to SEQ ID NO: 898412
uaaaccacacauauacaag

SEQ ID NO: 898414 - RNA, 19 nt, Artificial Sequence
  Description of Artificial Sequence: Synthetic oligonucleotide
  Sense strand starting at position 3667 of SEQ ID NO: 588917
ggugaucucuuucuagugu

SEQ ID NO: 898415 - RNA, 19 nt, Artificial Sequence
  Description of Artificial Sequence: Synthetic oligonucleotide
  Antisense strand to SEQ ID NO: 898414
acacuagaaagagaucacc

SEQ ID NO: 898416 - RNA, 19 nt, Artificial Sequence
  Description of Artificial Sequence: Synthetic oligonucleotide
  Sense strand starting at position 3695 of SEQ ID NO: 588917
aucgguucucauugcaaca

SEQ ID NO: 898417 - RNA, 19 nt, Artificial Sequence
  Description of Artificial Sequence: Synthetic oligonucleotide
  Antisense strand to SEQ ID NO: 898416
uguugcaaugagaaccgau

SEQ ID NO: 898418 - RNA, 19 nt, Artificial Sequence
  Description of Artificial Sequence: Synthetic oligonucleotide
  Sense strand starting at position 27 of SEQ ID NO: 588918
ucauguugauucucaaaga

SEQ ID NO: 898419 - RNA, 19 nt, Artificial Sequence
  Description of Artificial Sequence: Synthetic oligonucleotide
  Antisense strand to SEQ ID NO: 898418
ucuuugagaaucaacauga

SEQ ID NO: 898420 - RNA, 19 nt, Artificial Sequence
  Description of Artificial Sequence: Synthetic oligonucleotide
  Sense strand starting at position 54 of SEQ ID NO: 588918
cagauuugccacugcaguu

SEQ ID NO: 898421 - RNA, 19 nt, Artificial Sequence
  Description of Artificial Sequence: Synthetic oligonucleotide
  Antisense strand to SEQ ID NO: 898420
aacugcaguggcaaaucug

SEQ ID NO: 898422 - RNA, 19 nt, Artificial Sequence
  Description of Artificial Sequence: Synthetic oligonucleotide
  Sense strand starting at position 295 of SEQ ID NO: 588918
accacaucaucuguuguga

SEQ ID NO: 898423 - RNA, 19 nt, Artificial Sequence
  Description of Artificial Sequence: Synthetic oligonucleotide
  Antisense strand to SEQ ID NO: 898422
ucacaacagaugauguggu

SEQ ID NO: 898424 - RNA, 19 nt, Artificial Sequence
  Description of Artificial Sequence: Synthetic oligonucleotide
  Sense strand starting at position 681 of SEQ ID NO: 588918
guuguugugguugccauua

SEQ ID NO: 898425 - RNA, 19 nt, Artificial Sequence
  Description of Artificial Sequence: Synthetic oligonucleotide
  Antisense strand to SEQ ID NO: 898424
uaauggcaaccacaacaac

SEQ ID NO: 898426 - RNA, 19 nt, Artificial Sequence
  Description of Artificial Sequence: Synthetic oligonucleotide
  Sense strand starting at position 725 of SEQ ID NO: 588918
cucuccauuugggaagaua

SEQ ID NO: 898427 - RNA, 19 nt, Artificial Sequence
  Description of Artificial Sequence: Synthetic oligonucleotide
  Antisense strand to SEQ ID NO: 898426
uaucuucccaaauggagag

SEQ ID NO: 898428 - RNA, 19 nt, Artificial Sequence
  Description of Artificial Sequence: Synthetic oligonucleotide
  Sense strand starting at position 737 of SEQ ID NO: 588918
gaagauaaccugcaacguu

SEQ ID NO: 898429 - RNA, 19 nt, Artificial Sequence
  Description of Artificial Sequence: Synthetic oligonucleotide
  Antisense strand to SEQ ID NO: 898428
aacguugcagguuaucuuc

SEQ ID NO: 898430 - RNA, 19 nt, Artificial Sequence
  Description of Artificial Sequence: Synthetic oligonucleotide
  Sense strand starting at position 740 of SEQ ID NO: 588918
gauaaccugcaacguuauu

SEQ ID NO: 898431 - RNA, 19 nt, Artificial Sequence
  Description of Artificial Sequence: Synthetic oligonucleotide
  Antisense strand to SEQ ID NO: 898430
aauaacguugcagguuauc

SEQ ID NO: 898432 - RNA, 19 nt, Artificial Sequence
  Description of Artificial Sequence: Synthetic oligonucleotide
  Sense strand starting at position 786 of SEQ ID NO: 588918
uucuguaauuccuuugaug

SEQ ID NO: 898433 - RNA, 19 nt, Artificial Sequence
  Description of Artificial Sequence: Synthetic oligonucleotide
  Antisense strand to SEQ ID NO: 898432
caucaaaggaauuacagaa

SEQ ID NO: 898434 - RNA, 19 nt, Artificial Sequence
  Description of Artificial Sequence: Synthetic oligonucleotide
  Sense strand starting at position 849 of SEQ ID NO: 588918
uggaacuuauagcuaagau

SEQ ID NO: 898435 - RNA, 19 nt, Artificial Sequence
  Description of Artificial Sequence: Synthetic oligonucleotide
  Antisense strand to SEQ ID NO: 898434
aucuuagcuauaaguucca

SEQ ID NO: 898436 - RNA, 19 nt, Artificial Sequence
  Description of Artificial Sequence: Synthetic oligonucleotide
  Sense strand starting at position 871 of SEQ ID NO: 588918
guggauaaagcuggcuuua

SEQ ID NO: 898437 - RNA, 19 nt, Artificial Sequence
  Description of Artificial Sequence: Synthetic oligonucleotide
  Antisense strand to SEQ ID NO: 898436
uaaagccagcuuuauccac

SEQ ID NO: 898438 - RNA, 19 nt, Artificial Sequence
  Description of Artificial Sequence: Synthetic oligonucleotide
  Sense strand starting at position 873 of SEQ ID NO: 588918
ggauaaagcuggcuuuaca

SEQ ID NO: 898439 - RNA, 19 nt, Artificial Sequence
  Description of Artificial Sequence: Synthetic oligonucleotide
  Antisense strand to SEQ ID NO: 898438
uguaaagccagcuuuaucc

SEQ ID NO: 898440 - RNA, 19 nt, Artificial Sequence
  Description of Artificial Sequence: Synthetic oligonucleotide
  Sense strand starting at position 904 of SEQ ID NO: 588918
agaugacuccaaugucaug

SEQ ID NO: 898441 - RNA, 19 nt, Artificial Sequence
  Description of Artificial Sequence: Synthetic oligonucleotide
  Antisense strand to SEQ ID NO: 898440
caugacauuggagucaucu

SEQ ID NO: 898442 - RNA, 19 nt, Artificial Sequence
  Description of Artificial Sequence: Synthetic oligonucleotide
  Sense strand starting at position 973 of SEQ ID NO: 588918
cugccauccugccugaaau

SEQ ID NO: 898443 - RNA, 19 nt, Artificial Sequence
  Description of Artificial Sequence: Synthetic oligonucleotide
  Antisense strand to SEQ ID NO: 898442
auuucaggcaggauggcag

SEQ ID NO: 898444 - RNA, 19 nt, Artificial Sequence
  Description of Artificial Sequence: Synthetic oligonucleotide
  Sense strand starting at position 974 of SEQ ID NO: 588918
ugccauccugccugaaauu

SEQ ID NO: 898445 - RNA, 19 nt, Artificial Sequence
  Description of Artificial Sequence: Synthetic oligonucleotide
  Antisense strand to SEQ ID NO: 898444
aauuucaggcaggauggca

SEQ ID NO: 898446 - RNA, 19 nt, Artificial Sequence
  Description of Artificial Sequence: Synthetic oligonucleotide
  Sense strand starting at position 975 of SEQ ID NO: 588918
gccauccugccugaaauuc

SEQ ID NO: 898447 - RNA, 19 nt, Artificial Sequence
  Description of Artificial Sequence: Synthetic oligonucleotide
  Antisense strand to SEQ ID NO: 898446
gaauuucaggcaggauggc

SEQ ID NO: 898448 - RNA, 19 nt, Artificial Sequence
  Description of Artificial Sequence: Synthetic oligonucleotide
  Sense strand starting at position 1008 of SEQ ID NO: 588918
cuguaauuccucuggauca

SEQ ID NO: 898449 - RNA, 19 nt, Artificial Sequence
  Description of Artificial Sequence: Synthetic oligonucleotide
  Antisense strand to SEQ ID NO: 898448
ugauccagaggaauuacag

SEQ ID NO: 898450 - RNA, 19 nt, Artificial Sequence
  Description of Artificial Sequence: Synthetic oligonucleotide
  Sense strand starting at position 1010 of SEQ ID NO: 588918
guaauuccucuggaucacu

SEQ ID NO: 898451 - RNA, 19 nt, Artificial Sequence
  Description of Artificial Sequence: Synthetic oligonucleotide
  Antisense strand to SEQ ID NO: 898450
agugauccagaggaauuac

SEQ ID NO: 898452 - RNA, 19 nt, Artificial Sequence
  Description of Artificial Sequence: Synthetic oligonucleotide
  Sense strand starting at position 1186 of SEQ ID NO: 588918
gggagaacucaggguuccu

SEQ ID NO: 898453 - RNA, 19 nt, Artificial Sequence
  Description of Artificial Sequence: Synthetic oligonucleotide
  Antisense strand to SEQ ID NO: 898452
aggaacccugaguucuccc

SEQ ID NO: 898454 - RNA, 19 nt, Artificial Sequence
  Description of Artificial Sequence: Synthetic oligonucleotide
  Sense strand starting at position 1330 of SEQ ID NO: 588918
ugcaaaucggucuaaguuu

SEQ ID NO: 898455 - RNA, 19 nt, Artificial Sequence
  Description of Artificial Sequence: Synthetic oligonucleotide
  Antisense strand to SEQ ID NO: 898454
aaacuuagaccgauuugca

SEQ ID NO: 898456 - RNA, 19 nt, Artificial Sequence
  Description of Artificial Sequence: Synthetic oligonucleotide
  Sense strand starting at position 1413 of SEQ ID NO: 588918
gcggccuucgagagaguga

SEQ ID NO: 898457 - RNA, 19 nt, Artificial Sequence
  Description of Artificial Sequence: Synthetic oligonucleotide
  Antisense strand to SEQ ID NO: 898456
ucacucucucgaaggccgc

SEQ ID NO: 898458 - RNA, 19 nt, Artificial Sequence
  Description of Artificial Sequence: Synthetic oligonucleotide
  Sense strand starting at position 1422 of SEQ ID NO: 588918
gagagagugagucgggaaa

SEQ ID NO: 898459 - RNA, 19 nt, Artificial Sequence
  Description of Artificial Sequence: Synthetic oligonucleotide
  Antisense strand to SEQ ID NO: 898458
uuucccgacucacucucuc

SEQ ID NO: 898460 - RNA, 19 nt, Artificial Sequence
  Description of Artificial Sequence: Synthetic oligonucleotide
  Sense strand starting at position 1640 of SEQ ID NO: 588918
gugaccucagucugccaaa

SEQ ID NO: 898461 - RNA, 19 nt, Artificial Sequence
  Description of Artificial Sequence: Synthetic oligonucleotide
  Antisense strand to SEQ ID NO: 898460
uuuggcagacugaggucac

SEQ ID NO: 898462 - RNA, 19 nt, Artificial Sequence
  Description of Artificial Sequence: Synthetic oligonucleotide
  Sense strand starting at position 1661 of SEQ ID NO: 588918
ggguucgugaugcucaguu

SEQ ID NO: 898463 - RNA, 19 nt, Artificial Sequence
  Description of Artificial Sequence: Synthetic oligonucleotide
  Antisense strand to SEQ ID NO: 898462
aacugagcaucacgaaccc

SEQ ID NO: 898464 - RNA, 19 nt, Artificial Sequence
  Description of Artificial Sequence: Synthetic oligonucleotide
  Sense strand starting at position 1673 of SEQ ID NO: 588918
cucaguuuacuagggagga

SEQ ID NO: 898465 - RNA, 19 nt, Artificial Sequence
  Description of Artificial Sequence: Synthetic oligonucleotide
  Antisense strand to SEQ ID NO: 898464
uccucccuaguaaacugag

SEQ ID NO: 898466 - RNA, 19 nt, Artificial Sequence
  Description of Artificial Sequence: Synthetic oligonucleotide
  Sense strand starting at position 2010 of SEQ ID NO: 588918
gugagaguuggccaaucaa

SEQ ID NO: 898467 - RNA, 19 nt, Artificial Sequence
  Description of Artificial Sequence: Synthetic oligonucleotide
  Antisense strand to SEQ ID NO: 898466
uugauuggccaacucucac

SEQ ID NO: 898468 - RNA, 19 nt, Artificial Sequence
  Description of Artificial Sequence: Synthetic oligonucleotide
  Sense strand starting at position 2512 of SEQ ID NO: 588918
cgagugagguguguuaaga

SEQ ID NO: 898469 - RNA, 19 nt, Artificial Sequence
  Description of Artificial Sequence: Synthetic oligonucleotide
  Antisense strand to SEQ ID NO: 898468
ucuuaacacaccucacucg

SEQ ID NO: 898470 - RNA, 19 nt, Artificial Sequence
  Description of Artificial Sequence: Synthetic oligonucleotide
  Sense strand starting at position 3112 of SEQ ID NO: 588918
agugaagaguuaccaauua

SEQ ID NO: 898471 - RNA, 19 nt, Artificial Sequence
  Description of Artificial Sequence: Synthetic oligonucleotide
  Antisense strand to SEQ ID NO: 898470
uaauugguaacucuucacu

SEQ ID NO: 898472 - RNA, 19 nt, Artificial Sequence
  Description of Artificial Sequence: Synthetic oligonucleotide
  Sense strand starting at position 3271 of SEQ ID NO: 588918
ggaggcugcagugauguau

SEQ ID NO: 898473 - RNA, 19 nt, Artificial Sequence
  Description of Artificial Sequence: Synthetic oligonucleotide
  Antisense strand to SEQ ID NO: 898472
auacaucacugcagccucc

SEQ ID NO: 898474 - RNA, 19 nt, Artificial Sequence
  Description of Artificial Sequence: Synthetic oligonucleotide
  Sense strand starting at position 3280 of SEQ ID NO: 588918
agugauguaugaucagauc

SEQ ID NO: 898475 - RNA, 19 nt, Artificial Sequence
  Description of Artificial Sequence: Synthetic oligonucleotide
  Antisense strand to SEQ ID NO: 898474
gaucugaucauacaucacu

SEQ ID NO: 898476 - RNA, 19 nt, Artificial Sequence
  Description of Artificial Sequence: Synthetic oligonucleotide
  Sense strand starting at position 3286 of SEQ ID NO: 588918
guaugaucagaucacugca

SEQ ID NO: 898477 - RNA, 19 nt, Artificial Sequence
  Description of Artificial Sequence: Synthetic oligonucleotide
  Antisense strand to SEQ ID NO: 898476
ugcagugaucugaucauac

SEQ ID NO: 898478 - RNA, 19 nt, Artificial Sequence
  Description of Artificial Sequence: Synthetic oligonucleotide
  Sense strand starting at position 3386 of SEQ ID NO: 588918
caggaaggugugcaaguau

SEQ ID NO: 898479 - RNA, 19 nt, Artificial Sequence
  Description of Artificial Sequence: Synthetic oligonucleotide
  Antisense strand to SEQ ID NO: 898478
auacuugcacaccuuccug

SEQ ID NO: 898480 - RNA, 19 nt, Artificial Sequence
  Description of Artificial Sequence: Synthetic oligonucleotide
  Sense strand starting at position 3397 of SEQ ID NO: 588918
gcaaguaugcagucugugu

SEQ ID NO: 898481 - RNA, 19 nt, Artificial Sequence
  Description of Artificial Sequence: Synthetic oligonucleotide
  Antisense strand to SEQ ID NO: 898480
acacagacugcauacuugc

SEQ ID NO: 898482 - RNA, 19 nt, Artificial Sequence
  Description of Artificial Sequence: Synthetic oligonucleotide
  Sense strand starting at position 3635 of SEQ ID NO: 588918
acaguuuauucucuaagug

SEQ ID NO: 898483 - RNA, 19 nt, Artificial Sequence
  Description of Artificial Sequence: Synthetic oligonucleotide
  Antisense strand to SEQ ID NO: 898482
cacuuagagaauaaacugu

SEQ ID NO: 898484 - RNA, 19 nt, Artificial Sequence
  Description of Artificial Sequence: Synthetic oligonucleotide
  Sense strand starting at position 3657 of SEQ ID NO: 588918
ggaugugugccuuaaccuu

SEQ ID NO: 898485 - RNA, 19 nt, Artificial Sequence
  Description of Artificial Sequence: Synthetic oligonucleotide
  Antisense strand to SEQ ID NO: 898484
aagguuaaggcacacaucc

SEQ ID NO: 898486 - RNA, 19 nt, Artificial Sequence
  Description of Artificial Sequence: Synthetic oligonucleotide
  Sense strand starting at position 3679 of SEQ ID NO: 588918
cuggcaugaccuuagguau

SEQ ID NO: 898487 - RNA, 19 nt, Artificial Sequence
  Description of Artificial Sequence: Synthetic oligonucleotide
  Antisense strand to SEQ ID NO: 898486
auaccuaaggucaugccag

SEQ ID NO: 898488 - RNA, 19 nt, Artificial Sequence
  Description of Artificial Sequence: Synthetic oligonucleotide
  Sense strand starting at position 3682 of SEQ ID NO: 588918
gcaugaccuuagguauaau

SEQ ID NO: 898489 - RNA, 19 nt, Artificial Sequence
  Description of Artificial Sequence: Synthetic oligonucleotide
  Antisense strand to SEQ ID NO: 898488
auuauaccuaaggucaugc

SEQ ID NO: 898490 - RNA, 19 nt, Artificial Sequence
  Description of Artificial Sequence: Synthetic oligonucleotide
  Sense strand starting at position 3798 of SEQ ID NO: 588918
acuccaauacgaugaaguu

SEQ ID NO: 898491 - RNA, 19 nt, Artificial Sequence
  Description of Artificial Sequence: Synthetic oligonucleotide
  Antisense strand to SEQ ID NO: 898490
aacuucaucguauuggagu

SEQ ID NO: 898492 - RNA, 19 nt, Artificial Sequence
  Description of Artificial Sequence: Synthetic oligonucleotide
  Sense strand starting at position 3799 of SEQ ID NO: 588918
cuccaauacgaugaaguua

SEQ ID NO: 898493 - RNA, 19 nt, Artificial Sequence
  Description of Artificial Sequence: Synthetic oligonucleotide
  Antisense strand to SEQ ID NO: 898492
uaacuucaucguauuggag

SEQ ID NO: 898494 - RNA, 19 nt, Artificial Sequence
  Description of Artificial Sequence: Synthetic oligonucleotide
  Sense strand starting at position 3810 of SEQ ID NO: 588918
ugaaguuauaaugaggcga

SEQ ID NO: 898495 - RNA, 19 nt, Artificial Sequence
  Description of Artificial Sequence: Synthetic oligonucleotide
  Antisense strand to SEQ ID NO: 898494
ucgccucauuauaacuuca

SEQ ID NO: 898496 - RNA, 19 nt, Artificial Sequence
  Description of Artificial Sequence: Synthetic oligonucleotide
  Sense strand starting at position 3842 of SEQ ID NO: 588918
uccugucauuggcugggaa

SEQ ID NO: 898497 - RNA, 19 nt, Artificial Sequence
  Description of Artificial Sequence: Synthetic oligonucleotide
  Antisense strand to SEQ ID NO: 898496
uucccagccaaugacagga

SEQ ID NO: 898498 - RNA, 19 nt, Artificial Sequence
  Description of Artificial Sequence: Synthetic oligonucleotide
  Sense strand starting at position 263 of SEQ ID NO: 588919
gcacauggauauccuugau

SEQ ID NO: 898499 - RNA, 19 nt, Artificial Sequence
  Description of Artificial Sequence: Synthetic oligonucleotide
  Antisense strand to SEQ ID NO: 898498
aucaaggauauccaugugc

SEQ ID NO: 898500 - RNA, 19 nt, Artificial Sequence
  Description of Artificial Sequence: Synthetic oligonucleotide
  Sense strand starting at position 269 of SEQ ID NO: 588919
ggauauccuugaucucaua

SEQ ID NO: 898501 - RNA, 19 nt, Artificial Sequence
  Description of Artificial Sequence: Synthetic oligonucleotide
  Antisense strand to SEQ ID NO: 898500
uaugagaucaaggauaucc

SEQ ID NO: 898502 - RNA, 19 nt, Artificial Sequence
  Description of Artificial Sequence: Synthetic oligonucleotide
  Sense strand starting at position 488 of SEQ ID NO: 588919
cccuaacucuggcucagau

SEQ ID NO: 898503 - RNA, 19 nt, Artificial Sequence
  Description of Artificial Sequence: Synthetic oligonucleotide
  Antisense strand to SEQ ID NO: 898502
aucugagccagaguuaggg

SEQ ID NO: 898504 - RNA, 19 nt, Artificial Sequence
  Description of Artificial Sequence: Synthetic oligonucleotide
  Sense strand starting at position 506 of SEQ ID NO: 588919
ucugcuuacccggaagacu

SEQ ID NO: 898505 - RNA, 19 nt, Artificial Sequence
  Description of Artificial Sequence: Synthetic oligonucleotide
  Antisense strand to SEQ ID NO: 898504
agucuuccggguaagcaga

SEQ ID NO: 898506 - RNA, 19 nt, Artificial Sequence
  Description of Artificial Sequence: Synthetic oligonucleotide
  Sense strand starting at position 515 of SEQ ID NO: 588919
ccggaagacuuuguccaga

SEQ ID NO: 898507 - RNA, 19 nt, Artificial Sequence
  Description of Artificial Sequence: Synthetic oligonucleotide
  Antisense strand to SEQ ID NO: 898506
ucuggacaaagucuuccgg

SEQ ID NO: 898508 - RNA, 19 nt, Artificial Sequence
  Description of Artificial Sequence: Synthetic oligonucleotide
  Sense strand starting at position 551 of SEQ ID NO: 588919
ugaucucaugguuguuuga

SEQ ID NO: 898509 - RNA, 19 nt, Artificial Sequence
  Description of Artificial Sequence: Synthetic oligonucleotide
  Antisense strand to SEQ ID NO: 898508
ucaaacaaccaugagauca

SEQ ID NO: 898510 - RNA, 19 nt, Artificial Sequence
  Description of Artificial Sequence: Synthetic oligonucleotide
  Sense strand starting at position 641 of SEQ ID NO: 588919
gaagcuugggcacaagauu

SEQ ID NO: 898511 - RNA, 19 nt, Artificial Sequence
  Description of Artificial Sequence: Synthetic oligonucleotide
  Antisense strand to SEQ ID NO: 898510
aaucuugugcccaagcuuc

SEQ ID NO: 898512 - RNA, 19 nt, Artificial Sequence
  Description of Artificial Sequence: Synthetic oligonucleotide
  Sense strand starting at position 755 of SEQ ID NO: 588919
agaguuacauugucuguag

SEQ ID NO: 898513 - RNA, 19 nt, Artificial Sequence
  Description of Artificial Sequence: Synthetic oligonucleotide
  Antisense strand to SEQ ID NO: 898512
cuacagacaauguaacucu

SEQ ID NO: 898514 - RNA, 19 nt, Artificial Sequence
  Description of Artificial Sequence: Synthetic oligonucleotide
  Sense strand starting at position 756 of SEQ ID NO: 588919
gaguuacauugucuguaga

SEQ ID NO: 898515 - RNA, 19 nt, Artificial Sequence
  Description of Artificial Sequence: Synthetic oligonucleotide
  Antisense strand to SEQ ID NO: 898514
ucuacagacaauguaacuc

SEQ ID NO: 898516 - RNA, 19 nt, Artificial Sequence
  Description of Artificial Sequence: Synthetic oligonucleotide
  Sense strand starting at position 757 of SEQ ID NO: 588919
aguuacauugucuguagaa

SEQ ID NO: 898517 - RNA, 19 nt, Artificial Sequence
  Description of Artificial Sequence: Synthetic oligonucleotide
  Antisense strand to SEQ ID NO: 898516
uucuacagacaauguaacu

SEQ ID NO: 898518 - RNA, 19 nt, Artificial Sequence
  Description of Artificial Sequence: Synthetic oligonucleotide
  Sense strand starting at position 758 of SEQ ID NO: 588919
guuacauugucuguagaac

SEQ ID NO: 898519 - RNA, 19 nt, Artificial Sequence
  Description of Artificial Sequence: Synthetic oligonucleotide
  Antisense strand to SEQ ID NO: 898518
guucuacagacaauguaac

SEQ ID NO: 898520 - RNA, 19 nt, Artificial Sequence
  Description of Artificial Sequence: Synthetic oligonucleotide
  Sense strand starting at position 942 of SEQ ID NO: 588919
ccuugagacucugcacaua

SEQ ID NO: 898521 - RNA, 19 nt, Artificial Sequence
  Description of Artificial Sequence: Synthetic oligonucleotide
  Antisense strand to SEQ ID NO: 898520
uaugugcagagucucaagg

SEQ ID NO: 898522 - RNA, 19 nt, Artificial Sequence
  Description of Artificial Sequence: Synthetic oligonucleotide
  Sense strand starting at position 968 of SEQ ID NO: 588919
cggucuaacacagggauga

SEQ ID NO: 898523 - RNA, 19 nt, Artificial Sequence
  Description of Artificial Sequence: Synthetic oligonucleotide
  Antisense strand to SEQ ID NO: 898522
ucaucccuguguuagaccg

SEQ ID NO: 898524 - RNA, 19 nt, Artificial Sequence
  Description of Artificial Sequence: Synthetic oligonucleotide
  Sense strand starting at position 1054 of SEQ ID NO: 588919
uaagcuaguccuggaguau

SEQ ID NO: 898525 - RNA, 19 nt, Artificial Sequence
  Description of Artificial Sequence: Synthetic oligonucleotide
  Antisense strand to SEQ ID NO: 898524
auacuccaggacuagcuua

SEQ ID NO: 898526 - RNA, 19 nt, Artificial Sequence
  Description of Artificial Sequence: Synthetic oligonucleotide
  Sense strand starting at position 1055 of SEQ ID NO: 588919
aagcuaguccuggaguaug

SEQ ID NO: 898527 - RNA, 19 nt, Artificial Sequence
  Description of Artificial Sequence: Synthetic oligonucleotide
  Antisense strand to SEQ ID NO: 898526
cauacuccaggacuagcuu

SEQ ID NO: 898528 - RNA, 19 nt, Artificial Sequence
  Description of Artificial Sequence: Synthetic oligonucleotide
  Sense strand starting at position 1144 of SEQ ID NO: 588919
ugaggugucacugguaaga

SEQ ID NO: 898529 - RNA, 19 nt, Artificial Sequence
  Description of Artificial Sequence: Synthetic oligonucleotide
  Antisense strand to SEQ ID NO: 898528
ucuuaccagugacaccuca

SEQ ID NO: 898530 - RNA, 19 nt, Artificial Sequence
  Description of Artificial Sequence: Synthetic oligonucleotide
  Sense strand starting at position 1303 of SEQ ID NO: 588919
gccugugagaugcauagga

SEQ ID NO: 898531 - RNA, 19 nt, Artificial Sequence
  Description of Artificial Sequence: Synthetic oligonucleotide
  Antisense strand to SEQ ID NO: 898530
uccuaugcaucucacaggc

SEQ ID NO: 898532 - RNA, 19 nt, Artificial Sequence
  Description of Artificial Sequence: Synthetic oligonucleotide
  Sense strand starting at position 1414 of SEQ ID NO: 588919
ggaaguccucccgacauug

SEQ ID NO: 898533 - RNA, 19 nt, Artificial Sequence
  Description of Artificial Sequence: Synthetic oligonucleotide
  Antisense strand to SEQ ID NO: 898532
caaugucgggaggacuucc

SEQ ID NO: 898534 - RNA, 19 nt, Artificial Sequence
  Description of Artificial Sequence: Synthetic oligonucleotide
  Sense strand starting at position 1429 of SEQ ID NO: 588919
auugcaugucgugagggau

SEQ ID NO: 898535 - RNA, 19 nt, Artificial Sequence
  Description of Artificial Sequence: Synthetic oligonucleotide
  Antisense strand to SEQ ID NO: 898534
aucccucacgacaugcaau

SEQ ID NO: 898536 - RNA, 19 nt, Artificial Sequence
  Description of Artificial Sequence: Synthetic oligonucleotide
  Sense strand starting at position 1430 of SEQ ID NO: 588919
uugcaugucgugagggauu

SEQ ID NO: 898537 - RNA, 19 nt, Artificial Sequence
  Description of Artificial Sequence: Synthetic oligonucleotide
  Antisense strand to SEQ ID NO: 898536
aaucccucacgacaugcaa

SEQ ID NO: 898538 - RNA, 19 nt, Artificial Sequence
  Description of Artificial Sequence: Synthetic oligonucleotide
  Sense strand starting at position 1442 of SEQ ID NO: 588919
agggauuggucaucuggcu

SEQ ID NO: 898539 - RNA, 19 nt, Artificial Sequence
  Description of Artificial Sequence: Synthetic oligonucleotide
  Antisense strand to SEQ ID NO: 898538
agccagaugaccaaucccu

SEQ ID NO: 898540 - RNA, 19 nt, Artificial Sequence
  Description of Artificial Sequence: Synthetic oligonucleotide
  Sense strand starting at position 1808 of SEQ ID NO: 588919
cagguaaucucuguccuga

SEQ ID NO: 898541 - RNA, 19 nt, Artificial Sequence
  Description of Artificial Sequence: Synthetic oligonucleotide
  Antisense strand to SEQ ID NO: 898540
ucaggacagagauuaccug

SEQ ID NO: 898542 - RNA, 19 nt, Artificial Sequence
  Description of Artificial Sequence: Synthetic oligonucleotide
  Sense strand starting at position 2070 of SEQ ID NO: 588919
ucaaguuguucccugggaa

SEQ ID NO: 898543 - RNA, 19 nt, Artificial Sequence
  Description of Artificial Sequence: Synthetic oligonucleotide
  Antisense strand to SEQ ID NO: 898542
uucccagggaacaacuuga

SEQ ID NO: 898544 - RNA, 19 nt, Artificial Sequence
  Description of Artificial Sequence: Synthetic oligonucleotide
  Sense strand starting at position 2071 of SEQ ID NO: 588919
caaguuguucccugggaaa

SEQ ID NO: 898545 - RNA, 19 nt, Artificial Sequence
  Description of Artificial Sequence: Synthetic oligonucleotide
  Antisense strand to SEQ ID NO: 898544
uuucccagggaacaacuug

SEQ ID NO: 898546 - RNA, 19 nt, Artificial Sequence
  Description of Artificial Sequence: Synthetic oligonucleotide
  Sense strand starting at position 2191 of SEQ ID NO: 588919
cgggcauuaucacucagac

SEQ ID NO: 898547 - RNA, 19 nt, Artificial Sequence
  Description of Artificial Sequence: Synthetic oligonucleotide
  Antisense strand to SEQ ID NO: 898546
gucugagugauaaugcccg

SEQ ID NO: 898548 - RNA, 19 nt, Artificial Sequence
  Description of Artificial Sequence: Synthetic oligonucleotide
  Sense strand starting at position 2217 of SEQ ID NO: 588919
acugaauuauucguccuca

SEQ ID NO: 898549 - RNA, 19 nt, Artificial Sequence
  Description of Artificial Sequence: Synthetic oligonucleotide
  Antisense strand to SEQ ID NO: 898548
ugaggacgaauaauucagu

SEQ ID NO: 898550 - RNA, 19 nt, Artificial Sequence
  Description of Artificial Sequence: Synthetic oligonucleotide
  Sense strand starting at position 2218 of SEQ ID NO: 588919
cugaauuauucguccucac

SEQ ID NO: 898551 - RNA, 19 nt, Artificial Sequence
  Description of Artificial Sequence: Synthetic oligonucleotide
  Antisense strand to SEQ ID NO: 898550
gugaggacgaauaauucag

SEQ ID NO: 898552 - RNA, 19 nt, Artificial Sequence
  Description of Artificial Sequence: Synthetic oligonucleotide
  Sense strand starting at position 2331 of SEQ ID NO: 588919
uagugauauucucugguag

SEQ ID NO: 898553 - RNA, 19 nt, Artificial Sequence
  Description of Artificial Sequence: Synthetic oligonucleotide
  Antisense strand to SEQ ID NO: 898552
cuaccagagaauaucacua

SEQ ID NO: 898554 - RNA, 19 nt, Artificial Sequence
  Description of Artificial Sequence: Synthetic oligonucleotide
  Sense strand starting at position 2595 of SEQ ID NO: 588919
ugcucugguagucaagaga

SEQ ID NO: 898555 - RNA, 19 nt, Artificial Sequence
  Description of Artificial Sequence: Synthetic oligonucleotide
  Antisense strand to SEQ ID NO: 898554
ucucuugacuaccagagca

SEQ ID NO: 898556 - RNA, 19 nt, Artificial Sequence
  Description of Artificial Sequence: Synthetic oligonucleotide
  Sense strand starting at position 2638 of SEQ ID NO: 588919
auaugagggcacugaaguu

SEQ ID NO: 898557 - RNA, 19 nt, Artificial Sequence
  Description of Artificial Sequence: Synthetic oligonucleotide
  Antisense strand to SEQ ID NO: 898556
aacuucagugcccucauau

SEQ ID NO: 898558 - RNA, 19 nt, Artificial Sequence
  Description of Artificial Sequence: Synthetic oligonucleotide
  Sense strand starting at position 2662 of SEQ ID NO: 588919
gggcuaaagucauuaauag

SEQ ID NO: 898559 - RNA, 19 nt, Artificial Sequence
  Description of Artificial Sequence: Synthetic oligonucleotide
  Antisense strand to SEQ ID NO: 898558
cuauuaaugacuuuagccc

SEQ ID NO: 898560 - RNA, 19 nt, Artificial Sequence
  Description of Artificial Sequence: Synthetic oligonucleotide
  Sense strand starting at position 2816 of SEQ ID NO: 588919
gccuguugccucucuggua

SEQ ID NO: 898561 - RNA, 19 nt, Artificial Sequence
  Description of Artificial Sequence: Synthetic oligonucleotide
  Antisense strand to SEQ ID NO: 898560
uaccagagaggcaacaggc

SEQ ID NO: 898562 - RNA, 19 nt, Artificial Sequence
  Description of Artificial Sequence: Synthetic oligonucleotide
  Sense strand starting at position 3122 of SEQ ID NO: 588919
gaaccacaugacugaguuu

SEQ ID NO: 898563 - RNA, 19 nt, Artificial Sequence
  Description of Artificial Sequence: Synthetic oligonucleotide
  Antisense strand to SEQ ID NO: 898562
aaacucagucaugugguuc

SEQ ID NO: 898564 - RNA, 19 nt, Artificial Sequence
  Description of Artificial Sequence: Synthetic oligonucleotide
  Sense strand starting at position 3472 of SEQ ID NO: 588919
cugagucuuuggcuacuga

SEQ ID NO: 898565 - RNA, 19 nt, Artificial Sequence
  Description of Artificial Sequence: Synthetic oligonucleotide
  Antisense strand to SEQ ID NO: 898564
ucaguagccaaagacucag

SEQ ID NO: 898566 - RNA, 19 nt, Artificial Sequence
  Description of Artificial Sequence: Synthetic oligonucleotide
  Sense strand starting at position 3624 of SEQ ID NO: 588919
ccaauuaucagguguggga

SEQ ID NO: 898567 - RNA, 19 nt, Artificial Sequence
  Description of Artificial Sequence: Synthetic oligonucleotide
  Antisense strand to SEQ ID NO: 898566
ucccacaccugauaauugg

SEQ ID NO: 898568 - RNA, 19 nt, Artificial Sequence
  Description of Artificial Sequence: Synthetic oligonucleotide
  Sense strand starting at position 3733 of SEQ ID NO: 588919
ggcauaacuugccugggaa

SEQ ID NO: 898569 - RNA, 19 nt, Artificial Sequence
  Description of Artificial Sequence: Synthetic oligonucleotide
  Antisense strand to SEQ ID NO: 898568
uucccaggcaaguuaugcc

SEQ ID NO: 898570 - RNA, 19 nt, Artificial Sequence
  Description of Artificial Sequence: Synthetic oligonucleotide
  Sense strand starting at position 3734 of SEQ ID NO: 588919
gcauaacuugccugggaac

SEQ ID NO: 898571 - RNA, 19 nt, Artificial Sequence
  Description of Artificial Sequence: Synthetic oligonucleotide
  Antisense strand to SEQ ID NO: 898570
guucccaggcaaguuaugc

SEQ ID NO: 898572 - RNA, 19 nt, Artificial Sequence
  Description of Artificial Sequence: Synthetic oligonucleotide
  Sense strand starting at position 3736 of SEQ ID NO: 588919
auaacuugccugggaacuu

SEQ ID NO: 898573 - RNA, 19 nt, Artificial Sequence
  Description of Artificial Sequence: Synthetic oligonucleotide
  Antisense strand to SEQ ID NO: 898572
aaguucccaggcaaguuau

SEQ ID NO: 898574 - RNA, 19 nt, Artificial Sequence
  Description of Artificial Sequence: Synthetic oligonucleotide
  Sense strand starting at position 3893 of SEQ ID NO: 588919
uccauuugggcgugagcau

SEQ ID NO: 898575 - RNA, 19 nt, Artificial Sequence
  Description of Artificial Sequence: Synthetic oligonucleotide
  Antisense strand to SEQ ID NO: 898574
augcucacgcccaaaugga

SEQ ID NO: 898576 - RNA, 19 nt, Artificial Sequence
  Description of Artificial Sequence: Synthetic oligonucleotide
  Sense strand starting at position 3911 of SEQ ID NO: 588919
uggugagggcuuuaauuca

SEQ ID NO: 898577 - RNA, 19 nt, Artificial Sequence
  Description of Artificial Sequence: Synthetic oligonucleotide
  Antisense strand to SEQ ID NO: 898576
ugaauuaaagcccucacca

SEQ ID NO: 898578 - RNA, 19 nt, Artificial Sequence
  Description of Artificial Sequence: Synthetic oligonucleotide
  Sense strand starting at position 161 of SEQ ID NO: 588920
accuaugccuuucuaguua

SEQ ID NO: 898579 - RNA, 19 nt, Artificial Sequence
  Description of Artificial Sequence: Synthetic oligonucleotide
  Antisense strand to SEQ ID NO: 898578
uaacuagaaaggcauaggu

SEQ ID NO: 898580 - RNA, 19 nt, Artificial Sequence
  Description of Artificial Sequence: Synthetic oligonucleotide
  Sense strand starting at position 165 of SEQ ID NO: 588920
augccuuucuaguuacaga

SEQ ID NO: 898581 - RNA, 19 nt, Artificial Sequence
  Description of Artificial Sequence: Synthetic oligonucleotide
  Antisense strand to SEQ ID NO: 898580
ucuguaacuagaaaggcau

SEQ ID NO: 898582 - RNA, 19 nt, Artificial Sequence
  Description of Artificial Sequence: Synthetic oligonucleotide
  Sense strand starting at position 410 of SEQ ID NO: 588920
ucuacugauuucguucuca

SEQ ID NO: 898583 - RNA, 19 nt, Artificial Sequence
  Description of Artificial Sequence: Synthetic oligonucleotide
  Antisense strand to SEQ ID NO: 898582
ugagaacgaaaucaguaga

SEQ ID NO: 898584 - RNA, 19 nt, Artificial Sequence
  Description of Artificial Sequence: Synthetic oligonucleotide
  Sense strand starting at position 1311 of SEQ ID NO: 588920
gacggaauguccuccaucu

SEQ ID NO: 898585 - RNA, 19 nt, Artificial Sequence
  Description of Artificial Sequence: Synthetic oligonucleotide
  Antisense strand to SEQ ID NO: 898584
agauggaggacauuccguc

SEQ ID NO: 898586 - RNA, 19 nt, Artificial Sequence
  Description of Artificial Sequence: Synthetic oligonucleotide
  Sense strand starting at position 2399 of SEQ ID NO: 588920
gcgaaaugcacggaaacuu

SEQ ID NO: 898587 - RNA, 19 nt, Artificial Sequence
  Description of Artificial Sequence: Synthetic oligonucleotide
  Antisense strand to SEQ ID NO: 898586
aaguuuccgugcauuucgc

SEQ ID NO: 898588 - RNA, 19 nt, Artificial Sequence
  Description of Artificial Sequence: Synthetic oligonucleotide
  Sense strand starting at position 2407 of SEQ ID NO: 588920
cacggaaacuucguaacuu

SEQ ID NO: 898589 - RNA, 19 nt, Artificial Sequence
  Description of Artificial Sequence: Synthetic oligonucleotide
  Antisense strand to SEQ ID NO: 898588
aaguuacgaaguuuccgug

SEQ ID NO: 898590 - RNA, 19 nt, Artificial Sequence
  Description of Artificial Sequence: Synthetic oligonucleotide
  Sense strand starting at position 2791 of SEQ ID NO: 588920
uaaugaaccucgcugggau

SEQ ID NO: 898591 - RNA, 19 nt, Artificial Sequence
  Description of Artificial Sequence: Synthetic oligonucleotide
  Antisense strand to SEQ ID NO: 898590
aucccagcgagguucauua

SEQ ID NO: 898592 - RNA, 19 nt, Artificial Sequence
  Description of Artificial Sequence: Synthetic oligonucleotide
  Sense strand starting at position 2792 of SEQ ID NO: 588920
aaugaaccucgcugggauu

SEQ ID NO: 898593 - RNA, 19 nt, Artificial Sequence
  Description of Artificial Sequence: Synthetic oligonucleotide
  Antisense strand to SEQ ID NO: 898592
aaucccagcgagguucauu

SEQ ID NO: 898594 - RNA, 19 nt, Artificial Sequence
  Description of Artificial Sequence: Synthetic oligonucleotide
  Sense strand starting at position 2830 of SEQ ID NO: 588920
cucugaccuccuuaugguu

SEQ ID NO: 898595 - RNA, 19 nt, Artificial Sequence
  Description of Artificial Sequence: Synthetic oligonucleotide
  Antisense strand to SEQ ID NO: 898594
aaccauaaggaggucagag

SEQ ID NO: 898596 - RNA, 19 nt, Artificial Sequence
  Description of Artificial Sequence: Synthetic oligonucleotide
  Sense strand starting at position 2851 of SEQ ID NO: 588920
gucagacuuuggcugaaca

SEQ ID NO: 898597 - RNA, 19 nt, Artificial Sequence
  Description of Artificial Sequence: Synthetic oligonucleotide
  Antisense strand to SEQ ID NO: 898596
uguucagccaaagucugac

SEQ ID NO: 898598 - RNA, 19 nt, Artificial Sequence
  Description of Artificial Sequence: Synthetic oligonucleotide
  Sense strand starting at position 2905 of SEQ ID NO: 588920
gaauuaaagguucgcuuuc

SEQ ID NO: 898599 - RNA, 19 nt, Artificial Sequence
  Description of Artificial Sequence: Synthetic oligonucleotide
  Antisense strand to SEQ ID NO: 898598
gaaagcgaaccuuuaauuc

SEQ ID NO: 898600 - RNA, 19 nt, Artificial Sequence
  Description of Artificial Sequence: Synthetic oligonucleotide
  Sense strand starting at position 2907 of SEQ ID NO: 588920
auuaaagguucgcuuucua

SEQ ID NO: 898601 - RNA, 19 nt, Artificial Sequence
  Description of Artificial Sequence: Synthetic oligonucleotide
  Antisense strand to SEQ ID NO: 898600
uagaaagcgaaccuuuaau

SEQ ID NO: 898602 - RNA, 19 nt, Artificial Sequence
  Description of Artificial Sequence: Synthetic oligonucleotide
  Sense strand starting at position 2961 of SEQ ID NO: 588920
gcauucugcuugccaguau

SEQ ID NO: 898603 - RNA, 19 nt, Artificial Sequence
  Description of Artificial Sequence: Synthetic oligonucleotide
  Antisense strand to SEQ ID NO: 898602
auacuggcaagcagaaugc

SEQ ID NO: 898604 - RNA, 19 nt, Artificial Sequence
  Description of Artificial Sequence: Synthetic oligonucleotide
  Sense strand starting at position 2976 of SEQ ID NO: 588920
guauacagucccugcugua

SEQ ID NO: 898605 - RNA, 19 nt, Artificial Sequence
  Description of Artificial Sequence: Synthetic oligonucleotide
  Antisense strand to SEQ ID NO: 898604
uacagcagggacuguauac

SEQ ID NO: 898606 - RNA, 19 nt, Artificial Sequence
  Description of Artificial Sequence: Synthetic oligonucleotide
  Sense strand starting at position 3035 of SEQ ID NO: 588920
gagacaaugucuuugcccu

SEQ ID NO: 898607 - RNA, 19 nt, Artificial Sequence
  Description of Artificial Sequence: Synthetic oligonucleotide
  Antisense strand to SEQ ID NO: 898606
agggcaaagacauugucuc

SEQ ID NO: 898608 - RNA, 19 nt, Artificial Sequence
  Description of Artificial Sequence: Synthetic oligonucleotide
  Sense strand starting at position 3036 of SEQ ID NO: 588920
agacaaugucuuugcccua

SEQ ID NO: 898609 - RNA, 19 nt, Artificial Sequence
  Description of Artificial Sequence: Synthetic oligonucleotide
  Antisense strand to SEQ ID NO: 898608
uagggcaaagacauugucu

SEQ ID NO: 898610 - RNA, 19 nt, Artificial Sequence
  Description of Artificial Sequence: Synthetic oligonucleotide
  Sense strand starting at position 3041 of SEQ ID NO: 588920
augucuuugcccuaagaca

SEQ ID NO: 898611 - RNA, 19 nt, Artificial Sequence
  Description of Artificial Sequence: Synthetic oligonucleotide
  Antisense strand to SEQ ID NO: 898610
ugucuuagggcaaagacau

SEQ ID NO: 898612 - RNA, 19 nt, Artificial Sequence
  Description of Artificial Sequence: Synthetic oligonucleotide
  Sense strand starting at position 3268 of SEQ ID NO: 588920
gugaucuggccuuaagcuu

SEQ ID NO: 898613 - RNA, 19 nt, Artificial Sequence
  Description of Artificial Sequence: Synthetic oligonucleotide
  Antisense strand to SEQ ID NO: 898612
aagcuuaaggccagaucac

SEQ ID NO: 898614 - RNA, 19 nt, Artificial Sequence
  Description of Artificial Sequence: Synthetic oligonucleotide
  Sense strand starting at position 3353 of SEQ ID NO: 588920
caguacuguuguuuccaga

SEQ ID NO: 898615 - RNA, 19 nt, Artificial Sequence
  Description of Artificial Sequence: Synthetic oligonucleotide
  Antisense strand to SEQ ID NO: 898614
ucuggaaacaacaguacug

SEQ ID NO: 898616 - RNA, 19 nt, Artificial Sequence
  Description of Artificial Sequence: Synthetic oligonucleotide
  Sense strand starting at position 3369 of SEQ ID NO: 588920
agaguaugcccaggugugu

SEQ ID NO: 898617 - RNA, 19 nt, Artificial Sequence
  Description of Artificial Sequence: Synthetic oligonucleotide
  Antisense strand to SEQ ID NO: 898616
acacaccugggcauacucu

SEQ ID NO: 898618 - RNA, 19 nt, Artificial Sequence
  Description of Artificial Sequence: Synthetic oligonucleotide
  Sense strand starting at position 3390 of SEQ ID NO: 588920
gagccugagucuccugaga

SEQ ID NO: 898619 - RNA, 19 nt, Artificial Sequence
  Description of Artificial Sequence: Synthetic oligonucleotide
  Antisense strand to SEQ ID NO: 898618
ucucaggagacucaggcuc

SEQ ID NO: 898620 - RNA, 19 nt, Artificial Sequence
  Description of Artificial Sequence: Synthetic oligonucleotide
  Sense strand starting at position 3395 of SEQ ID NO: 588920
ugagucuccugagacagau

SEQ ID NO: 898621 - RNA, 19 nt, Artificial Sequence
  Description of Artificial Sequence: Synthetic oligonucleotide
  Antisense strand to SEQ ID NO: 898620
aucugucucaggagacuca

SEQ ID NO: 898622 - RNA, 19 nt, Artificial Sequence
  Description of Artificial Sequence: Synthetic oligonucleotide
  Sense strand starting at position 3494 of SEQ ID NO: 588920
uggguauccuuaucaauca

SEQ ID NO: 898623 - RNA, 19 nt, Artificial Sequence
  Description of Artificial Sequence: Synthetic oligonucleotide
  Antisense strand to SEQ ID NO: 898622
ugauugauaaggauaccca

SEQ ID NO: 898624 - RNA, 19 nt, Artificial Sequence
  Description of Artificial Sequence: Synthetic oligonucleotide
  Sense strand starting at position 3517 of SEQ ID NO: 588920
agaguauauucucuggaga

SEQ ID NO: 898625 - RNA, 19 nt, Artificial Sequence
  Description of Artificial Sequence: Synthetic oligonucleotide
  Antisense strand to SEQ ID NO: 898624
ucuccagagaauauacucu

SEQ ID NO: 898626 - RNA, 19 nt, Artificial Sequence
  Description of Artificial Sequence: Synthetic oligonucleotide
  Sense strand starting at position 3518 of SEQ ID NO: 588920
gaguauauucucuggagau

SEQ ID NO: 898627 - RNA, 19 nt, Artificial Sequence
  Description of Artificial Sequence: Synthetic oligonucleotide
  Antisense strand to SEQ ID NO: 898626
aucuccagagaauauacuc

SEQ ID NO: 898628 - RNA, 19 nt, Artificial Sequence
  Description of Artificial Sequence: Synthetic oligonucleotide
  Sense strand starting at position 3565 of SEQ ID NO: 588920
gcucccucggcuugaacau

SEQ ID NO: 898629 - RNA, 19 nt, Artificial Sequence
  Description of Artificial Sequence: Synthetic oligonucleotide
  Antisense strand to SEQ ID NO: 898628
auguucaagccgagggagc

SEQ ID NO: 898630 - RNA, 19 nt, Artificial Sequence
  Description of Artificial Sequence: Synthetic oligonucleotide
  Sense strand starting at position 3587 of SEQ ID NO: 588920
ccuguuaagcuauauguau

SEQ ID NO: 898631 - RNA, 19 nt, Artificial Sequence
  Description of Artificial Sequence: Synthetic oligonucleotide
  Antisense strand to SEQ ID NO: 898630
auacauauagcuuaacagg

SEQ ID NO: 898632 - RNA, 19 nt, Artificial Sequence
  Description of Artificial Sequence: Synthetic oligonucleotide
  Sense strand starting at position 3594 of SEQ ID NO: 588920
agcuauauguauucucaug

SEQ ID NO: 898633 - RNA, 19 nt, Artificial Sequence
  Description of Artificial Sequence: Synthetic oligonucleotide
  Antisense strand to SEQ ID NO: 898632
caugagaauacauauagcu

SEQ ID NO: 898634 - RNA, 19 nt, Artificial Sequence
  Description of Artificial Sequence: Synthetic oligonucleotide
  Sense strand starting at position 3600 of SEQ ID NO: 588920
auguauucucauggcacua

SEQ ID NO: 898635 - RNA, 19 nt, Artificial Sequence
  Description of Artificial Sequence: Synthetic oligonucleotide
  Antisense strand to SEQ ID NO: 898634
uagugccaugagaauacau

SEQ ID NO: 898636 - RNA, 19 nt, Artificial Sequence
  Description of Artificial Sequence: Synthetic oligonucleotide
  Sense strand starting at position 3610 of SEQ ID NO: 588920
auggcacuagauuguaauu

SEQ ID NO: 898637 - RNA, 19 nt, Artificial Sequence
  Description of Artificial Sequence: Synthetic oligonucleotide
  Antisense strand to SEQ ID NO: 898636
aauuacaaucuagugccau

SEQ ID NO: 898638 - RNA, 19 nt, Artificial Sequence
  Description of Artificial Sequence: Synthetic oligonucleotide
  Sense strand starting at position 3692 of SEQ ID NO: 588920
aaguguguuagggaagacu

SEQ ID NO: 898639 - RNA, 19 nt, Artificial Sequence
  Description of Artificial Sequence: Synthetic oligonucleotide
  Antisense strand to SEQ ID NO: 898638
agucuucccuaacacacuu

SEQ ID NO: 898640 - RNA, 19 nt, Artificial Sequence
  Description of Artificial Sequence: Synthetic oligonucleotide
  Sense strand starting at position 3750 of SEQ ID NO: 588920
guaggaugcccauaaguau

SEQ ID NO: 898641 - RNA, 19 nt, Artificial Sequence
  Description of Artificial Sequence: Synthetic oligonucleotide
  Antisense strand to SEQ ID NO: 898640
auacuuaugggcauccuac

SEQ ID NO: 898642 - RNA, 19 nt, Artificial Sequence
  Description of Artificial Sequence: Synthetic oligonucleotide
  Sense strand starting at position 3782 of SEQ ID NO: 588920
ggcgccacacuguaaagau

SEQ ID NO: 898643 - RNA, 19 nt, Artificial Sequence
  Description of Artificial Sequence: Synthetic oligonucleotide
  Antisense strand to SEQ ID NO: 898642
aucuuuacaguguggcgcc

SEQ ID NO: 898644 - RNA, 19 nt, Artificial Sequence
  Description of Artificial Sequence: Synthetic oligonucleotide
  Sense strand starting at position 3812 of SEQ ID NO: 588920
gcacacuagcugugugauc

SEQ ID NO: 898645 - RNA, 19 nt, Artificial Sequence
  Description of Artificial Sequence: Synthetic oligonucleotide
  Antisense strand to SEQ ID NO: 898644
gaucacacagcuagugugc

SEQ ID NO: 898646 - RNA, 19 nt, Artificial Sequence
  Description of Artificial Sequence: Synthetic oligonucleotide
  Sense strand starting at position 3842 of SEQ ID NO: 588920
aucucucuagucuaaguuu

SEQ ID NO: 898647 - RNA, 19 nt, Artificial Sequence
  Description of Artificial Sequence: Synthetic oligonucleotide
  Antisense strand to SEQ ID NO: 898646
aaacuuagacuagagagau

SEQ ID NO: 898648 - RNA, 19 nt, Artificial Sequence
  Description of Artificial Sequence: Synthetic oligonucleotide
  Sense strand starting at position 3845 of SEQ ID NO: 588920
ucucuagucuaaguuuacu

SEQ ID NO: 898649 - RNA, 19 nt, Artificial Sequence
  Description of Artificial Sequence: Synthetic oligonucleotide
  Antisense strand to SEQ ID NO: 898648
aguaaacuuagacuagaga

SEQ ID NO: 898650 - RNA, 19 nt, Artificial Sequence
  Description of Artificial Sequence: Synthetic oligonucleotide
  Sense strand starting at position 3850 of SEQ ID NO: 588920
agucuaaguuuacucaucu

SEQ ID NO: 898651 - RNA, 19 nt, Artificial Sequence
  Description of Artificial Sequence: Synthetic oligonucleotide
  Antisense strand to SEQ ID NO: 898650
agaugaguaaacuuagacu

SEQ ID NO: 898652 - RNA, 19 nt, Artificial Sequence
  Description of Artificial Sequence: Synthetic oligonucleotide
  Sense strand starting at position 3872 of SEQ ID NO: 588920
aagugagacuaauaguauu

SEQ ID NO: 898653 - RNA, 19 nt, Artificial Sequence
  Description of Artificial Sequence: Synthetic oligonucleotide
  Antisense strand to SEQ ID NO: 898652
aauacuauuagucucacuu

SEQ ID NO: 898654 - RNA, 19 nt, Artificial Sequence
  Description of Artificial Sequence: Synthetic oligonucleotide
  Sense strand starting at position 3919 of SEQ ID NO: 588920
auugcaaccguauaucuaa

SEQ ID NO: 898655 - RNA, 19 nt, Artificial Sequence
  Description of Artificial Sequence: Synthetic oligonucleotide
  Antisense strand to SEQ ID NO: 898654
uuagauauacgguugcaau

SEQ ID NO: 898656 - RNA, 19 nt, Artificial Sequence
  Description of Artificial Sequence: Synthetic oligonucleotide
  Sense strand starting at position 3954 of SEQ ID NO: 588920
uccagcacuugguuacauu

SEQ ID NO: 898657 - RNA, 19 nt, Artificial Sequence
  Description of Artificial Sequence: Synthetic oligonucleotide
  Antisense strand to SEQ ID NO: 898656
aauguaaccaagugcugga

SEQ ID NO: 898658 - RNA, 19 nt, Artificial Sequence
  Description of Artificial Sequence: Synthetic oligonucleotide
  Sense strand starting at position 173 of SEQ ID NO: 588921
accuaugccuuucuaguua

SEQ ID NO: 898659 - RNA, 19 nt, Artificial Sequence
  Description of Artificial Sequence: Synthetic oligonucleotide
  Antisense strand to SEQ ID NO: 898658
uaacuagaaaggcauaggu

SEQ ID NO: 898660 - RNA, 19 nt, Artificial Sequence
  Description of Artificial Sequence: Synthetic oligonucleotide
  Sense strand starting at position 177 of SEQ ID NO: 588921
augccuuucuaguuacaga

SEQ ID NO: 898661 - RNA, 19 nt, Artificial Sequence
  Description of Artificial Sequence: Synthetic oligonucleotide
  Antisense strand to SEQ ID NO: 898660
ucuguaacuagaaaggcau

SEQ ID NO: 898662 - RNA, 19 nt, Artificial Sequence
  Description of Artificial Sequence: Synthetic oligonucleotide
  Sense strand starting at position 422 of SEQ ID NO: 588921
ucuacugauuucguucuca

SEQ ID NO: 898663 - RNA, 19 nt, Artificial Sequence
  Description of Artificial Sequence: Synthetic oligonucleotide
  Antisense strand to SEQ ID NO: 898662
ugagaacgaaaucaguaga

SEQ ID NO: 898664 - RNA, 19 nt, Artificial Sequence
  Description of Artificial Sequence: Synthetic oligonucleotide
  Sense strand starting at position 1323 of SEQ ID NO: 588921
gacggaauguccuccaucu

SEQ ID NO: 898665 - RNA, 19 nt, Artificial Sequence
  Description of Artificial Sequence: Synthetic oligonucleotide
  Antisense strand to SEQ ID NO: 898664
agauggaggacauuccguc

SEQ ID NO: 898666 - RNA, 19 nt, Artificial Sequence
  Description of Artificial Sequence: Synthetic oligonucleotide
  Sense strand starting at position 2411 of SEQ ID NO: 588921
gcgaaaugcacggaaacuu

SEQ ID NO: 898667 - RNA, 19 nt, Artificial Sequence
  Description of Artificial Sequence: Synthetic oligonucleotide
  Antisense strand to SEQ ID NO: 898666
aaguuuccgugcauuucgc

SEQ ID NO: 898668 - RNA, 19 nt, Artificial Sequence
  Description of Artificial Sequence: Synthetic oligonucleotide
  Sense strand starting at position 2419 of SEQ ID NO: 588921
cacggaaacuucguaacuu

SEQ ID NO: 898669 - RNA, 19 nt, Artificial Sequence
  Description of Artificial Sequence: Synthetic oligonucleotide
  Antisense strand to SEQ ID NO: 898668
aaguuacgaaguuuccgug

SEQ ID NO: 898670 - RNA, 19 nt, Artificial Sequence
  Description of Artificial Sequence: Synthetic oligonucleotide
  Sense strand starting at position 2803 of SEQ ID NO: 588921
uaaugaaccucgcugggau

SEQ ID NO: 898671 - RNA, 19 nt, Artificial Sequence
  Description of Artificial Sequence: Synthetic oligonucleotide
  Antisense strand to SEQ ID NO: 898670
aucccagcgagguucauua

SEQ ID NO: 898672 - RNA, 19 nt, Artificial Sequence
  Description of Artificial Sequence: Synthetic oligonucleotide
  Sense strand starting at position 2804 of SEQ ID NO: 588921
aaugaaccucgcugggauu

SEQ ID NO: 898673 - RNA, 19 nt, Artificial Sequence
  Description of Artificial Sequence: Synthetic oligonucleotide
  Antisense strand to SEQ ID NO: 898672
aaucccagcgagguucauu

SEQ ID NO: 898674 - RNA, 19 nt, Artificial Sequence
  Description of Artificial Sequence: Synthetic oligonucleotide
  Sense strand starting at position 2842 of SEQ ID NO: 588921
cucugaccuccuuaugguu

SEQ ID NO: 898675 - RNA, 19 nt, Artificial Sequence
  Description of Artificial Sequence: Synthetic oligonucleotide
  Antisense strand to SEQ ID NO: 898674
aaccauaaggaggucagag

SEQ ID NO: 898676 - RNA, 19 nt, Artificial Sequence
  Description of Artificial Sequence: Synthetic oligonucleotide
  Sense strand starting at position 2863 of SEQ ID NO: 588921
gucagacuuuggcugaaca

SEQ ID NO: 898677 - RNA, 19 nt, Artificial Sequence
  Description of Artificial Sequence: Synthetic oligonucleotide
  Antisense strand to SEQ ID NO: 898676
uguucagccaaagucugac

SEQ ID NO: 898678 - RNA, 19 nt, Artificial Sequence
  Description of Artificial Sequence: Synthetic oligonucleotide
  Sense strand starting at position 2917 of SEQ ID NO: 588921
gaauuaaagguucgcuuuc

SEQ ID NO: 898679 - RNA, 19 nt, Artificial Sequence
  Description of Artificial Sequence: Synthetic oligonucleotide
  Antisense strand to SEQ ID NO: 898678
gaaagcgaaccuuuaauuc

SEQ ID NO: 898680 - RNA, 19 nt, Artificial Sequence
  Description of Artificial Sequence: Synthetic oligonucleotide
  Sense strand starting at position 2919 of SEQ ID NO: 588921
auuaaagguucgcuuucua

SEQ ID NO: 898681 - RNA, 19 nt, Artificial Sequence
  Description of Artificial Sequence: Synthetic oligonucleotide
  Antisense strand to SEQ ID NO: 898680
uagaaagcgaaccuuuaau

SEQ ID NO: 898682 - RNA, 19 nt, Artificial Sequence
  Description of Artificial Sequence: Synthetic oligonucleotide
  Sense strand starting at position 2973 of SEQ ID NO: 588921
gcauucugcuugccaguau

SEQ ID NO: 898683 - RNA, 19 nt, Artificial Sequence
  Description of Artificial Sequence: Synthetic oligonucleotide
  Antisense strand to SEQ ID NO: 898682
auacuggcaagcagaaugc

SEQ ID NO: 898684 - RNA, 19 nt, Artificial Sequence
  Description of Artificial Sequence: Synthetic oligonucleotide
  Sense strand starting at position 2988 of SEQ ID NO: 588921
guauacagucccugcugua

SEQ ID NO: 898685 - RNA, 19 nt, Artificial Sequence
  Description of Artificial Sequence: Synthetic oligonucleotide
  Antisense strand to SEQ ID NO: 898684
uacagcagggacuguauac

SEQ ID NO: 898686 - RNA, 19 nt, Artificial Sequence
  Description of Artificial Sequence: Synthetic oligonucleotide
  Sense strand starting at position 3047 of SEQ ID NO: 588921
gagacaaugucuuugcccu

SEQ ID NO: 898687 - RNA, 19 nt, Artificial Sequence
  Description of Artificial Sequence: Synthetic oligonucleotide
  Antisense strand to SEQ ID NO: 898686
agggcaaagacauugucuc

SEQ ID NO: 898688 - RNA, 19 nt, Artificial Sequence
  Description of Artificial Sequence: Synthetic oligonucleotide
  Sense strand starting at position 3048 of SEQ ID NO: 588921
agacaaugucuuugcccua

SEQ ID NO: 898689 - RNA, 19 nt, Artificial Sequence
  Description of Artificial Sequence: Synthetic oligonucleotide
  Antisense strand to SEQ ID NO: 898688
uagggcaaagacauugucu

SEQ ID NO: 898690 - RNA, 19 nt, Artificial Sequence
  Description of Artificial Sequence: Synthetic oligonucleotide
  Sense strand starting at position 3053 of SEQ ID NO: 588921
augucuuugcccuaagaca

SEQ ID NO: 898691 - RNA, 19 nt, Artificial Sequence
  Description of Artificial Sequence: Synthetic oligonucleotide
  Antisense strand to SEQ ID NO: 898690
ugucuuagggcaaagacau

SEQ ID NO: 898692 - RNA, 19 nt, Artificial Sequence
  Description of Artificial Sequence: Synthetic oligonucleotide
  Sense strand starting at position 3280 of SEQ ID NO: 588921
gugaucuggccuuaagcuu

SEQ ID NO: 898693 - RNA, 19 nt, Artificial Sequence
  Description of Artificial Sequence: Synthetic oligonucleotide
  Antisense strand to SEQ ID NO: 898692
aagcuuaaggccagaucac

SEQ ID NO: 898694 - RNA, 19 nt, Artificial Sequence
  Description of Artificial Sequence: Synthetic oligonucleotide
  Sense strand starting at position 3365 of SEQ ID NO: 588921
caguacuguuguuuccaga

SEQ ID NO: 898695 - RNA, 19 nt, Artificial Sequence
  Description of Artificial Sequence: Synthetic oligonucleotide
  Antisense strand to SEQ ID NO: 898694
ucuggaaacaacaguacug

SEQ ID NO: 898696 - RNA, 19 nt, Artificial Sequence
  Description of Artificial Sequence: Synthetic oligonucleotide
  Sense strand starting at position 3381 of SEQ ID NO: 588921
agaguaugcccaggugugu

SEQ ID NO: 898697 - RNA, 19 nt, Artificial Sequence
  Description of Artificial Sequence: Synthetic oligonucleotide
  Antisense strand to SEQ ID NO: 898696
acacaccugggcauacucu

SEQ ID NO: 898698 - RNA, 19 nt, Artificial Sequence
  Description of Artificial Sequence: Synthetic oligonucleotide
  Sense strand starting at position 3402 of SEQ ID NO: 588921
gagccugagucuccugaga

SEQ ID NO: 898699 - RNA, 19 nt, Artificial Sequence
  Description of Artificial Sequence: Synthetic oligonucleotide
  Antisense strand to SEQ ID NO: 898698
ucucaggagacucaggcuc

SEQ ID NO: 898700 - RNA, 19 nt, Artificial Sequence
  Description of Artificial Sequence: Synthetic oligonucleotide
  Sense strand starting at position 3407 of SEQ ID NO: 588921
ugagucuccugagacagau

SEQ ID NO: 898701 - RNA, 19 nt, Artificial Sequence
  Description of Artificial Sequence: Synthetic oligonucleotide
  Antisense strand to SEQ ID NO: 898700
aucugucucaggagacuca

SEQ ID NO: 898702 - RNA, 19 nt, Artificial Sequence
  Description of Artificial Sequence: Synthetic oligonucleotide
  Sense strand starting at position 3506 of SEQ ID NO: 588921
uggguauccuuaucaauca

SEQ ID NO: 898703 - RNA, 19 nt, Artificial Sequence
  Description of Artificial Sequence: Synthetic oligonucleotide
  Antisense strand to SEQ ID NO: 898702
ugauugauaaggauaccca

SEQ ID NO: 898704 - RNA, 19 nt, Artificial Sequence
  Description of Artificial Sequence: Synthetic oligonucleotide
  Sense strand starting at position 3529 of SEQ ID NO: 588921
agaguauauucucuggaga

SEQ ID NO: 898705 - RNA, 19 nt, Artificial Sequence
  Description of Artificial Sequence: Synthetic oligonucleotide
  Antisense strand to SEQ ID NO: 898704
ucuccagagaauauacucu

SEQ ID NO: 898706 - RNA, 19 nt, Artificial Sequence
  Description of Artificial Sequence: Synthetic oligonucleotide
  Sense strand starting at position 3530 of SEQ ID NO: 588921
gaguauauucucuggagau

SEQ ID NO: 898707 - RNA, 19 nt, Artificial Sequence
  Description of Artificial Sequence: Synthetic oligonucleotide
  Antisense strand to SEQ ID NO: 898706
aucuccagagaauauacuc

SEQ ID NO: 898708 - RNA, 19 nt, Artificial Sequence
  Description of Artificial Sequence: Synthetic oligonucleotide
  Sense strand starting at position 3577 of SEQ ID NO: 588921
gcucccucggcuugaacau

SEQ ID NO: 898709 - RNA, 19 nt, Artificial Sequence
  Description of Artificial Sequence: Synthetic oligonucleotide
  Antisense strand to SEQ ID NO: 898708
auguucaagccgagggagc

SEQ ID NO: 898710 - RNA, 19 nt, Artificial Sequence
  Description of Artificial Sequence: Synthetic oligonucleotide
  Sense strand starting at position 3599 of SEQ ID NO: 588921
ccuguuaagcuauauguau

SEQ ID NO: 898711 - RNA, 19 nt, Artificial Sequence
  Description of Artificial Sequence: Synthetic oligonucleotide
  Antisense strand to SEQ ID NO: 898710
auacauauagcuuaacagg

SEQ ID NO: 898712 - RNA, 19 nt, Artificial Sequence
  Description of Artificial Sequence: Synthetic oligonucleotide
  Sense strand starting at position 3606 of SEQ ID NO: 588921
agcuauauguauucucaug

SEQ ID NO: 898713 - RNA, 19 nt, Artificial Sequence
  Description of Artificial Sequence: Synthetic oligonucleotide
  Antisense strand to SEQ ID NO: 898712
caugagaauacauauagcu

SEQ ID NO: 898714 - RNA, 19 nt, Artificial Sequence
  Description of Artificial Sequence: Synthetic oligonucleotide
  Sense strand starting at position 3612 of SEQ ID NO: 588921
auguauucucauggcacua

SEQ ID NO: 898715 - RNA, 19 nt, Artificial Sequence
  Description of Artificial Sequence: Synthetic oligonucleotide
  Antisense strand to SEQ ID NO: 898714
uagugccaugagaauacau

SEQ ID NO: 898716 - RNA, 19 nt, Artificial Sequence
  Description of Artificial Sequence: Synthetic oligonucleotide
  Sense strand starting at position 3622 of SEQ ID NO: 588921
auggcacuagauuguaauu

SEQ ID NO: 898717 - RNA, 19 nt, Artificial Sequence
  Description of Artificial Sequence: Synthetic oligonucleotide
  Antisense strand to SEQ ID NO: 898716
aauuacaaucuagugccau

SEQ ID NO: 898718 - RNA, 19 nt, Artificial Sequence
  Description of Artificial Sequence: Synthetic oligonucleotide
  Sense strand starting at position 3704 of SEQ ID NO: 588921
aaguguguuagggaagacu

SEQ ID NO: 898719 - RNA, 19 nt, Artificial Sequence
  Description of Artificial Sequence: Synthetic oligonucleotide
  Antisense strand to SEQ ID NO: 898718
agucuucccuaacacacuu

SEQ ID NO: 898720 - RNA, 19 nt, Artificial Sequence
  Description of Artificial Sequence: Synthetic oligonucleotide
  Sense strand starting at position 3762 of SEQ ID NO: 588921
guaggaugcccauaaguau

SEQ ID NO: 898721 - RNA, 19 nt, Artificial Sequence
  Description of Artificial Sequence: Synthetic oligonucleotide
  Antisense strand to SEQ ID NO: 898720
auacuuaugggcauccuac

SEQ ID NO: 898722 - RNA, 19 nt, Artificial Sequence
  Description of Artificial Sequence: Synthetic oligonucleotide
  Sense strand starting at position 3794 of SEQ ID NO: 588921
ggcgccacacuguaaagau

SEQ ID NO: 898723 - RNA, 19 nt, Artificial Sequence
  Description of Artificial Sequence: Synthetic oligonucleotide
  Antisense strand to SEQ ID NO: 898722
aucuuuacaguguggcgcc

SEQ ID NO: 898724 - RNA, 19 nt, Artificial Sequence
  Description of Artificial Sequence: Synthetic oligonucleotide
  Sense strand starting at position 3824 of SEQ ID NO: 588921
gcacacuagcugugugauc

SEQ ID NO: 898725 - RNA, 19 nt, Artificial Sequence
  Description of Artificial Sequence: Synthetic oligonucleotide
  Antisense strand to SEQ ID NO: 898724
gaucacacagcuagugugc

SEQ ID NO: 898726 - RNA, 19 nt, Artificial Sequence
  Description of Artificial Sequence: Synthetic oligonucleotide
  Sense strand starting at position 3854 of SEQ ID NO: 588921
aucucucuagucuaaguuu

SEQ ID NO: 898727 - RNA, 19 nt, Artificial Sequence
  Description of Artificial Sequence: Synthetic oligonucleotide
  Antisense strand to SEQ ID NO: 898726
aaacuuagacuagagagau

SEQ ID NO: 898728 - RNA, 19 nt, Artificial Sequence
  Description of Artificial Sequence: Synthetic oligonucleotide
  Sense strand starting at position 3857 of SEQ ID NO: 588921
ucucuagucuaaguuuacu

SEQ ID NO: 898729 - RNA, 19 nt, Artificial Sequence
  Description of Artificial Sequence: Synthetic oligonucleotide
  Antisense strand to SEQ ID NO: 898728
aguaaacuuagacuagaga

SEQ ID NO: 898730 - RNA, 19 nt, Artificial Sequence
  Description of Artificial Sequence: Synthetic oligonucleotide
  Sense strand starting at position 3862 of SEQ ID NO: 588921
agucuaaguuuacucaucu

SEQ ID NO: 898731 - RNA, 19 nt, Artificial Sequence
  Description of Artificial Sequence: Synthetic oligonucleotide
  Antisense strand to SEQ ID NO: 898730
agaugaguaaacuuagacu

SEQ ID NO: 898732 - RNA, 19 nt, Artificial Sequence
  Description of Artificial Sequence: Synthetic oligonucleotide
  Sense strand starting at position 3884 of SEQ ID NO: 588921
aagugagacuaauaguauu

SEQ ID NO: 898733 - RNA, 19 nt, Artificial Sequence
  Description of Artificial Sequence: Synthetic oligonucleotide
  Antisense strand to SEQ ID NO: 898732
aauacuauuagucucacuu

SEQ ID NO: 898734 - RNA, 19 nt, Artificial Sequence
  Description of Artificial Sequence: Synthetic oligonucleotide
  Sense strand starting at position 3931 of SEQ ID NO: 588921
auugcaaccguauaucuaa

SEQ ID NO: 898735 - RNA, 19 nt, Artificial Sequence
  Description of Artificial Sequence: Synthetic oligonucleotide
  Antisense strand to SEQ ID NO: 898734
uuagauauacgguugcaau

SEQ ID NO: 898736 - RNA, 19 nt, Artificial Sequence
  Description of Artificial Sequence: Synthetic oligonucleotide
  Sense strand starting at position 3966 of SEQ ID NO: 588921
uccagcacuugguuacauu

SEQ ID NO: 898737 - RNA, 19 nt, Artificial Sequence
  Description of Artificial Sequence: Synthetic oligonucleotide
  Antisense strand to SEQ ID NO: 898736
aauguaaccaagugcugga

SEQ ID NO: 898738 - RNA, 19 nt, Artificial Sequence
  Description of Artificial Sequence: Synthetic oligonucleotide
  Sense strand starting at position 201 of SEQ ID NO: 588922
gcagcucauccuuacagaa

SEQ ID NO: 898739 - RNA, 19 nt, Artificial Sequence
  Description of Artificial Sequence: Synthetic oligonucleotide
  Antisense strand to SEQ ID NO: 898738
uucuguaaggaugagcugc

SEQ ID NO: 898740 - RNA, 19 nt, Artificial Sequence
  Description of Artificial Sequence: Synthetic oligonucleotide
  Sense strand starting at position 279 of SEQ ID NO: 588922
auaauaauugcugaaggca

SEQ ID NO: 898741 - RNA, 19 nt, Artificial Sequence
  Description of Artificial Sequence: Synthetic oligonucleotide
  Antisense strand to SEQ ID NO: 898740
ugccuucagcaauuauuau

SEQ ID NO: 898742 - RNA, 19 nt, Artificial Sequence
  Description of Artificial Sequence: Synthetic oligonucleotide
  Sense strand starting at position 301 of SEQ ID NO: 588922
uccaccaauggaugugaaa

SEQ ID NO: 898743 - RNA, 19 nt, Artificial Sequence
  Description of Artificial Sequence: Synthetic oligonucleotide
  Antisense strand to SEQ ID NO: 898742
uuucacauccauuggugga

SEQ ID NO: 898744 - RNA, 19 nt, Artificial Sequence
  Description of Artificial Sequence: Synthetic oligonucleotide
  Sense strand starting at position 304 of SEQ ID NO: 588922
accaauggaugugaaauuu

SEQ ID NO: 898745 - RNA, 19 nt, Artificial Sequence
  Description of Artificial Sequence: Synthetic oligonucleotide
  Antisense strand to SEQ ID NO: 898744
aaauuucacauccauuggu

SEQ ID NO: 898746 - RNA, 19 nt, Artificial Sequence
  Description of Artificial Sequence: Synthetic oligonucleotide
  Sense strand starting at position 313 of SEQ ID NO: 588922
ugugaaauuuagcaaggga

SEQ ID NO: 898747 - RNA, 19 nt, Artificial Sequence
  Description of Artificial Sequence: Synthetic oligonucleotide
  Antisense strand to SEQ ID NO: 898746
ucccuugcuaaauuucaca

SEQ ID NO: 898748 - RNA, 19 nt, Artificial Sequence
  Description of Artificial Sequence: Synthetic oligonucleotide
  Sense strand starting at position 441 of SEQ ID NO: 588922
ucuaccaagugaucaagau

SEQ ID NO: 898749 - RNA, 19 nt, Artificial Sequence
  Description of Artificial Sequence: Synthetic oligonucleotide
  Antisense strand to SEQ ID NO: 898748
aucuugaucacuugguaga

SEQ ID NO: 898750 - RNA, 19 nt, Artificial Sequence
  Description of Artificial Sequence: Synthetic oligonucleotide
  Sense strand starting at position 487 of SEQ ID NO: 588922
aucagcuaugcucauauga

SEQ ID NO: 898751 - RNA, 19 nt, Artificial Sequence
  Description of Artificial Sequence: Synthetic oligonucleotide
  Antisense strand to SEQ ID NO: 898750
ucauaugagcauagcugau

SEQ ID NO: 898752 - RNA, 19 nt, Artificial Sequence
  Description of Artificial Sequence: Synthetic oligonucleotide
  Sense strand starting at position 670 of SEQ ID NO: 588922
aaagacuaucaguguaaag

SEQ ID NO: 898753 - RNA, 19 nt, Artificial Sequence
  Description of Artificial Sequence: Synthetic oligonucleotide
  Antisense strand to SEQ ID NO: 898752
cuuuacacugauagucuuu

SEQ ID NO: 898754 - RNA, 19 nt, Artificial Sequence
  Description of Artificial Sequence: Synthetic oligonucleotide
  Sense strand starting at position 760 of SEQ ID NO: 588922
ggucuuagaguggauccua

SEQ ID NO: 898755 - RNA, 19 nt, Artificial Sequence
  Description of Artificial Sequence: Synthetic oligonucleotide
  Antisense strand to SEQ ID NO: 898754
uaggauccacucuaagacc

SEQ ID NO: 898756 - RNA, 19 nt, Artificial Sequence
  Description of Artificial Sequence: Synthetic oligonucleotide
  Sense strand starting at position 894 of SEQ ID NO: 588922
auuauuaauggaggcaaua

SEQ ID NO: 898757 - RNA, 19 nt, Artificial Sequence
  Description of Artificial Sequence: Synthetic oligonucleotide
  Antisense strand to SEQ ID NO: 898756
uauugccuccauuaauaau

SEQ ID NO: 898758 - RNA, 19 nt, Artificial Sequence
  Description of Artificial Sequence: Synthetic oligonucleotide
  Sense strand starting at position 978 of SEQ ID NO: 588922
uuuaguauaagaggauguu

SEQ ID NO: 898759 - RNA, 19 nt, Artificial Sequence
  Description of Artificial Sequence: Synthetic oligonucleotide
  Antisense strand to SEQ ID NO: 898758
aacauccucuuauacuaaa

SEQ ID NO: 898760 - RNA, 19 nt, Artificial Sequence
  Description of Artificial Sequence: Synthetic oligonucleotide
  Sense strand starting at position 1050 of SEQ ID NO: 588922
cugcauuaauacuuggaga

SEQ ID NO: 898761 - RNA, 19 nt, Artificial Sequence
  Description of Artificial Sequence: Synthetic oligonucleotide
  Antisense strand to SEQ ID NO: 898760
ucuccaaguauuaaugcag

SEQ ID NO: 898762 - RNA, 19 nt, Artificial Sequence
  Description of Artificial Sequence: Synthetic oligonucleotide
  Sense strand starting at position 1051 of SEQ ID NO: 588922
ugcauuaauacuuggagag

SEQ ID NO: 898763 - RNA, 19 nt, Artificial Sequence
  Description of Artificial Sequence: Synthetic oligonucleotide
  Antisense strand to SEQ ID NO: 898762
cucuccaaguauuaaugca

SEQ ID NO: 898764 - RNA, 19 nt, Artificial Sequence
  Description of Artificial Sequence: Synthetic oligonucleotide
  Sense strand starting at position 1052 of SEQ ID NO: 588922
gcauuaauacuuggagaga

SEQ ID NO: 898765 - RNA, 19 nt, Artificial Sequence
  Description of Artificial Sequence: Synthetic oligonucleotide
  Antisense strand to SEQ ID NO: 898764
ucucuccaaguauuaaugc

SEQ ID NO: 898766 - RNA, 19 nt, Artificial Sequence
  Description of Artificial Sequence: Synthetic oligonucleotide
  Sense strand starting at position 1109 of SEQ ID NO: 588922
ucauguagugcuuacaacu

SEQ ID NO: 898767 - RNA, 19 nt, Artificial Sequence
  Description of Artificial Sequence: Synthetic oligonucleotide
  Antisense strand to SEQ ID NO: 898766
aguuguaagcacuacauga

SEQ ID NO: 898768 - RNA, 19 nt, Artificial Sequence
  Description of Artificial Sequence: Synthetic oligonucleotide
  Sense strand starting at position 1140 of SEQ ID NO: 588922
guaccauaauacucauguu

SEQ ID NO: 898769 - RNA, 19 nt, Artificial Sequence
  Description of Artificial Sequence: Synthetic oligonucleotide
  Antisense strand to SEQ ID NO: 898768
aacaugaguauuaugguac

SEQ ID NO: 898770 - RNA, 19 nt, Artificial Sequence
  Description of Artificial Sequence: Synthetic oligonucleotide
  Sense strand starting at position 1160 of SEQ ID NO: 588922
cccaguaaguuacuuagga

SEQ ID NO: 898771 - RNA, 19 nt, Artificial Sequence
  Description of Artificial Sequence: Synthetic oligonucleotide
  Antisense strand to SEQ ID NO: 898770
uccuaaguaacuuacuggg

SEQ ID NO: 898772 - RNA, 19 nt, Artificial Sequence
  Description of Artificial Sequence: Synthetic oligonucleotide
  Sense strand starting at position 1167 of SEQ ID NO: 588922
aguuacuuaggagguuauu

SEQ ID NO: 898773 - RNA, 19 nt, Artificial Sequence
  Description of Artificial Sequence: Synthetic oligonucleotide
  Antisense strand to SEQ ID NO: 898772
aauaaccuccuaaguaacu

SEQ ID NO: 898774 - RNA, 19 nt, Artificial Sequence
  Description of Artificial Sequence: Synthetic oligonucleotide
  Sense strand starting at position 1179 of SEQ ID NO: 588922
gguuauuaauaagugaaag

SEQ ID NO: 898775 - RNA, 19 nt, Artificial Sequence
  Description of Artificial Sequence: Synthetic oligonucleotide
  Antisense strand to SEQ ID NO: 898774
cuuucacuuauuaauaacc

SEQ ID NO: 898776 - RNA, 19 nt, Artificial Sequence
  Description of Artificial Sequence: Synthetic oligonucleotide
  Sense strand starting at position 1359 of SEQ ID NO: 588922
aguaaagucuccucucuga

SEQ ID NO: 898777 - RNA, 19 nt, Artificial Sequence
  Description of Artificial Sequence: Synthetic oligonucleotide
  Antisense strand to SEQ ID NO: 898776
ucagagaggagacuuuacu

SEQ ID NO: 898778 - RNA, 19 nt, Artificial Sequence
  Description of Artificial Sequence: Synthetic oligonucleotide
  Sense strand starting at position 2074 of SEQ ID NO: 588922
cgcacaggugaguacaaau

SEQ ID NO: 898779 - RNA, 19 nt, Artificial Sequence
  Description of Artificial Sequence: Synthetic oligonucleotide
  Antisense strand to SEQ ID NO: 898778
auuuguacucaccugugcg

SEQ ID NO: 898780 - RNA, 19 nt, Artificial Sequence
  Description of Artificial Sequence: Synthetic oligonucleotide
  Sense strand starting at position 2586 of SEQ ID NO: 588922
ccaacuggguguccuaauu

SEQ ID NO: 898781 - RNA, 19 nt, Artificial Sequence
  Description of Artificial Sequence: Synthetic oligonucleotide
  Antisense strand to SEQ ID NO: 898780
aauuaggacacccaguugg

SEQ ID NO: 898782 - RNA, 19 nt, Artificial Sequence
  Description of Artificial Sequence: Synthetic oligonucleotide
  Sense strand starting at position 2754 of SEQ ID NO: 588922
agaugacgugcuuagaaug

SEQ ID NO: 898783 - RNA, 19 nt, Artificial Sequence
  Description of Artificial Sequence: Synthetic oligonucleotide
  Antisense strand to SEQ ID NO: 898782
cauucuaagcacgucaucu

SEQ ID NO: 898784 - RNA, 19 nt, Artificial Sequence
  Description of Artificial Sequence: Synthetic oligonucleotide
  Sense strand starting at position 2824 of SEQ ID NO: 588922
uaaggaaacugaguucuua

SEQ ID NO: 898785 - RNA, 19 nt, Artificial Sequence
  Description of Artificial Sequence: Synthetic oligonucleotide
  Antisense strand to SEQ ID NO: 898784
uaagaacucaguuuccuua

SEQ ID NO: 898786 - RNA, 19 nt, Artificial Sequence
  Description of Artificial Sequence: Synthetic oligonucleotide
  Sense strand starting at position 2828 of SEQ ID NO: 588922
gaaacugaguucuuagggu

SEQ ID NO: 898787 - RNA, 19 nt, Artificial Sequence
  Description of Artificial Sequence: Synthetic oligonucleotide
  Antisense strand to SEQ ID NO: 898786
acccuaagaacucaguuuc

SEQ ID NO: 898788 - RNA, 19 nt, Artificial Sequence
  Description of Artificial Sequence: Synthetic oligonucleotide
  Sense strand starting at position 2842 of SEQ ID NO: 588922
agggucuuccaguagagua

SEQ ID NO: 898789 - RNA, 19 nt, Artificial Sequence
  Description of Artificial Sequence: Synthetic oligonucleotide
  Antisense strand to SEQ ID NO: 898788
uacucuacuggaagacccu

SEQ ID NO: 898790 - RNA, 19 nt, Artificial Sequence
  Description of Artificial Sequence: Synthetic oligonucleotide
  Sense strand starting at position 2997 of SEQ ID NO: 588922
caaugagcuccagaaugua

SEQ ID NO: 898791 - RNA, 19 nt, Artificial Sequence
  Description of Artificial Sequence: Synthetic oligonucleotide
  Antisense strand to SEQ ID NO: 898790
uacauucuggagcucauug

SEQ ID NO: 898792 - RNA, 19 nt, Artificial Sequence
  Description of Artificial Sequence: Synthetic oligonucleotide
  Sense strand starting at position 3055 of SEQ ID NO: 588922
uaggcaauacugugagaaa

SEQ ID NO: 898793 - RNA, 19 nt, Artificial Sequence
  Description of Artificial Sequence: Synthetic oligonucleotide
  Antisense strand to SEQ ID NO: 898792
uuucucacaguauugccua

SEQ ID NO: 898794 - RNA, 19 nt, Artificial Sequence
  Description of Artificial Sequence: Synthetic oligonucleotide
  Sense strand starting at position 3083 of SEQ ID NO: 588922
augcaaggaucagugaaau

SEQ ID NO: 898795 - RNA, 19 nt, Artificial Sequence
  Description of Artificial Sequence: Synthetic oligonucleotide
  Antisense strand to SEQ ID NO: 898794
auuucacugauccuugcau

SEQ ID NO: 898796 - RNA, 19 nt, Artificial Sequence
  Description of Artificial Sequence: Synthetic oligonucleotide
  Sense strand starting at position 3170 of SEQ ID NO: 588922
aggugugguacucaaagau

SEQ ID NO: 898797 - RNA, 19 nt, Artificial Sequence
  Description of Artificial Sequence: Synthetic oligonucleotide
  Antisense strand to SEQ ID NO: 898796
aucuuugaguaccacaccu

SEQ ID NO: 898798 - RNA, 19 nt, Artificial Sequence
  Description of Artificial Sequence: Synthetic oligonucleotide
  Sense strand starting at position 3202 of SEQ ID NO: 588922
cuggacuucuaaguuguua

SEQ ID NO: 898799 - RNA, 19 nt, Artificial Sequence
  Description of Artificial Sequence: Synthetic oligonucleotide
  Antisense strand to SEQ ID NO: 898798
uaacaacuuagaaguccag

SEQ ID NO: 898800 - RNA, 19 nt, Artificial Sequence
  Description of Artificial Sequence: Synthetic oligonucleotide
  Sense strand starting at position 3206 of SEQ ID NO: 588922
acuucuaaguuguuauaug

SEQ ID NO: 898801 - RNA, 19 nt, Artificial Sequence
  Description of Artificial Sequence: Synthetic oligonucleotide
  Antisense strand to SEQ ID NO: 898800
cauauaacaacuuagaagu

SEQ ID NO: 898802 - RNA, 19 nt, Artificial Sequence
  Description of Artificial Sequence: Synthetic oligonucleotide
  Sense strand starting at position 3248 of SEQ ID NO: 588922
gucaaaguaguaggauaaa

SEQ ID NO: 898803 - RNA, 19 nt, Artificial Sequence
  Description of Artificial Sequence: Synthetic oligonucleotide
  Antisense strand to SEQ ID NO: 898802
uuuauccuacuacuuugac

SEQ ID NO: 898804 - RNA, 19 nt, Artificial Sequence
  Description of Artificial Sequence: Synthetic oligonucleotide
  Sense strand starting at position 3748 of SEQ ID NO: 588922
uuaaguguauauguuggaa

SEQ ID NO: 898805 - RNA, 19 nt, Artificial Sequence
  Description of Artificial Sequence: Synthetic oligonucleotide
  Antisense strand to SEQ ID NO: 898804
uuccaacauauacacuuaa

SEQ ID NO: 898806 - RNA, 19 nt, Artificial Sequence
  Description of Artificial Sequence: Synthetic oligonucleotide
  Sense strand starting at position 3751 of SEQ ID NO: 588922
aguguauauguuggaaaga

SEQ ID NO: 898807 - RNA, 19 nt, Artificial Sequence
  Description of Artificial Sequence: Synthetic oligonucleotide
  Antisense strand to SEQ ID NO: 898806
ucuuuccaacauauacacu

SEQ ID NO: 898808 - RNA, 19 nt, Artificial Sequence
  Description of Artificial Sequence: Synthetic oligonucleotide
  Sense strand starting at position 3780 of SEQ ID NO: 588922
aaauucuuaggguguuaug

SEQ ID NO: 898809 - RNA, 19 nt, Artificial Sequence
  Description of Artificial Sequence: Synthetic oligonucleotide
  Antisense strand to SEQ ID NO: 898808
cauaacacccuaagaauuu

SEQ ID NO: 898810 - RNA, 19 nt, Artificial Sequence
  Description of Artificial Sequence: Synthetic oligonucleotide
  Sense strand starting at position 3790 of SEQ ID NO: 588922
gguguuaugauugauugcu

SEQ ID NO: 898811 - RNA, 19 nt, Artificial Sequence
  Description of Artificial Sequence: Synthetic oligonucleotide
  Antisense strand to SEQ ID NO: 898810
agcaaucaaucauaacacc

SEQ ID NO: 898812 - RNA, 19 nt, Artificial Sequence
  Description of Artificial Sequence: Synthetic oligonucleotide
  Sense strand starting at position 3799 of SEQ ID NO: 588922
auugauugcuuucuuggaa

SEQ ID NO: 898813 - RNA, 19 nt, Artificial Sequence
  Description of Artificial Sequence: Synthetic oligonucleotide
  Antisense strand to SEQ ID NO: 898812
uuccaagaaagcaaucaau

SEQ ID NO: 898814 - RNA, 19 nt, Artificial Sequence
  Description of Artificial Sequence: Synthetic oligonucleotide
  Sense strand starting at position 3800 of SEQ ID NO: 588922
uugauugcuuucuuggaaa

SEQ ID NO: 898815 - RNA, 19 nt, Artificial Sequence
  Description of Artificial Sequence: Synthetic oligonucleotide
  Antisense strand to SEQ ID NO: 898814
uuuccaagaaagcaaucaa

SEQ ID NO: 898816 - RNA, 19 nt, Artificial Sequence
  Description of Artificial Sequence: Synthetic oligonucleotide
  Sense strand starting at position 3906 of SEQ ID NO: 588922
gaagaagacugggcgugau

SEQ ID NO: 898817 - RNA, 19 nt, Artificial Sequence
  Description of Artificial Sequence: Synthetic oligonucleotide
  Antisense strand to SEQ ID NO: 898816
aucacgcccagucuucuuc

SEQ ID NO: 898818 - RNA, 19 nt, Artificial Sequence
  Description of Artificial Sequence: Synthetic oligonucleotide
  Sense strand starting at position 49 of SEQ ID NO: 588923
aacacugauugugucaagu

SEQ ID NO: 898819 - RNA, 19 nt, Artificial Sequence
  Description of Artificial Sequence: Synthetic oligonucleotide
  Antisense strand to SEQ ID NO: 898818
acuugacacaaucaguguu

SEQ ID NO: 898820 - RNA, 19 nt, Artificial Sequence
  Description of Artificial Sequence: Synthetic oligonucleotide
  Sense strand starting at position 58 of SEQ ID NO: 588923
ugugucaagucacuuaacu

SEQ ID NO: 898821 - RNA, 19 nt, Artificial Sequence
  Description of Artificial Sequence: Synthetic oligonucleotide
  Antisense strand to SEQ ID NO: 898820
aguuaagugacuugacaca

SEQ ID NO: 898822 - RNA, 19 nt, Artificial Sequence
  Description of Artificial Sequence: Synthetic oligonucleotide
  Sense strand starting at position 110 of SEQ ID NO: 588923
augagauguugacauuaga

SEQ ID NO: 898823 - RNA, 19 nt, Artificial Sequence
  Description of Artificial Sequence: Synthetic oligonucleotide
  Antisense strand to SEQ ID NO: 898822
ucuaaugucaacaucucau

SEQ ID NO: 898824 - RNA, 19 nt, Artificial Sequence
  Description of Artificial Sequence: Synthetic oligonucleotide
  Sense strand starting at position 152 of SEQ ID NO: 588923
ccuaaacaucucgaguaca

SEQ ID NO: 898825 - RNA, 19 nt, Artificial Sequence
  Description of Artificial Sequence: Synthetic oligonucleotide
  Antisense strand to SEQ ID NO: 898824
uguacucgagauguuuagg

SEQ ID NO: 898826 - RNA, 19 nt, Artificial Sequence
  Description of Artificial Sequence: Synthetic oligonucleotide
  Sense strand starting at position 155 of SEQ ID NO: 588923
aaacaucucgaguacaagu

SEQ ID NO: 898827 - RNA, 19 nt, Artificial Sequence
  Description of Artificial Sequence: Synthetic oligonucleotide
  Antisense strand to SEQ ID NO: 898826
acuuguacucgagauguuu

SEQ ID NO: 898828 - RNA, 19 nt, Artificial Sequence
  Description of Artificial Sequence: Synthetic oligonucleotide
  Sense strand starting at position 193 of SEQ ID NO: 588923
ggguacaaugaagguguua

SEQ ID NO: 898829 - RNA, 19 nt, Artificial Sequence
  Description of Artificial Sequence: Synthetic oligonucleotide
  Antisense strand to SEQ ID NO: 898828
uaacaccuucauuguaccc

SEQ ID NO: 898830 - RNA, 19 nt, Artificial Sequence
  Description of Artificial Sequence: Synthetic oligonucleotide
  Sense strand starting at position 271 of SEQ ID NO: 588923
ucugauguaauaggugaga

SEQ ID NO: 898831 - RNA, 19 nt, Artificial Sequence
  Description of Artificial Sequence: Synthetic oligonucleotide
  Antisense strand to SEQ ID NO: 898830
ucucaccuauuacaucaga

SEQ ID NO: 898832 - RNA, 19 nt, Artificial Sequence
  Description of Artificial Sequence: Synthetic oligonucleotide
  Sense strand starting at position 273 of SEQ ID NO: 588923
ugauguaauaggugagaua

SEQ ID NO: 898833 - RNA, 19 nt, Artificial Sequence
  Description of Artificial Sequence: Synthetic oligonucleotide
  Antisense strand to SEQ ID NO: 898832
uaucucaccuauuacauca

SEQ ID NO: 898834 - RNA, 19 nt, Artificial Sequence
  Description of Artificial Sequence: Synthetic oligonucleotide
  Sense strand starting at position 303 of SEQ ID NO: 588923
cuagauuccucaguaggag

SEQ ID NO: 898835 - RNA, 19 nt, Artificial Sequence
  Description of Artificial Sequence: Synthetic oligonucleotide
  Antisense strand to SEQ ID NO: 898834
cuccuacugaggaaucuag

SEQ ID NO: 898836 - RNA, 19 nt, Artificial Sequence
  Description of Artificial Sequence: Synthetic oligonucleotide
  Sense strand starting at position 304 of SEQ ID NO: 588923
uagauuccucaguaggagu

SEQ ID NO: 898837 - RNA, 19 nt, Artificial Sequence
  Description of Artificial Sequence: Synthetic oligonucleotide
  Antisense strand to SEQ ID NO: 898836
acuccuacugaggaaucua

SEQ ID NO: 898838 - RNA, 19 nt, Artificial Sequence
  Description of Artificial Sequence: Synthetic oligonucleotide
  Sense strand starting at position 317 of SEQ ID NO: 588923
aggaguauuuccuauauau

SEQ ID NO: 898839 - RNA, 19 nt, Artificial Sequence
  Description of Artificial Sequence: Synthetic oligonucleotide
  Antisense strand to SEQ ID NO: 898838
auauauaggaaauacuccu

SEQ ID NO: 898840 - RNA, 19 nt, Artificial Sequence
  Description of Artificial Sequence: Synthetic oligonucleotide
  Sense strand starting at position 366 of SEQ ID NO: 588923
cagcuauggugcccaacaa

SEQ ID NO: 898841 - RNA, 19 nt, Artificial Sequence
  Description of Artificial Sequence: Synthetic oligonucleotide
  Antisense strand to SEQ ID NO: 898840
uuguugggcaccauagcug

SEQ ID NO: 898842 - RNA, 19 nt, Artificial Sequence
  Description of Artificial Sequence: Synthetic oligonucleotide
  Sense strand starting at position 435 of SEQ ID NO: 588923
agagaaucauuggaaagga

SEQ ID NO: 898843 - RNA, 19 nt, Artificial Sequence
  Description of Artificial Sequence: Synthetic oligonucleotide
  Antisense strand to SEQ ID NO: 898842
uccuuuccaaugauucucu

SEQ ID NO: 898844 - RNA, 19 nt, Artificial Sequence
  Description of Artificial Sequence: Synthetic oligonucleotide
  Sense strand starting at position 891 of SEQ ID NO: 588923
uccucaucucccgagugau

SEQ ID NO: 898845 - RNA, 19 nt, Artificial Sequence
  Description of Artificial Sequence: Synthetic oligonucleotide
  Antisense strand to SEQ ID NO: 898844
aucacucgggagaugagga

SEQ ID NO: 898846 - RNA, 19 nt, Artificial Sequence
  Description of Artificial Sequence: Synthetic oligonucleotide
  Sense strand starting at position 894 of SEQ ID NO: 588923
ucaucucccgagugauuuc

SEQ ID NO: 898847 - RNA, 19 nt, Artificial Sequence
  Description of Artificial Sequence: Synthetic oligonucleotide
  Antisense strand to SEQ ID NO: 898846
gaaaucacucgggagauga

SEQ ID NO: 898848 - RNA, 19 nt, Artificial Sequence
  Description of Artificial Sequence: Synthetic oligonucleotide
  Sense strand starting at position 2339 of SEQ ID NO: 588923
cgagaucucuuacuagcag

SEQ ID NO: 898849 - RNA, 19 nt, Artificial Sequence
  Description of Artificial Sequence: Synthetic oligonucleotide
  Antisense strand to SEQ ID NO: 898848
cugcuaguaagagaucucg

SEQ ID NO: 898850 - RNA, 19 nt, Artificial Sequence
  Description of Artificial Sequence: Synthetic oligonucleotide
  Sense strand starting at position 2447 of SEQ ID NO: 588923
cugaguucuugugucaaac

SEQ ID NO: 898851 - RNA, 19 nt, Artificial Sequence
  Description of Artificial Sequence: Synthetic oligonucleotide
  Antisense strand to SEQ ID NO: 898850
guuugacacaagaacucag

SEQ ID NO: 898852 - RNA, 19 nt, Artificial Sequence
  Description of Artificial Sequence: Synthetic oligonucleotide
  Sense strand starting at position 2555 of SEQ ID NO: 588923
agcucauaccuaugggcau

SEQ ID NO: 898853 - RNA, 19 nt, Artificial Sequence
  Description of Artificial Sequence: Synthetic oligonucleotide
  Antisense strand to SEQ ID NO: 898852
augcccauagguaugagcu

SEQ ID NO: 898854 - RNA, 19 nt, Artificial Sequence
  Description of Artificial Sequence: Synthetic oligonucleotide
  Sense strand starting at position 2602 of SEQ ID NO: 588923
aaaccaagucucggagaua

SEQ ID NO: 898855 - RNA, 19 nt, Artificial Sequence
  Description of Artificial Sequence: Synthetic oligonucleotide
  Antisense strand to SEQ ID NO: 898854
uaucuccgagacuugguuu

SEQ ID NO: 898856 - RNA, 19 nt, Artificial Sequence
  Description of Artificial Sequence: Synthetic oligonucleotide
  Sense strand starting at position 2605 of SEQ ID NO: 588923
ccaagucucggagauauug

SEQ ID NO: 898857 - RNA, 19 nt, Artificial Sequence
  Description of Artificial Sequence: Synthetic oligonucleotide
  Antisense strand to SEQ ID NO: 898856
caauaucuccgagacuugg

SEQ ID NO: 898858 - RNA, 19 nt, Artificial Sequence
  Description of Artificial Sequence: Synthetic oligonucleotide
  Sense strand starting at position 2657 of SEQ ID NO: 588923
gcauccguuagcuaauguu

SEQ ID NO: 898859 - RNA, 19 nt, Artificial Sequence
  Description of Artificial Sequence: Synthetic oligonucleotide
  Antisense strand to SEQ ID NO: 898858
aacauuagcuaacggaugc

SEQ ID NO: 898860 - RNA, 19 nt, Artificial Sequence
  Description of Artificial Sequence: Synthetic oligonucleotide
  Sense strand starting at position 2694 of SEQ ID NO: 588923
auguguaagccguuauucu

SEQ ID NO: 898861 - RNA, 19 nt, Artificial Sequence
  Description of Artificial Sequence: Synthetic oligonucleotide
  Antisense strand to SEQ ID NO: 898860
agaauaacggcuuacacau

SEQ ID NO: 898862 - RNA, 19 nt, Artificial Sequence
  Description of Artificial Sequence: Synthetic oligonucleotide
  Sense strand starting at position 2695 of SEQ ID NO: 588923
uguguaagccguuauucug

SEQ ID NO: 898863 - RNA, 19 nt, Artificial Sequence
  Description of Artificial Sequence: Synthetic oligonucleotide
  Antisense strand to SEQ ID NO: 898862
cagaauaacggcuuacaca

SEQ ID NO: 898864 - RNA, 19 nt, Artificial Sequence
  Description of Artificial Sequence: Synthetic oligonucleotide
  Sense strand starting at position 2721 of SEQ ID NO: 588923
gagcuacgaccauguacaa

SEQ ID NO: 898865 - RNA, 19 nt, Artificial Sequence
  Description of Artificial Sequence: Synthetic oligonucleotide
  Antisense strand to SEQ ID NO: 898864
uuguacauggucguagcuc

SEQ ID NO: 898866 - RNA, 19 nt, Artificial Sequence
  Description of Artificial Sequence: Synthetic oligonucleotide
  Sense strand starting at position 2740 of SEQ ID NO: 588923
ggcagaaucucaucuugcu

SEQ ID NO: 898867 - RNA, 19 nt, Artificial Sequence
  Description of Artificial Sequence: Synthetic oligonucleotide
  Antisense strand to SEQ ID NO: 898866
agcaagaugagauucugcc

SEQ ID NO: 898868 - RNA, 19 nt, Artificial Sequence
  Description of Artificial Sequence: Synthetic oligonucleotide
  Sense strand starting at position 2756 of SEQ ID NO: 588923
gcuuaugggcgcucagagu

SEQ ID NO: 898869 - RNA, 19 nt, Artificial Sequence
  Description of Artificial Sequence: Synthetic oligonucleotide
  Antisense strand to SEQ ID NO: 898868
acucugagcgcccauaagc

SEQ ID NO: 898870 - RNA, 19 nt, Artificial Sequence
  Description of Artificial Sequence: Synthetic oligonucleotide
  Sense strand starting at position 2764 of SEQ ID NO: 588923
gcgcucagaguuuagaagu

SEQ ID NO: 898871 - RNA, 19 nt, Artificial Sequence
  Description of Artificial Sequence: Synthetic oligonucleotide
  Antisense strand to SEQ ID NO: 898870
acuucuaaacucugagcgc

SEQ ID NO: 898872 - RNA, 19 nt, Artificial Sequence
  Description of Artificial Sequence: Synthetic oligonucleotide
  Sense strand starting at position 3395 of SEQ ID NO: 588923
guggauaagugcuuuauua

SEQ ID NO: 898873 - RNA, 19 nt, Artificial Sequence
  Description of Artificial Sequence: Synthetic oligonucleotide
  Antisense strand to SEQ ID NO: 898872
uaauaaagcacuuauccac

SEQ ID NO: 898874 - RNA, 19 nt, Artificial Sequence
  Description of Artificial Sequence: Synthetic oligonucleotide
  Sense strand starting at position 3397 of SEQ ID NO: 588923
ggauaagugcuuuauuagu

SEQ ID NO: 898875 - RNA, 19 nt, Artificial Sequence
  Description of Artificial Sequence: Synthetic oligonucleotide
  Antisense strand to SEQ ID NO: 898874
acuaauaaagcacuuaucc

SEQ ID NO: 898876 - RNA, 19 nt, Artificial Sequence
  Description of Artificial Sequence: Synthetic oligonucleotide
  Sense strand starting at position 3402 of SEQ ID NO: 588923
agugcuuuauuaguaaaug

SEQ ID NO: 898877 - RNA, 19 nt, Artificial Sequence
  Description of Artificial Sequence: Synthetic oligonucleotide
  Antisense strand to SEQ ID NO: 898876
cauuuacuaauaaagcacu

SEQ ID NO: 898878 - RNA, 19 nt, Artificial Sequence
  Description of Artificial Sequence: Synthetic oligonucleotide
  Sense strand starting at position 3410 of SEQ ID NO: 588923
auuaguaaaugacaaagga

SEQ ID NO: 898879 - RNA, 19 nt, Artificial Sequence
  Description of Artificial Sequence: Synthetic oligonucleotide
  Antisense strand to SEQ ID NO: 898878
uccuuugucauuuacuaau

SEQ ID NO: 898880 - RNA, 19 nt, Artificial Sequence
  Description of Artificial Sequence: Synthetic oligonucleotide
  Sense strand starting at position 3432 of SEQ ID NO: 588923
auccaauucuaggaucuga

SEQ ID NO: 898881 - RNA, 19 nt, Artificial Sequence
  Description of Artificial Sequence: Synthetic oligonucleotide
  Antisense strand to SEQ ID NO: 898880
ucagauccuagaauuggau

SEQ ID NO: 898882 - RNA, 19 nt, Artificial Sequence
  Description of Artificial Sequence: Synthetic oligonucleotide
  Sense strand starting at position 3684 of SEQ ID NO: 588923
aggcguuaaugugucaacu

SEQ ID NO: 898883 - RNA, 19 nt, Artificial Sequence
  Description of Artificial Sequence: Synthetic oligonucleotide
  Antisense strand to SEQ ID NO: 898882
aguugacacauuaacgccu

SEQ ID NO: 898884 - RNA, 19 nt, Artificial Sequence
  Description of Artificial Sequence: Synthetic oligonucleotide
  Sense strand starting at position 3694 of SEQ ID NO: 588923
gugucaacucucuaugucu

SEQ ID NO: 898885 - RNA, 19 nt, Artificial Sequence
  Description of Artificial Sequence: Synthetic oligonucleotide
  Antisense strand to SEQ ID NO: 898884
agacauagagaguugacac

SEQ ID NO: 898886 - RNA, 19 nt, Artificial Sequence
  Description of Artificial Sequence: Synthetic oligonucleotide
  Sense strand starting at position 3768 of SEQ ID NO: 588923
aggagauaguguguaaaca

SEQ ID NO: 898887 - RNA, 19 nt, Artificial Sequence
  Description of Artificial Sequence: Synthetic oligonucleotide
  Antisense strand to SEQ ID NO: 898886
uguuuacacacuaucuccu

SEQ ID NO: 898888 - RNA, 19 nt, Artificial Sequence
  Description of Artificial Sequence: Synthetic oligonucleotide
  Sense strand starting at position 3769 of SEQ ID NO: 588923
ggagauaguguguaaacau

SEQ ID NO: 898889 - RNA, 19 nt, Artificial Sequence
  Description of Artificial Sequence: Synthetic oligonucleotide
  Antisense strand to SEQ ID NO: 898888
auguuuacacacuaucucc

SEQ ID NO: 898890 - RNA, 19 nt, Artificial Sequence
  Description of Artificial Sequence: Synthetic oligonucleotide
  Sense strand starting at position 3796 of SEQ ID NO: 588923
cuaggaugcacugguaaug

SEQ ID NO: 898891 - RNA, 19 nt, Artificial Sequence
  Description of Artificial Sequence: Synthetic oligonucleotide
  Antisense strand to SEQ ID NO: 898890
cauuaccagugcauccuag

SEQ ID NO: 898892 - RNA, 19 nt, Artificial Sequence
  Description of Artificial Sequence: Synthetic oligonucleotide
  Sense strand starting at position 3806 of SEQ ID NO: 588923
cugguaaugccacaugcuu

SEQ ID NO: 898893 - RNA, 19 nt, Artificial Sequence
  Description of Artificial Sequence: Synthetic oligonucleotide
  Antisense strand to SEQ ID NO: 898892
aagcauguggcauuaccag

SEQ ID NO: 898894 - RNA, 19 nt, Artificial Sequence
  Description of Artificial Sequence: Synthetic oligonucleotide
  Sense strand starting at position 3915 of SEQ ID NO: 588923
gcagcuaaggaguaggaau

SEQ ID NO: 898895 - RNA, 19 nt, Artificial Sequence
  Description of Artificial Sequence: Synthetic oligonucleotide
  Antisense strand to SEQ ID NO: 898894
auuccuacuccuuagcugc

SEQ ID NO: 898896 - RNA, 19 nt, Artificial Sequence
  Description of Artificial Sequence: Synthetic oligonucleotide
  Sense strand starting at position 3968 of SEQ ID NO: 588923
ugggucaacaagcguuuau

SEQ ID NO: 898897 - RNA, 19 nt, Artificial Sequence
  Description of Artificial Sequence: Synthetic oligonucleotide
  Antisense strand to SEQ ID NO: 898896
auaaacgcuuguugaccca

SEQ ID NO: 898898 - RNA, 19 nt, Artificial Sequence
  Description of Artificial Sequence: Synthetic oligonucleotide
  Sense strand starting at position 198 of SEQ ID NO: 588924
gccagaacucuggacucca

SEQ ID NO: 898899 - RNA, 19 nt, Artificial Sequence
  Description of Artificial Sequence: Synthetic oligonucleotide
  Antisense strand to SEQ ID NO: 898898
uggaguccagaguucuggc

SEQ ID NO: 898900 - RNA, 19 nt, Artificial Sequence
  Description of Artificial Sequence: Synthetic oligonucleotide
  Sense strand starting at position 307 of SEQ ID NO: 588924
cagaguuacgcacaccaga

SEQ ID NO: 898901 - RNA, 19 nt, Artificial Sequence
  Description of Artificial Sequence: Synthetic oligonucleotide
  Antisense strand to SEQ ID NO: 898900
ucuggugugcguaacucug

SEQ ID NO: 898902 - RNA, 19 nt, Artificial Sequence
  Description of Artificial Sequence: Synthetic oligonucleotide
  Sense strand starting at position 647 of SEQ ID NO: 588924
guacgucugccaagugagu

SEQ ID NO: 898903 - RNA, 19 nt, Artificial Sequence
  Description of Artificial Sequence: Synthetic oligonucleotide
  Antisense strand to SEQ ID NO: 898902
acucacuuggcagacguac

SEQ ID NO: 898904 - RNA, 19 nt, Artificial Sequence
  Description of Artificial Sequence: Synthetic oligonucleotide
  Sense strand starting at position 649 of SEQ ID NO: 588924
acgucugccaagugaguaa

SEQ ID NO: 898905 - RNA, 19 nt, Artificial Sequence
  Description of Artificial Sequence: Synthetic oligonucleotide
  Antisense strand to SEQ ID NO: 898904
uuacucacuuggcagacgu

SEQ ID NO: 898906 - RNA, 19 nt, Artificial Sequence
  Description of Artificial Sequence: Synthetic oligonucleotide
  Sense strand starting at position 954 of SEQ ID NO: 588924
gcacgauggugcuucugua

SEQ ID NO: 898907 - RNA, 19 nt, Artificial Sequence
  Description of Artificial Sequence: Synthetic oligonucleotide
  Antisense strand to SEQ ID NO: 898906
uacagaagcaccaucgugc

SEQ ID NO: 898908 - RNA, 19 nt, Artificial Sequence
  Description of Artificial Sequence: Synthetic oligonucleotide
  Sense strand starting at position 1127 of SEQ ID NO: 588924
agcuuagucaggcacuagu

SEQ ID NO: 898909 - RNA, 19 nt, Artificial Sequence
  Description of Artificial Sequence: Synthetic oligonucleotide
  Antisense strand to SEQ ID NO: 898908
acuagugccugacuaagcu

SEQ ID NO: 898910 - RNA, 19 nt, Artificial Sequence
  Description of Artificial Sequence: Synthetic oligonucleotide
  Sense strand starting at position 1144 of SEQ ID NO: 588924
gugguuguuguguuaugua

SEQ ID NO: 898911 - RNA, 19 nt, Artificial Sequence
  Description of Artificial Sequence: Synthetic oligonucleotide
  Antisense strand to SEQ ID NO: 898910
uacauaacacaacaaccac

SEQ ID NO: 898912 - RNA, 19 nt, Artificial Sequence
  Description of Artificial Sequence: Synthetic oligonucleotide
  Sense strand starting at position 1178 of SEQ ID NO: 588924
ucaguaauggcucacagag

SEQ ID NO: 898913 - RNA, 19 nt, Artificial Sequence
  Description of Artificial Sequence: Synthetic oligonucleotide
  Antisense strand to SEQ ID NO: 898912
cucugugagccauuacuga

SEQ ID NO: 898914 - RNA, 19 nt, Artificial Sequence
  Description of Artificial Sequence: Synthetic oligonucleotide
  Sense strand starting at position 1267 of SEQ ID NO: 588924
ccuuuaagcucucagagga

SEQ ID NO: 898915 - RNA, 19 nt, Artificial Sequence
  Description of Artificial Sequence: Synthetic oligonucleotide
  Antisense strand to SEQ ID NO: 898914
uccucugagagcuuaaagg

SEQ ID NO: 898916 - RNA, 19 nt, Artificial Sequence
  Description of Artificial Sequence: Synthetic oligonucleotide
  Sense strand starting at position 1285 of SEQ ID NO: 588924
augaguuccauccgcugaa

SEQ ID NO: 898917 - RNA, 19 nt, Artificial Sequence
  Description of Artificial Sequence: Synthetic oligonucleotide
  Antisense strand to SEQ ID NO: 898916
uucagcggauggaacucau

SEQ ID NO: 898918 - RNA, 19 nt, Artificial Sequence
  Description of Artificial Sequence: Synthetic oligonucleotide
  Sense strand starting at position 1286 of SEQ ID NO: 588924
ugaguuccauccgcugaaa

SEQ ID NO: 898919 - RNA, 19 nt, Artificial Sequence
  Description of Artificial Sequence: Synthetic oligonucleotide
  Antisense strand to SEQ ID NO: 898918
uuucagcggauggaacuca

SEQ ID NO: 898920 - RNA, 19 nt, Artificial Sequence
  Description of Artificial Sequence: Synthetic oligonucleotide
  Sense strand starting at position 1313 of SEQ ID NO: 588924
gggccuugcggauacuauu

SEQ ID NO: 898921 - RNA, 19 nt, Artificial Sequence
  Description of Artificial Sequence: Synthetic oligonucleotide
  Antisense strand to SEQ ID NO: 898920
aauaguauccgcaaggccc

SEQ ID NO: 898922 - RNA, 19 nt, Artificial Sequence
  Description of Artificial Sequence: Synthetic oligonucleotide
  Sense strand starting at position 1438 of SEQ ID NO: 588924
ggugguuagauacgcuuua

SEQ ID NO: 898923 - RNA, 19 nt, Artificial Sequence
  Description of Artificial Sequence: Synthetic oligonucleotide
  Antisense strand to SEQ ID NO: 898922
uaaagcguaucuaaccacc

SEQ ID NO: 898924 - RNA, 19 nt, Artificial Sequence
  Description of Artificial Sequence: Synthetic oligonucleotide
  Sense strand starting at position 1517 of SEQ ID NO: 588924
gaaguaacucucgagccuu

SEQ ID NO: 898925 - RNA, 19 nt, Artificial Sequence
  Description of Artificial Sequence: Synthetic oligonucleotide
  Antisense strand to SEQ ID NO: 898924
aaggcucgagaguuacuuc

SEQ ID NO: 898926 - RNA, 19 nt, Artificial Sequence
  Description of Artificial Sequence: Synthetic oligonucleotide
  Sense strand starting at position 1525 of SEQ ID NO: 588924
ucucgagccuucucuguaa

SEQ ID NO: 898927 - RNA, 19 nt, Artificial Sequence
  Description of Artificial Sequence: Synthetic oligonucleotide
  Antisense strand to SEQ ID NO: 898926
uuacagagaaggcucgaga

SEQ ID NO: 898928 - RNA, 19 nt, Artificial Sequence
  Description of Artificial Sequence: Synthetic oligonucleotide
  Sense strand starting at position 1527 of SEQ ID NO: 588924
ucgagccuucucuguaaca

SEQ ID NO: 898929 - RNA, 19 nt, Artificial Sequence
  Description of Artificial Sequence: Synthetic oligonucleotide
  Antisense strand to SEQ ID NO: 898928
uguuacagagaaggcucga

SEQ ID NO: 898930 - RNA, 19 nt, Artificial Sequence
  Description of Artificial Sequence: Synthetic oligonucleotide
  Sense strand starting at position 2748 of SEQ ID NO: 588924
uggugagcucguuugcuca

SEQ ID NO: 898931 - RNA, 19 nt, Artificial Sequence
  Description of Artificial Sequence: Synthetic oligonucleotide
  Antisense strand to SEQ ID NO: 898930
ugagcaaacgagcucacca

SEQ ID NO: 898932 - RNA, 19 nt, Artificial Sequence
  Description of Artificial Sequence: Synthetic oligonucleotide
  Sense strand starting at position 2758 of SEQ ID NO: 588924
guuugcucaccugagguuu

SEQ ID NO: 898933 - RNA, 19 nt, Artificial Sequence
  Description of Artificial Sequence: Synthetic oligonucleotide
  Antisense strand to SEQ ID NO: 898932
aaaccucaggugagcaaac

SEQ ID NO: 898934 - RNA, 19 nt, Artificial Sequence
  Description of Artificial Sequence: Synthetic oligonucleotide
  Sense strand starting at position 2791 of SEQ ID NO: 588924
ggcugcuucccagaugagu

SEQ ID NO: 898935 - RNA, 19 nt, Artificial Sequence
  Description of Artificial Sequence: Synthetic oligonucleotide
  Antisense strand to SEQ ID NO: 898934
acucaucugggaagcagcc

SEQ ID NO: 898936 - RNA, 19 nt, Artificial Sequence
  Description of Artificial Sequence: Synthetic oligonucleotide
  Sense strand starting at position 2793 of SEQ ID NO: 588924
cugcuucccagaugaguag

SEQ ID NO: 898937 - RNA, 19 nt, Artificial Sequence
  Description of Artificial Sequence: Synthetic oligonucleotide
  Antisense strand to SEQ ID NO: 898936
cuacucaucugggaagcag

SEQ ID NO: 898938 - RNA, 19 nt, Artificial Sequence
  Description of Artificial Sequence: Synthetic oligonucleotide
  Sense strand starting at position 2805 of SEQ ID NO: 588924
ugaguagaggcuugugauu

SEQ ID NO: 898939 - RNA, 19 nt, Artificial Sequence
  Description of Artificial Sequence: Synthetic oligonucleotide
  Antisense strand to SEQ ID NO: 898938
aaucacaagccucuacuca

SEQ ID NO: 898940 - RNA, 19 nt, Artificial Sequence
  Description of Artificial Sequence: Synthetic oligonucleotide
  Sense strand starting at position 2807 of SEQ ID NO: 588924
aguagaggcuugugauuug

SEQ ID NO: 898941 - RNA, 19 nt, Artificial Sequence
  Description of Artificial Sequence: Synthetic oligonucleotide
  Antisense strand to SEQ ID NO: 898940
caaaucacaagccucuacu

SEQ ID NO: 898942 - RNA, 19 nt, Artificial Sequence
  Description of Artificial Sequence: Synthetic oligonucleotide
  Sense strand starting at position 2892 of SEQ ID NO: 588924
ggagcuaggcuuuguaaua

SEQ ID NO: 898943 - RNA, 19 nt, Artificial Sequence
  Description of Artificial Sequence: Synthetic oligonucleotide
  Antisense strand to SEQ ID NO: 898942
uauuacaaagccuagcucc

SEQ ID NO: 898944 - RNA, 19 nt, Artificial Sequence
  Description of Artificial Sequence: Synthetic oligonucleotide
  Sense strand starting at position 2893 of SEQ ID NO: 588924
gagcuaggcuuuguaauaa

SEQ ID NO: 898945 - RNA, 19 nt, Artificial Sequence
  Description of Artificial Sequence: Synthetic oligonucleotide
  Antisense strand to SEQ ID NO: 898944
uuauuacaaagccuagcuc

SEQ ID NO: 898946 - RNA, 19 nt, Artificial Sequence
  Description of Artificial Sequence: Synthetic oligonucleotide
  Sense strand starting at position 3088 of SEQ ID NO: 588924
ggaauugcuccgggagccu

SEQ ID NO: 898947 - RNA, 19 nt, Artificial Sequence
  Description of Artificial Sequence: Synthetic oligonucleotide
  Antisense strand to SEQ ID NO: 898946
aggcucccggagcaauucc

SEQ ID NO: 898948 - RNA, 19 nt, Artificial Sequence
  Description of Artificial Sequence: Synthetic oligonucleotide
  Sense strand starting at position 3133 of SEQ ID NO: 588924
gguagacuguccagggaug

SEQ ID NO: 898949 - RNA, 19 nt, Artificial Sequence
  Description of Artificial Sequence: Synthetic oligonucleotide
  Antisense strand to SEQ ID NO: 898948
caucccuggacagucuacc

SEQ ID NO: 898950 - RNA, 19 nt, Artificial Sequence
  Description of Artificial Sequence: Synthetic oligonucleotide
  Sense strand starting at position 3134 of SEQ ID NO: 588924
guagacuguccagggauga

SEQ ID NO: 898951 - RNA, 19 nt, Artificial Sequence
  Description of Artificial Sequence: Synthetic oligonucleotide
  Antisense strand to SEQ ID NO: 898950
ucaucccuggacagucuac

SEQ ID NO: 898952 - RNA, 19 nt, Artificial Sequence
  Description of Artificial Sequence: Synthetic oligonucleotide
  Sense strand starting at position 3173 of SEQ ID NO: 588924
ucugaauccuugcugugaa

SEQ ID NO: 898953 - RNA, 19 nt, Artificial Sequence
  Description of Artificial Sequence: Synthetic oligonucleotide
  Antisense strand to SEQ ID NO: 898952
uucacagcaaggauucaga

SEQ ID NO: 898954 - RNA, 19 nt, Artificial Sequence
  Description of Artificial Sequence: Synthetic oligonucleotide
  Sense strand starting at position 3176 of SEQ ID NO: 588924
gaauccuugcugugaacug

SEQ ID NO: 898955 - RNA, 19 nt, Artificial Sequence
  Description of Artificial Sequence: Synthetic oligonucleotide
  Antisense strand to SEQ ID NO: 898954
caguucacagcaaggauuc

SEQ ID NO: 898956 - RNA, 19 nt, Artificial Sequence
  Description of Artificial Sequence: Synthetic oligonucleotide
  Sense strand starting at position 3186 of SEQ ID NO: 588924
ugugaacugucccuacaaa

SEQ ID NO: 898957 - RNA, 19 nt, Artificial Sequence
  Description of Artificial Sequence: Synthetic oligonucleotide
  Antisense strand to SEQ ID NO: 898956
uuuguagggacaguucaca

SEQ ID NO: 898958 - RNA, 19 nt, Artificial Sequence
  Description of Artificial Sequence: Synthetic oligonucleotide
  Sense strand starting at position 3187 of SEQ ID NO: 588924
gugaacugucccuacaaau

SEQ ID NO: 898959 - RNA, 19 nt, Artificial Sequence
  Description of Artificial Sequence: Synthetic oligonucleotide
  Antisense strand to SEQ ID NO: 898958
auuuguagggacaguucac

SEQ ID NO: 898960 - RNA, 19 nt, Artificial Sequence
  Description of Artificial Sequence: Synthetic oligonucleotide
  Sense strand starting at position 3326 of SEQ ID NO: 588924
aaauguaagucccagugga

SEQ ID NO: 898961 - RNA, 19 nt, Artificial Sequence
  Description of Artificial Sequence: Synthetic oligonucleotide
  Antisense strand to SEQ ID NO: 898960
uccacugggacuuacauuu

SEQ ID NO: 898962 - RNA, 19 nt, Artificial Sequence
  Description of Artificial Sequence: Synthetic oligonucleotide
  Sense strand starting at position 3353 of SEQ ID NO: 588924
agugcaucgccaucugagu

SEQ ID NO: 898963 - RNA, 19 nt, Artificial Sequence
  Description of Artificial Sequence: Synthetic oligonucleotide
  Antisense strand to SEQ ID NO: 898962
acucagauggcgaugcacu

SEQ ID NO: 898964 - RNA, 19 nt, Artificial Sequence
  Description of Artificial Sequence: Synthetic oligonucleotide
  Sense strand starting at position 3555 of SEQ ID NO: 588924
ggcaaugcgaggugugaaa

SEQ ID NO: 898965 - RNA, 19 nt, Artificial Sequence
  Description of Artificial Sequence: Synthetic oligonucleotide
  Antisense strand to SEQ ID NO: 898964
uuucacaccucgcauugcc

SEQ ID NO: 898966 - RNA, 19 nt, Artificial Sequence
  Description of Artificial Sequence: Synthetic oligonucleotide
  Sense strand starting at position 3557 of SEQ ID NO: 588924
caaugcgaggugugaaaga

SEQ ID NO: 898967 - RNA, 19 nt, Artificial Sequence
  Description of Artificial Sequence: Synthetic oligonucleotide
  Antisense strand to SEQ ID NO: 898966
ucuuucacaccucgcauug

SEQ ID NO: 898968 - RNA, 19 nt, Artificial Sequence
  Description of Artificial Sequence: Synthetic oligonucleotide
  Sense strand starting at position 3634 of SEQ ID NO: 588924
gagggauucgcucgaggcu

SEQ ID NO: 898969 - RNA, 19 nt, Artificial Sequence
  Description of Artificial Sequence: Synthetic oligonucleotide
  Antisense strand to SEQ ID NO: 898968
agccucgagcgaaucccuc

SEQ ID NO: 898970 - RNA, 19 nt, Artificial Sequence
  Description of Artificial Sequence: Synthetic oligonucleotide
  Sense strand starting at position 3735 of SEQ ID NO: 588924
aaauguguuggcugaggua

SEQ ID NO: 898971 - RNA, 19 nt, Artificial Sequence
  Description of Artificial Sequence: Synthetic oligonucleotide
  Antisense strand to SEQ ID NO: 898970
uaccucagccaacacauuu

SEQ ID NO: 898972 - RNA, 19 nt, Artificial Sequence
  Description of Artificial Sequence: Synthetic oligonucleotide
  Sense strand starting at position 3862 of SEQ ID NO: 588924
cagugugcaugguugagaa

SEQ ID NO: 898973 - RNA, 19 nt, Artificial Sequence
  Description of Artificial Sequence: Synthetic oligonucleotide
  Antisense strand to SEQ ID NO: 898972
uucucaaccaugcacacug

SEQ ID NO: 898974 - RNA, 19 nt, Artificial Sequence
  Description of Artificial Sequence: Synthetic oligonucleotide
  Sense strand starting at position 3975 of SEQ ID NO: 588924
uuaggaaagguguguauua

SEQ ID NO: 898975 - RNA, 19 nt, Artificial Sequence
  Description of Artificial Sequence: Synthetic oligonucleotide
  Antisense strand to SEQ ID NO: 898974
uaauacacaccuuuccuaa

SEQ ID NO: 898976 - RNA, 19 nt, Artificial Sequence
  Description of Artificial Sequence: Synthetic oligonucleotide
  Sense strand starting at position 3980 of SEQ ID NO: 588924
aaagguguguauuagggaa

SEQ ID NO: 898977 - RNA, 19 nt, Artificial Sequence
  Description of Artificial Sequence: Synthetic oligonucleotide
  Antisense strand to SEQ ID NO: 898976
uucccuaauacacaccuuu

SEQ ID NO: 898978 - RNA, 19 nt, Artificial Sequence
  Description of Artificial Sequence: Synthetic oligonucleotide
  Sense strand starting at position 54 of SEQ ID NO: 588925
gcccgauacuucccuaaua

SEQ ID NO: 898979 - RNA, 19 nt, Artificial Sequence
  Description of Artificial Sequence: Synthetic oligonucleotide
  Antisense strand to SEQ ID NO: 898978
uauuagggaaguaucgggc

SEQ ID NO: 898980 - RNA, 19 nt, Artificial Sequence
  Description of Artificial Sequence: Synthetic oligonucleotide
  Sense strand starting at position 852 of SEQ ID NO: 588925
ccaaauuuguagggacagu

SEQ ID NO: 898981 - RNA, 19 nt, Artificial Sequence
  Description of Artificial Sequence: Synthetic oligonucleotide
  Antisense strand to SEQ ID NO: 898980
acugucccuacaaauuugg

SEQ ID NO: 898982 - RNA, 19 nt, Artificial Sequence
  Description of Artificial Sequence: Synthetic oligonucleotide
  Sense strand starting at position 894 of SEQ ID NO: 588925
ggcugugucuuggacucau

SEQ ID NO: 898983 - RNA, 19 nt, Artificial Sequence
  Description of Artificial Sequence: Synthetic oligonucleotide
  Antisense strand to SEQ ID NO: 898982
augaguccaagacacagcc

SEQ ID NO: 898984 - RNA, 19 nt, Artificial Sequence
  Description of Artificial Sequence: Synthetic oligonucleotide
  Sense strand starting at position 905 of SEQ ID NO: 588925
ggacucaucccuggacagu

SEQ ID NO: 898985 - RNA, 19 nt, Artificial Sequence
  Description of Artificial Sequence: Synthetic oligonucleotide
  Antisense strand to SEQ ID NO: 898984
acuguccagggaugagucc

SEQ ID NO: 898986 - RNA, 19 nt, Artificial Sequence
  Description of Artificial Sequence: Synthetic oligonucleotide
  Sense strand starting at position 1019 of SEQ ID NO: 588925
ccucuuaauguuuaccgga

SEQ ID NO: 898987 - RNA, 19 nt, Artificial Sequence
  Description of Artificial Sequence: Synthetic oligonucleotide
  Antisense strand to SEQ ID NO: 898986
uccgguaaacauuaagagg

SEQ ID NO: 898988 - RNA, 19 nt, Artificial Sequence
  Description of Artificial Sequence: Synthetic oligonucleotide
  Sense strand starting at position 1021 of SEQ ID NO: 588925
ucuuaauguuuaccggaaa

SEQ ID NO: 898989 - RNA, 19 nt, Artificial Sequence
  Description of Artificial Sequence: Synthetic oligonucleotide
  Antisense strand to SEQ ID NO: 898988
uuuccgguaaacauuaaga

SEQ ID NO: 898990 - RNA, 19 nt, Artificial Sequence
  Description of Artificial Sequence: Synthetic oligonucleotide
  Sense strand starting at position 1249 of SEQ ID NO: 588925
ucuacucaucugggaagca

SEQ ID NO: 898991 - RNA, 19 nt, Artificial Sequence
  Description of Artificial Sequence: Synthetic oligonucleotide
  Antisense strand to SEQ ID NO: 898990
ugcuucccagaugaguaga

SEQ ID NO: 898992 - RNA, 19 nt, Artificial Sequence
  Description of Artificial Sequence: Synthetic oligonucleotide
  Sense strand starting at position 1375 of SEQ ID NO: 588925
ggcucccaacucugaaaga

SEQ ID NO: 898993 - RNA, 19 nt, Artificial Sequence
  Description of Artificial Sequence: Synthetic oligonucleotide
  Antisense strand to SEQ ID NO: 898992
ucuuucagaguugggagcc

SEQ ID NO: 898994 - RNA, 19 nt, Artificial Sequence
  Description of Artificial Sequence: Synthetic oligonucleotide
  Sense strand starting at position 2407 of SEQ ID NO: 588925
gugacaaguuccguauuaa

SEQ ID NO: 898995 - RNA, 19 nt, Artificial Sequence
  Description of Artificial Sequence: Synthetic oligonucleotide
  Antisense strand to SEQ ID NO: 898994
uuaauacggaacuugucac

SEQ ID NO: 898996 - RNA, 19 nt, Artificial Sequence
  Description of Artificial Sequence: Synthetic oligonucleotide
  Sense strand starting at position 2408 of SEQ ID NO: 588925
ugacaaguuccguauuaaa

SEQ ID NO: 898997 - RNA, 19 nt, Artificial Sequence
  Description of Artificial Sequence: Synthetic oligonucleotide
  Antisense strand to SEQ ID NO: 898996
uuuaauacggaacuuguca

SEQ ID NO: 898998 - RNA, 19 nt, Artificial Sequence
  Description of Artificial Sequence: Synthetic oligonucleotide
  Sense strand starting at position 2436 of SEQ ID NO: 588925
guggaauuguggucgugug

SEQ ID NO: 898999 - RNA, 19 nt, Artificial Sequence
  Description of Artificial Sequence: Synthetic oligonucleotide
  Antisense strand to SEQ ID NO: 898998
cacacgaccacaauuccac

SEQ ID NO: 899000 - RNA, 19 nt, Artificial Sequence
  Description of Artificial Sequence: Synthetic oligonucleotide
  Sense strand starting at position 2469 of SEQ ID NO: 588925
agcgcuuuguccucacaac

SEQ ID NO: 899001 - RNA, 19 nt, Artificial Sequence
  Description of Artificial Sequence: Synthetic oligonucleotide
  Antisense strand to SEQ ID NO: 899000
guugugaggacaaagcgcu

SEQ ID NO: 899002 - RNA, 19 nt, Artificial Sequence
  Description of Artificial Sequence: Synthetic oligonucleotide
  Sense strand starting at position 2522 of SEQ ID NO: 588925
agagaaggcucgagaguua

SEQ ID NO: 899003 - RNA, 19 nt, Artificial Sequence
  Description of Artificial Sequence: Synthetic oligonucleotide
  Antisense strand to SEQ ID NO: 899002
uaacucucgagccuucucu

SEQ ID NO: 899004 - RNA, 19 nt, Artificial Sequence
  Description of Artificial Sequence: Synthetic oligonucleotide
  Sense strand starting at position 2529 of SEQ ID NO: 588925
gcucgagaguuacuuccga

SEQ ID NO: 899005 - RNA, 19 nt, Artificial Sequence
  Description of Artificial Sequence: Synthetic oligonucleotide
  Antisense strand to SEQ ID NO: 899004
ucggaaguaacucucgagc

SEQ ID NO: 899006 - RNA, 19 nt, Artificial Sequence
  Description of Artificial Sequence: Synthetic oligonucleotide
  Sense strand starting at position 2587 of SEQ ID NO: 588925
agcccagggcucugaaagu

SEQ ID NO: 899007 - RNA, 19 nt, Artificial Sequence
  Description of Artificial Sequence: Synthetic oligonucleotide
  Antisense strand to SEQ ID NO: 899006
acuuucagagcccugggcu

SEQ ID NO: 899008 - RNA, 19 nt, Artificial Sequence
  Description of Artificial Sequence: Synthetic oligonucleotide
  Sense strand starting at position 2600 of SEQ ID NO: 588925
gaaaguaaagcguaucuaa

SEQ ID NO: 899009 - RNA, 19 nt, Artificial Sequence
  Description of Artificial Sequence: Synthetic oligonucleotide
  Antisense strand to SEQ ID NO: 899008
uuagauacgcuuuacuuuc

SEQ ID NO: 899010 - RNA, 19 nt, Artificial Sequence
  Description of Artificial Sequence: Synthetic oligonucleotide
  Sense strand starting at position 2772 of SEQ ID NO: 588925
cucauccucugagagcuua

SEQ ID NO: 899011 - RNA, 19 nt, Artificial Sequence
  Description of Artificial Sequence: Synthetic oligonucleotide
  Antisense strand to SEQ ID NO: 899010
uaagcucucagaggaugag

SEQ ID NO: 899012 - RNA, 19 nt, Artificial Sequence
  Description of Artificial Sequence: Synthetic oligonucleotide
  Sense strand starting at position 2792 of SEQ ID NO: 588925
aggcacuuucuguguacau

SEQ ID NO: 899013 - RNA, 19 nt, Artificial Sequence
  Description of Artificial Sequence: Synthetic oligonucleotide
  Antisense strand to SEQ ID NO: 899012
auguacacagaaagugccu

SEQ ID NO: 899014 - RNA, 19 nt, Artificial Sequence
  Description of Artificial Sequence: Synthetic oligonucleotide
  Sense strand starting at position 2793 of SEQ ID NO: 588925
ggcacuuucuguguacauu

SEQ ID NO: 899015 - RNA, 19 nt, Artificial Sequence
  Description of Artificial Sequence: Synthetic oligonucleotide
  Antisense strand to SEQ ID NO: 899014
aauguacacagaaagugcc

SEQ ID NO: 899016 - RNA, 19 nt, Artificial Sequence
  Description of Artificial Sequence: Synthetic oligonucleotide
  Sense strand starting at position 2819 of SEQ ID NO: 588925
cuuuacauuuacgaugagu

SEQ ID NO: 899017 - RNA, 19 nt, Artificial Sequence
  Description of Artificial Sequence: Synthetic oligonucleotide
  Antisense strand to SEQ ID NO: 899016
acucaucguaaauguaaag

SEQ ID NO: 899018 - RNA, 19 nt, Artificial Sequence
  Description of Artificial Sequence: Synthetic oligonucleotide
  Sense strand starting at position 2845 of SEQ ID NO: 588925
auggaaagcuguuaagaga

SEQ ID NO: 899019 - RNA, 19 nt, Artificial Sequence
  Description of Artificial Sequence: Synthetic oligonucleotide
  Antisense strand to SEQ ID NO: 899018
ucucuuaacagcuuuccau

SEQ ID NO: 899020 - RNA, 19 nt, Artificial Sequence
  Description of Artificial Sequence: Synthetic oligonucleotide
  Sense strand starting at position 2858 of SEQ ID NO: 588925
aagagagcucugugagcca

SEQ ID NO: 899021 - RNA, 19 nt, Artificial Sequence
  Description of Artificial Sequence: Synthetic oligonucleotide
  Antisense strand to SEQ ID NO: 899020
uggcucacagagcucucuu

SEQ ID NO: 899022 - RNA, 19 nt, Artificial Sequence
  Description of Artificial Sequence: Synthetic oligonucleotide
  Sense strand starting at position 2861 of SEQ ID NO: 588925
agagcucugugagccauua

SEQ ID NO: 899023 - RNA, 19 nt, Artificial Sequence
  Description of Artificial Sequence: Synthetic oligonucleotide
  Antisense strand to SEQ ID NO: 899022
uaauggcucacagagcucu

SEQ ID NO: 899024 - RNA, 19 nt, Artificial Sequence
  Description of Artificial Sequence: Synthetic oligonucleotide
  Sense strand starting at position 2913 of SEQ ID NO: 588925
accacuagugccugacuaa

SEQ ID NO: 899025 - RNA, 19 nt, Artificial Sequence
  Description of Artificial Sequence: Synthetic oligonucleotide
  Antisense strand to SEQ ID NO: 899024
uuagucaggcacuaguggu

SEQ ID NO: 899026 - RNA, 19 nt, Artificial Sequence
  Description of Artificial Sequence: Synthetic oligonucleotide
  Sense strand starting at position 2914 of SEQ ID NO: 588925
ccacuagugccugacuaag

SEQ ID NO: 899027 - RNA, 19 nt, Artificial Sequence
  Description of Artificial Sequence: Synthetic oligonucleotide
  Antisense strand to SEQ ID NO: 899026
cuuagucaggcacuagugg

SEQ ID NO: 899028 - RNA, 19 nt, Artificial Sequence
  Description of Artificial Sequence: Synthetic oligonucleotide
  Sense strand starting at position 2925 of SEQ ID NO: 588925
ugacuaagcuacuuaguaa

SEQ ID NO: 899029 - RNA, 19 nt, Artificial Sequence
  Description of Artificial Sequence: Synthetic oligonucleotide
  Antisense strand to SEQ ID NO: 899028
uuacuaaguagcuuaguca

SEQ ID NO: 899030 - RNA, 19 nt, Artificial Sequence
  Description of Artificial Sequence: Synthetic oligonucleotide
  Sense strand starting at position 3249 of SEQ ID NO: 588925
acuguagcugcuuauuaaa

SEQ ID NO: 899031 - RNA, 19 nt, Artificial Sequence
  Description of Artificial Sequence: Synthetic oligonucleotide
  Antisense strand to SEQ ID NO: 899030
uuuaauaagcagcuacagu

SEQ ID NO: 899032 - RNA, 19 nt, Artificial Sequence
  Description of Artificial Sequence: Synthetic oligonucleotide
  Sense strand starting at position 3280 of SEQ ID NO: 588925
ggaugaauggugcaucuua

SEQ ID NO: 899033 - RNA, 19 nt, Artificial Sequence
  Description of Artificial Sequence: Synthetic oligonucleotide
  Antisense strand to SEQ ID NO: 899032
uaagaugcaccauucaucc

SEQ ID NO: 899034 - RNA, 19 nt, Artificial Sequence
  Description of Artificial Sequence: Synthetic oligonucleotide
  Sense strand starting at position 3293 of SEQ ID NO: 588925
aucuuagugcaguggaaua

SEQ ID NO: 899035 - RNA, 19 nt, Artificial Sequence
  Description of Artificial Sequence: Synthetic oligonucleotide
  Antisense strand to SEQ ID NO: 899034
uauuccacugcacuaagau

SEQ ID NO: 899036 - RNA, 19 nt, Artificial Sequence
  Description of Artificial Sequence: Synthetic oligonucleotide
  Sense strand starting at position 3311 of SEQ ID NO: 588925
acaucuagauucuugagua

SEQ ID NO: 899037 - RNA, 19 nt, Artificial Sequence
  Description of Artificial Sequence: Synthetic oligonucleotide
  Antisense strand to SEQ ID NO: 899036
uacucaagaaucuagaugu

SEQ ID NO: 899038 - RNA, 19 nt, Artificial Sequence
  Description of Artificial Sequence: Synthetic oligonucleotide
  Sense strand starting at position 3335 of SEQ ID NO: 588925
gcaugaguuacucaggguc

SEQ ID NO: 899039 - RNA, 19 nt, Artificial Sequence
  Description of Artificial Sequence: Synthetic oligonucleotide
  Antisense strand to SEQ ID NO: 899038
gacccugaguaacucaugc

SEQ ID NO: 899040 - RNA, 19 nt, Artificial Sequence
  Description of Artificial Sequence: Synthetic oligonucleotide
  Sense strand starting at position 3351 of SEQ ID NO: 588925
gucgugguugguggucaaa

SEQ ID NO: 899041 - RNA, 19 nt, Artificial Sequence
  Description of Artificial Sequence: Synthetic oligonucleotide
  Antisense strand to SEQ ID NO: 899040
uuugaccaccaaccacgac

SEQ ID NO: 899042 - RNA, 19 nt, Artificial Sequence
  Description of Artificial Sequence: Synthetic oligonucleotide
  Sense strand starting at position 3506 of SEQ ID NO: 588925
acuggagucugucuuggaa

SEQ ID NO: 899043 - RNA, 19 nt, Artificial Sequence
  Description of Artificial Sequence: Synthetic oligonucleotide
  Antisense strand to SEQ ID NO: 899042
uuccaagacagacuccagu

SEQ ID NO: 899044 - RNA, 19 nt, Artificial Sequence
  Description of Artificial Sequence: Synthetic oligonucleotide
  Sense strand starting at position 3613 of SEQ ID NO: 588925
guggcaguucugcagcaga

SEQ ID NO: 899045 - RNA, 19 nt, Artificial Sequence
  Description of Artificial Sequence: Synthetic oligonucleotide
  Antisense strand to SEQ ID NO: 899044
ucugcugcagaacugccac

SEQ ID NO: 899046 - RNA, 19 nt, Artificial Sequence
  Description of Artificial Sequence: Synthetic oligonucleotide
  Sense strand starting at position 3627 of SEQ ID NO: 588925
gcagaagcaucugccacaa

SEQ ID NO: 899047 - RNA, 19 nt, Artificial Sequence
  Description of Artificial Sequence: Synthetic oligonucleotide
  Antisense strand to SEQ ID NO: 899046
uuguggcagaugcuucugc

SEQ ID NO: 899048 - RNA, 19 nt, Artificial Sequence
  Description of Artificial Sequence: Synthetic oligonucleotide
  Sense strand starting at position 3782 of SEQ ID NO: 588925
ggccuuaugcucugucacu

SEQ ID NO: 899049 - RNA, 19 nt, Artificial Sequence
  Description of Artificial Sequence: Synthetic oligonucleotide
  Antisense strand to SEQ ID NO: 899048
agugacagagcauaaggcc

SEQ ID NO: 899050 - RNA, 19 nt, Artificial Sequence
  Description of Artificial Sequence: Synthetic oligonucleotide
  Sense strand starting at position 3824 of SEQ ID NO: 588925
agcugaaccugauugcaga

SEQ ID NO: 899051 - RNA, 19 nt, Artificial Sequence
  Description of Artificial Sequence: Synthetic oligonucleotide
  Antisense strand to SEQ ID NO: 899050
ucugcaaucagguucagcu

SEQ ID NO: 899052 - RNA, 19 nt, Artificial Sequence
  Description of Artificial Sequence: Synthetic oligonucleotide
  Sense strand starting at position 3840 of SEQ ID NO: 588925
agaguuggaguccagaguu

SEQ ID NO: 899053 - RNA, 19 nt, Artificial Sequence
  Description of Artificial Sequence: Synthetic oligonucleotide
  Antisense strand to SEQ ID NO: 899052
aacucuggacuccaacucu

SEQ ID NO: 899054 - RNA, 19 nt, Artificial Sequence
  Description of Artificial Sequence: Synthetic oligonucleotide
  Sense strand starting at position 3848 of SEQ ID NO: 588925
aguccagaguucuggcuga

SEQ ID NO: 899055 - RNA, 19 nt, Artificial Sequence
  Description of Artificial Sequence: Synthetic oligonucleotide
  Antisense strand to SEQ ID NO: 899054
ucagccagaacucuggacu

SEQ ID NO: 899056 - RNA, 19 nt, Artificial Sequence
  Description of Artificial Sequence: Synthetic oligonucleotide
  Sense strand starting at position 3852 of SEQ ID NO: 588925
cagaguucuggcugagccu

SEQ ID NO: 899057 - RNA, 19 nt, Artificial Sequence
  Description of Artificial Sequence: Synthetic oligonucleotide
  Antisense strand to SEQ ID NO: 899056
aggcucagccagaacucug

SEQ ID NO: 899058 - RNA, 19 nt, Artificial Sequence
  Description of Artificial Sequence: Synthetic oligonucleotide
  Sense strand starting at position 922 of SEQ ID NO: 588926
cgggaacaucccgaguaca

SEQ ID NO: 899059 - RNA, 19 nt, Artificial Sequence
  Description of Artificial Sequence: Synthetic oligonucleotide
  Antisense strand to SEQ ID NO: 899058
uguacucgggauguucccg

SEQ ID NO: 899060 - RNA, 19 nt, Artificial Sequence
  Description of Artificial Sequence: Synthetic oligonucleotide
  Sense strand starting at position 1122 of SEQ ID NO: 588926
aaugcauucgcuuggaaac

SEQ ID NO: 899061 - RNA, 19 nt, Artificial Sequence
  Description of Artificial Sequence: Synthetic oligonucleotide
  Antisense strand to SEQ ID NO: 899060
guuuccaagcgaaugcauu

SEQ ID NO: 899062 - RNA, 19 nt, Artificial Sequence
  Description of Artificial Sequence: Synthetic oligonucleotide
  Sense strand starting at position 1123 of SEQ ID NO: 588926
augcauucgcuuggaaaca

SEQ ID NO: 899063 - RNA, 19 nt, Artificial Sequence
  Description of Artificial Sequence: Synthetic oligonucleotide
  Antisense strand to SEQ ID NO: 899062
uguuuccaagcgaaugcau

SEQ ID NO: 899064 - RNA, 19 nt, Artificial Sequence
  Description of Artificial Sequence: Synthetic oligonucleotide
  Sense strand starting at position 1140 of SEQ ID NO: 588926
caguuugcggguuagauuu

SEQ ID NO: 899065 - RNA, 19 nt, Artificial Sequence
  Description of Artificial Sequence: Synthetic oligonucleotide
  Antisense strand to SEQ ID NO: 899064
aaaucuaacccgcaaacug

SEQ ID NO: 899066 - RNA, 19 nt, Artificial Sequence
  Description of Artificial Sequence: Synthetic oligonucleotide
  Sense strand starting at position 1161 of SEQ ID NO: 588926
gucacuuuggaagaauugu

SEQ ID NO: 899067 - RNA, 19 nt, Artificial Sequence
  Description of Artificial Sequence: Synthetic oligonucleotide
  Antisense strand to SEQ ID NO: 899066
acaauucuuccaaagugac

SEQ ID NO: 899068 - RNA, 19 nt, Artificial Sequence
  Description of Artificial Sequence: Synthetic oligonucleotide
  Sense strand starting at position 1170 of SEQ ID NO: 588926
gaagaauugucuuugugug

SEQ ID NO: 899069 - RNA, 19 nt, Artificial Sequence
  Description of Artificial Sequence: Synthetic oligonucleotide
  Antisense strand to SEQ ID NO: 899068
cacacaaagacaauucuuc

SEQ ID NO: 899070 - RNA, 19 nt, Artificial Sequence
  Description of Artificial Sequence: Synthetic oligonucleotide
  Sense strand starting at position 1171 of SEQ ID NO: 588926
aagaauugucuuuguguga

SEQ ID NO: 899071 - RNA, 19 nt, Artificial Sequence
  Description of Artificial Sequence: Synthetic oligonucleotide
  Antisense strand to SEQ ID NO: 899070
ucacacaaagacaauucuu

SEQ ID NO: 899072 - RNA, 19 nt, Artificial Sequence
  Description of Artificial Sequence: Synthetic oligonucleotide
  Sense strand starting at position 1172 of SEQ ID NO: 588926
agaauugucuuugugugag

SEQ ID NO: 899073 - RNA, 19 nt, Artificial Sequence
  Description of Artificial Sequence: Synthetic oligonucleotide
  Antisense strand to SEQ ID NO: 899072
cucacacaaagacaauucu

SEQ ID NO: 899074 - RNA, 19 nt, Artificial Sequence
  Description of Artificial Sequence: Synthetic oligonucleotide
  Sense strand starting at position 1180 of SEQ ID NO: 588926
cuuugugugagaggacuau

SEQ ID NO: 899075 - RNA, 19 nt, Artificial Sequence
  Description of Artificial Sequence: Synthetic oligonucleotide
  Antisense strand to SEQ ID NO: 899074
auaguccucucacacaaag

SEQ ID NO: 899076 - RNA, 19 nt, Artificial Sequence
  Description of Artificial Sequence: Synthetic oligonucleotide
  Sense strand starting at position 1200 of SEQ ID NO: 588926
gggcguugccagaggugaa

SEQ ID NO: 899077 - RNA, 19 nt, Artificial Sequence
  Description of Artificial Sequence: Synthetic oligonucleotide
  Antisense strand to SEQ ID NO: 899076
uucaccucuggcaacgccc

SEQ ID NO: 899078 - RNA, 19 nt, Artificial Sequence
  Description of Artificial Sequence: Synthetic oligonucleotide
  Sense strand starting at position 1226 of SEQ ID NO: 588926
agcuucugguggccagaua

SEQ ID NO: 899079 - RNA, 19 nt, Artificial Sequence
  Description of Artificial Sequence: Synthetic oligonucleotide
  Antisense strand to SEQ ID NO: 899078
uaucuggccaccagaagcu

SEQ ID NO: 899080 - RNA, 19 nt, Artificial Sequence
  Description of Artificial Sequence: Synthetic oligonucleotide
  Sense strand starting at position 1227 of SEQ ID NO: 588926
gcuucugguggccagauaa

SEQ ID NO: 899081 - RNA, 19 nt, Artificial Sequence
  Description of Artificial Sequence: Synthetic oligonucleotide
  Antisense strand to SEQ ID NO: 899080
uuaucuggccaccagaagc

SEQ ID NO: 899082 - RNA, 19 nt, Artificial Sequence
  Description of Artificial Sequence: Synthetic oligonucleotide
  Sense strand starting at position 1321 of SEQ ID NO: 588926
auagacuugauucgagaua

SEQ ID NO: 899083 - RNA, 19 nt, Artificial Sequence
  Description of Artificial Sequence: Synthetic oligonucleotide
  Antisense strand to SEQ ID NO: 899082
uaucucgaaucaagucuau

SEQ ID NO: 899084 - RNA, 19 nt, Artificial Sequence
  Description of Artificial Sequence: Synthetic oligonucleotide
  Sense strand starting at position 1993 of SEQ ID NO: 588926
auuuguuucucauaaggag

SEQ ID NO: 899085 - RNA, 19 nt, Artificial Sequence
  Description of Artificial Sequence: Synthetic oligonucleotide
  Antisense strand to SEQ ID NO: 899084
cuccuuaugagaaacaaau

SEQ ID NO: 899086 - RNA, 19 nt, Artificial Sequence
  Description of Artificial Sequence: Synthetic oligonucleotide
  Sense strand starting at position 2237 of SEQ ID NO: 588926
uagaauauccagugucaug

SEQ ID NO: 899087 - RNA, 19 nt, Artificial Sequence
  Description of Artificial Sequence: Synthetic oligonucleotide
  Antisense strand to SEQ ID NO: 899086
caugacacuggauauucua

SEQ ID NO: 899088 - RNA, 19 nt, Artificial Sequence
  Description of Artificial Sequence: Synthetic oligonucleotide
  Sense strand starting at position 2381 of SEQ ID NO: 588926
ugaugaaugucagccucca

SEQ ID NO: 899089 - RNA, 19 nt, Artificial Sequence
  Description of Artificial Sequence: Synthetic oligonucleotide
  Antisense strand to SEQ ID NO: 899088
uggaggcugacauucauca

SEQ ID NO: 899090 - RNA, 19 nt, Artificial Sequence
  Description of Artificial Sequence: Synthetic oligonucleotide
  Sense strand starting at position 2461 of SEQ ID NO: 588926
guggccaucucuccagauu

SEQ ID NO: 899091 - RNA, 19 nt, Artificial Sequence
  Description of Artificial Sequence: Synthetic oligonucleotide
  Antisense strand to SEQ ID NO: 899090
aaucuggagagauggccac

SEQ ID NO: 899092 - RNA, 19 nt, Artificial Sequence
  Description of Artificial Sequence: Synthetic oligonucleotide
  Sense strand starting at position 2526 of SEQ ID NO: 588926
ggcaguguccugcuuucua

SEQ ID NO: 899093 - RNA, 19 nt, Artificial Sequence
  Description of Artificial Sequence: Synthetic oligonucleotide
  Antisense strand to SEQ ID NO: 899092
uagaaagcaggacacugcc

SEQ ID NO: 899094 - RNA, 19 nt, Artificial Sequence
  Description of Artificial Sequence: Synthetic oligonucleotide
  Sense strand starting at position 2545 of SEQ ID NO: 588926
gugacauagccucaggcaa

SEQ ID NO: 899095 - RNA, 19 nt, Artificial Sequence
  Description of Artificial Sequence: Synthetic oligonucleotide
  Antisense strand to SEQ ID NO: 899094
uugccugaggcuaugucac

SEQ ID NO: 899096 - RNA, 19 nt, Artificial Sequence
  Description of Artificial Sequence: Synthetic oligonucleotide
  Sense strand starting at position 2692 of SEQ ID NO: 588926
gucacaagauugguuacuu

SEQ ID NO: 899097 - RNA, 19 nt, Artificial Sequence
  Description of Artificial Sequence: Synthetic oligonucleotide
  Antisense strand to SEQ ID NO: 899096
aaguaaccaaucuugugac

SEQ ID NO: 899098 - RNA, 19 nt, Artificial Sequence
  Description of Artificial Sequence: Synthetic oligonucleotide
  Sense strand starting at position 2693 of SEQ ID NO: 588926
ucacaagauugguuacuuu

SEQ ID NO: 899099 - RNA, 19 nt, Artificial Sequence
  Description of Artificial Sequence: Synthetic oligonucleotide
  Antisense strand to SEQ ID NO: 899098
aaaguaaccaaucuuguga

SEQ ID NO: 899100 - RNA, 19 nt, Artificial Sequence
  Description of Artificial Sequence: Synthetic oligonucleotide
  Sense strand starting at position 2704 of SEQ ID NO: 588926
guuacuuucuuguuggaaa

SEQ ID NO: 899101 - RNA, 19 nt, Artificial Sequence
  Description of Artificial Sequence: Synthetic oligonucleotide
  Antisense strand to SEQ ID NO: 899100
uuuccaacaagaaaguaac

SEQ ID NO: 899102 - RNA, 19 nt, Artificial Sequence
  Description of Artificial Sequence: Synthetic oligonucleotide
  Sense strand starting at position 2749 of SEQ ID NO: 588926
ugaggucacagaggucuau

SEQ ID NO: 899103 - RNA, 19 nt, Artificial Sequence
  Description of Artificial Sequence: Synthetic oligonucleotide
  Antisense strand to SEQ ID NO: 899102
auagaccucugugaccuca

SEQ ID NO: 899104 - RNA, 19 nt, Artificial Sequence
  Description of Artificial Sequence: Synthetic oligonucleotide
  Sense strand starting at position 2762 of SEQ ID NO: 588926
gucuauagagagugaauaa

SEQ ID NO: 899105 - RNA, 19 nt, Artificial Sequence
  Description of Artificial Sequence: Synthetic oligonucleotide
  Antisense strand to SEQ ID NO: 899104
uuauucacucucuauagac

SEQ ID NO: 899106 - RNA, 19 nt, Artificial Sequence
  Description of Artificial Sequence: Synthetic oligonucleotide
  Sense strand starting at position 2843 of SEQ ID NO: 588926
ggagggauacaggguugua

SEQ ID NO: 899107 - RNA, 19 nt, Artificial Sequence
  Description of Artificial Sequence: Synthetic oligonucleotide
  Antisense strand to SEQ ID NO: 899106
uacaacccuguaucccucc

SEQ ID NO: 899108 - RNA, 19 nt, Artificial Sequence
  Description of Artificial Sequence: Synthetic oligonucleotide
  Sense strand starting at position 2846 of SEQ ID NO: 588926
gggauacaggguuguagaa

SEQ ID NO: 899109 - RNA, 19 nt, Artificial Sequence
  Description of Artificial Sequence: Synthetic oligonucleotide
  Antisense strand to SEQ ID NO: 899108
uucuacaacccuguauccc

SEQ ID NO: 899110 - RNA, 19 nt, Artificial Sequence
  Description of Artificial Sequence: Synthetic oligonucleotide
  Sense strand starting at position 2882 of SEQ ID NO: 588926
ccaaauaggugagaucaga

SEQ ID NO: 899111 - RNA, 19 nt, Artificial Sequence
  Description of Artificial Sequence: Synthetic oligonucleotide
  Antisense strand to SEQ ID NO: 899110
ucugaucucaccuauuugg

SEQ ID NO: 899112 - RNA, 19 nt, Artificial Sequence
  Description of Artificial Sequence: Synthetic oligonucleotide
  Sense strand starting at position 2899 of SEQ ID NO: 588926
gaguucugccauugaaagg

SEQ ID NO: 899113 - RNA, 19 nt, Artificial Sequence
  Description of Artificial Sequence: Synthetic oligonucleotide
  Antisense strand to SEQ ID NO: 899112
ccuuucaauggcagaacuc

SEQ ID NO: 899114 - RNA, 19 nt, Artificial Sequence
  Description of Artificial Sequence: Synthetic oligonucleotide
  Sense strand starting at position 2990 of SEQ ID NO: 588926
gggaguuagcagggccaga

SEQ ID NO: 899115 - RNA, 19 nt, Artificial Sequence
  Description of Artificial Sequence: Synthetic oligonucleotide
  Antisense strand to SEQ ID NO: 899114
ucuggcccugcuaacuccc

SEQ ID NO: 899116 - RNA, 19 nt, Artificial Sequence
  Description of Artificial Sequence: Synthetic oligonucleotide
  Sense strand starting at position 3045 of SEQ ID NO: 588926
uugugugcauuuccugaaa

SEQ ID NO: 899117 - RNA, 19 nt, Artificial Sequence
  Description of Artificial Sequence: Synthetic oligonucleotide
  Antisense strand to SEQ ID NO: 899116
uuucaggaaaugcacacaa

SEQ ID NO: 899118 - RNA, 19 nt, Artificial Sequence
  Description of Artificial Sequence: Synthetic oligonucleotide
  Sense strand starting at position 3161 of SEQ ID NO: 588926
ugugauaaagcagguaaga

SEQ ID NO: 899119 - RNA, 19 nt, Artificial Sequence
  Description of Artificial Sequence: Synthetic oligonucleotide
  Antisense strand to SEQ ID NO: 899118
ucuuaccugcuuuaucaca

SEQ ID NO: 899120 - RNA, 19 nt, Artificial Sequence
  Description of Artificial Sequence: Synthetic oligonucleotide
  Sense strand starting at position 3207 of SEQ ID NO: 588926
ugguucugugacugugauu

SEQ ID NO: 899121 - RNA, 19 nt, Artificial Sequence
  Description of Artificial Sequence: Synthetic oligonucleotide
  Antisense strand to SEQ ID NO: 899120
aaucacagucacagaacca

SEQ ID NO: 899122 - RNA, 19 nt, Artificial Sequence
  Description of Artificial Sequence: Synthetic oligonucleotide
  Sense strand starting at position 3237 of SEQ ID NO: 588926
aagcucuucccauguugga

SEQ ID NO: 899123 - RNA, 19 nt, Artificial Sequence
  Description of Artificial Sequence: Synthetic oligonucleotide
  Antisense strand to SEQ ID NO: 899122
uccaacaugggaagagcuu

SEQ ID NO: 899124 - RNA, 19 nt, Artificial Sequence
  Description of Artificial Sequence: Synthetic oligonucleotide
  Sense strand starting at position 3293 of SEQ ID NO: 588926
gacacuugcggagacuaau

SEQ ID NO: 899125 - RNA, 19 nt, Artificial Sequence
  Description of Artificial Sequence: Synthetic oligonucleotide
  Antisense strand to SEQ ID NO: 899124
auuagucuccgcaaguguc

SEQ ID NO: 899126 - RNA, 19 nt, Artificial Sequence
  Description of Artificial Sequence: Synthetic oligonucleotide
  Sense strand starting at position 3299 of SEQ ID NO: 588926
ugcggagacuaaucugguu

SEQ ID NO: 899127 - RNA, 19 nt, Artificial Sequence
  Description of Artificial Sequence: Synthetic oligonucleotide
  Antisense strand to SEQ ID NO: 899126
aaccagauuagucuccgca

SEQ ID NO: 899128 - RNA, 19 nt, Artificial Sequence
  Description of Artificial Sequence: Synthetic oligonucleotide
  Sense strand starting at position 3339 of SEQ ID NO: 588926
gaagcucugucaccuugau

SEQ ID NO: 899129 - RNA, 19 nt, Artificial Sequence
  Description of Artificial Sequence: Synthetic oligonucleotide
  Antisense strand to SEQ ID NO: 899128
aucaaggugacagagcuuc

SEQ ID NO: 899130 - RNA, 19 nt, Artificial Sequence
  Description of Artificial Sequence: Synthetic oligonucleotide
  Sense strand starting at position 3450 of SEQ ID NO: 588926
ccgucaacccuguaaagca

SEQ ID NO: 899131 - RNA, 19 nt, Artificial Sequence
  Description of Artificial Sequence: Synthetic oligonucleotide
  Antisense strand to SEQ ID NO: 899130
ugcuuuacaggguugacgg

SEQ ID NO: 899132 - RNA, 19 nt, Artificial Sequence
  Description of Artificial Sequence: Synthetic oligonucleotide
  Sense strand starting at position 3479 of SEQ ID NO: 588926
cccuguuuauagccaaaga

SEQ ID NO: 899133 - RNA, 19 nt, Artificial Sequence
  Description of Artificial Sequence: Synthetic oligonucleotide
  Antisense strand to SEQ ID NO: 899132
ucuuuggcuauaaacaggg

SEQ ID NO: 899134 - RNA, 19 nt, Artificial Sequence
  Description of Artificial Sequence: Synthetic oligonucleotide
  Sense strand starting at position 3759 of SEQ ID NO: 588926
gcccuuuguguguccgaga

SEQ ID NO: 899135 - RNA, 19 nt, Artificial Sequence
  Description of Artificial Sequence: Synthetic oligonucleotide
  Antisense strand to SEQ ID NO: 899134
ucucggacacacaaagggc

SEQ ID NO: 899136 - RNA, 19 nt, Artificial Sequence
  Description of Artificial Sequence: Synthetic oligonucleotide
  Sense strand starting at position 3821 of SEQ ID NO: 588926
cugcaagagucccuggcau

SEQ ID NO: 899137 - RNA, 19 nt, Artificial Sequence
  Description of Artificial Sequence: Synthetic oligonucleotide
  Antisense strand to SEQ ID NO: 899136
augccagggacucuugcag

SEQ ID NO: 899138 - RNA, 19 nt, Artificial Sequence
  Description of Artificial Sequence: Synthetic oligonucleotide
  Sense strand starting at position 437 of SEQ ID NO: 588927
uugugucuuuaagcacaaa

SEQ ID NO: 899139 - RNA, 19 nt, Artificial Sequence
  Description of Artificial Sequence: Synthetic oligonucleotide
  Antisense strand to SEQ ID NO: 899138
uuugugcuuaaagacacaa

SEQ ID NO: 899140 - RNA, 19 nt, Artificial Sequence
  Description of Artificial Sequence: Synthetic oligonucleotide
  Sense strand starting at position 481 of SEQ ID NO: 588927
ucgucaaguugauuacuuu

SEQ ID NO: 899141 - RNA, 19 nt, Artificial Sequence
  Description of Artificial Sequence: Synthetic oligonucleotide
  Antisense strand to SEQ ID NO: 899140
aaaguaaucaacuugacga

SEQ ID NO: 899142 - RNA, 19 nt, Artificial Sequence
  Description of Artificial Sequence: Synthetic oligonucleotide
  Sense strand starting at position 664 of SEQ ID NO: 588927
caagccuuccgauaagucu

SEQ ID NO: 899143 - RNA, 19 nt, Artificial Sequence
  Description of Artificial Sequence: Synthetic oligonucleotide
  Antisense strand to SEQ ID NO: 899142
agacuuaucggaaggcuug

SEQ ID NO: 899144 - RNA, 19 nt, Artificial Sequence
  Description of Artificial Sequence: Synthetic oligonucleotide
  Sense strand starting at position 672 of SEQ ID NO: 588927
ccgauaagucuaggccuca

SEQ ID NO: 899145 - RNA, 19 nt, Artificial Sequence
  Description of Artificial Sequence: Synthetic oligonucleotide
  Antisense strand to SEQ ID NO: 899144
ugaggccuagacuuaucgg

SEQ ID NO: 899146 - RNA, 19 nt, Artificial Sequence
  Description of Artificial Sequence: Synthetic oligonucleotide
  Sense strand starting at position 677 of SEQ ID NO: 588927
aagucuaggccucagaguu

SEQ ID NO: 899147 - RNA, 19 nt, Artificial Sequence
  Description of Artificial Sequence: Synthetic oligonucleotide
  Antisense strand to SEQ ID NO: 899146
aacucugaggccuagacuu

SEQ ID NO: 899148 - RNA, 19 nt, Artificial Sequence
  Description of Artificial Sequence: Synthetic oligonucleotide
  Sense strand starting at position 685 of SEQ ID NO: 588927
gccucagaguuugaugacu

SEQ ID NO: 899149 - RNA, 19 nt, Artificial Sequence
  Description of Artificial Sequence: Synthetic oligonucleotide
  Antisense strand to SEQ ID NO: 899148
agucaucaaacucugaggc

SEQ ID NO: 899150 - RNA, 19 nt, Artificial Sequence
  Description of Artificial Sequence: Synthetic oligonucleotide
  Sense strand starting at position 687 of SEQ ID NO: 588927
cucagaguuugaugacuca

SEQ ID NO: 899151 - RNA, 19 nt, Artificial Sequence
  Description of Artificial Sequence: Synthetic oligonucleotide
  Antisense strand to SEQ ID NO: 899150
ugagucaucaaacucugag

SEQ ID NO: 899152 - RNA, 19 nt, Artificial Sequence
  Description of Artificial Sequence: Synthetic oligonucleotide
  Sense strand starting at position 690 of SEQ ID NO: 588927
agaguuugaugacucacua

SEQ ID NO: 899153 - RNA, 19 nt, Artificial Sequence
  Description of Artificial Sequence: Synthetic oligonucleotide
  Antisense strand to SEQ ID NO: 899152
uagugagucaucaaacucu

SEQ ID NO: 899154 - RNA, 19 nt, Artificial Sequence
  Description of Artificial Sequence: Synthetic oligonucleotide
  Sense strand starting at position 831 of SEQ ID NO: 588927
ggauaaggcuguuaauuug

SEQ ID NO: 899155 - RNA, 19 nt, Artificial Sequence
  Description of Artificial Sequence: Synthetic oligonucleotide
  Antisense strand to SEQ ID NO: 899154
caaauuaacagccuuaucc

SEQ ID NO: 899156 - RNA, 19 nt, Artificial Sequence
  Description of Artificial Sequence: Synthetic oligonucleotide
  Sense strand starting at position 837 of SEQ ID NO: 588927
ggcuguuaauuugucgaca

SEQ ID NO: 899157 - RNA, 19 nt, Artificial Sequence
  Description of Artificial Sequence: Synthetic oligonucleotide
  Antisense strand to SEQ ID NO: 899156
ugucgacaaauuaacagcc

SEQ ID NO: 899158 - RNA, 19 nt, Artificial Sequence
  Description of Artificial Sequence: Synthetic oligonucleotide
  Sense strand starting at position 838 of SEQ ID NO: 588927
gcuguuaauuugucgacau

SEQ ID NO: 899159 - RNA, 19 nt, Artificial Sequence
  Description of Artificial Sequence: Synthetic oligonucleotide
  Antisense strand to SEQ ID NO: 899158
augucgacaaauuaacagc

SEQ ID NO: 899160 - RNA, 19 nt, Artificial Sequence
  Description of Artificial Sequence: Synthetic oligonucleotide
  Sense strand starting at position 839 of SEQ ID NO: 588927
cuguuaauuugucgacaua

SEQ ID NO: 899161 - RNA, 19 nt, Artificial Sequence
  Description of Artificial Sequence: Synthetic oligonucleotide
  Antisense strand to SEQ ID NO: 899160
uaugucgacaaauuaacag

SEQ ID NO: 899162 - RNA, 19 nt, Artificial Sequence
  Description of Artificial Sequence: Synthetic oligonucleotide
  Sense strand starting at position 850 of SEQ ID NO: 588927
ucgacauaacgggauucuu

SEQ ID NO: 899163 - RNA, 19 nt, Artificial Sequence
  Description of Artificial Sequence: Synthetic oligonucleotide
  Antisense strand to SEQ ID NO: 899162
aagaaucccguuaugucga

SEQ ID NO: 899164 - RNA, 19 nt, Artificial Sequence
  Description of Artificial Sequence: Synthetic oligonucleotide
  Sense strand starting at position 881 of SEQ ID NO: 588927
ggcauaaaucugcguaacc

SEQ ID NO: 899165 - RNA, 19 nt, Artificial Sequence
  Description of Artificial Sequence: Synthetic oligonucleotide
  Antisense strand to SEQ ID NO: 899164
gguuacgcagauuuaugcc

SEQ ID NO: 899166 - RNA, 19 nt, Artificial Sequence
  Description of Artificial Sequence: Synthetic oligonucleotide
  Sense strand starting at position 882 of SEQ ID NO: 588927
gcauaaaucugcguaacca

SEQ ID NO: 899167 - RNA, 19 nt, Artificial Sequence
  Description of Artificial Sequence: Synthetic oligonucleotide
  Antisense strand to SEQ ID NO: 899166
ugguuacgcagauuuaugc

SEQ ID NO: 899168 - RNA, 19 nt, Artificial Sequence
  Description of Artificial Sequence: Synthetic oligonucleotide
  Sense strand starting at position 931 of SEQ ID NO: 588927
ugucaagcuuaaucaagaa

SEQ ID NO: 899169 - RNA, 19 nt, Artificial Sequence
  Description of Artificial Sequence: Synthetic oligonucleotide
  Antisense strand to SEQ ID NO: 899168
uucuugauuaagcuugaca

SEQ ID NO: 899170 - RNA, 19 nt, Artificial Sequence
  Description of Artificial Sequence: Synthetic oligonucleotide
  Sense strand starting at position 1049 of SEQ ID NO: 588927
cuucccuguugcucagaau

SEQ ID NO: 899171 - RNA, 19 nt, Artificial Sequence
  Description of Artificial Sequence: Synthetic oligonucleotide
  Antisense strand to SEQ ID NO: 899170
auucugagcaacagggaag

SEQ ID NO: 899172 - RNA, 19 nt, Artificial Sequence
  Description of Artificial Sequence: Synthetic oligonucleotide
  Sense strand starting at position 1088 of SEQ ID NO: 588927
aggagacuaucagggagau

SEQ ID NO: 899173 - RNA, 19 nt, Artificial Sequence
  Description of Artificial Sequence: Synthetic oligonucleotide
  Antisense strand to SEQ ID NO: 899172
aucucccugauagucuccu

SEQ ID NO: 899174 - RNA, 19 nt, Artificial Sequence
  Description of Artificial Sequence: Synthetic oligonucleotide
  Sense strand starting at position 1214 of SEQ ID NO: 588927
ccagcacaucugggaaaga

SEQ ID NO: 899175 - RNA, 19 nt, Artificial Sequence
  Description of Artificial Sequence: Synthetic oligonucleotide
  Antisense strand to SEQ ID NO: 899174
ucuuucccagaugugcugg

SEQ ID NO: 899176 - RNA, 19 nt, Artificial Sequence
  Description of Artificial Sequence: Synthetic oligonucleotide
  Sense strand starting at position 2594 of SEQ ID NO: 588927
ugaauugacuaaggauucu

SEQ ID NO: 899177 - RNA, 19 nt, Artificial Sequence
  Description of Artificial Sequence: Synthetic oligonucleotide
  Antisense strand to SEQ ID NO: 899176
agaauccuuagucaauuca

SEQ ID NO: 899178 - RNA, 19 nt, Artificial Sequence
  Description of Artificial Sequence: Synthetic oligonucleotide
  Sense strand starting at position 2705 of SEQ ID NO: 588927
cgggaacaucccgaguaca

SEQ ID NO: 899179 - RNA, 19 nt, Artificial Sequence
  Description of Artificial Sequence: Synthetic oligonucleotide
  Antisense strand to SEQ ID NO: 899178
uguacucgggauguucccg

SEQ ID NO: 899180 - RNA, 19 nt, Artificial Sequence
  Description of Artificial Sequence: Synthetic oligonucleotide
  Sense strand starting at position 2759 of SEQ ID NO: 588927
gcagcgugggucugugaaa

SEQ ID NO: 899181 - RNA, 19 nt, Artificial Sequence
  Description of Artificial Sequence: Synthetic oligonucleotide
  Antisense strand to SEQ ID NO: 899180
uuucacagacccacgcugc

SEQ ID NO: 899182 - RNA, 19 nt, Artificial Sequence
  Description of Artificial Sequence: Synthetic oligonucleotide
  Sense strand starting at position 2905 of SEQ ID NO: 588927
aaugcauucgcuuggaaac

SEQ ID NO: 899183 - RNA, 19 nt, Artificial Sequence
  Description of Artificial Sequence: Synthetic oligonucleotide
  Antisense strand to SEQ ID NO: 899182
guuuccaagcgaaugcauu

SEQ ID NO: 899184 - RNA, 19 nt, Artificial Sequence
  Description of Artificial Sequence: Synthetic oligonucleotide
  Sense strand starting at position 2906 of SEQ ID NO: 588927
augcauucgcuuggaaaca

SEQ ID NO: 899185 - RNA, 19 nt, Artificial Sequence
  Description of Artificial Sequence: Synthetic oligonucleotide
  Antisense strand to SEQ ID NO: 899184
uguuuccaagcgaaugcau

SEQ ID NO: 899186 - RNA, 19 nt, Artificial Sequence
  Description of Artificial Sequence: Synthetic oligonucleotide
  Sense strand starting at position 2923 of SEQ ID NO: 588927
caguuugcggguuagauuu

SEQ ID NO: 899187 - RNA, 19 nt, Artificial Sequence
  Description of Artificial Sequence: Synthetic oligonucleotide
  Antisense strand to SEQ ID NO: 899186
aaaucuaacccgcaaacug

SEQ ID NO: 899188 - RNA, 19 nt, Artificial Sequence
  Description of Artificial Sequence: Synthetic oligonucleotide
  Sense strand starting at position 2941 of SEQ ID NO: 588927
uuugucacuuuggaagaau

SEQ ID NO: 899189 - RNA, 19 nt, Artificial Sequence
  Description of Artificial Sequence: Synthetic oligonucleotide
  Antisense strand to SEQ ID NO: 899188
auucuuccaaagugacaaa

SEQ ID NO: 899190 - RNA, 19 nt, Artificial Sequence
  Description of Artificial Sequence: Synthetic oligonucleotide
  Sense strand starting at position 2944 of SEQ ID NO: 588927
gucacuuuggaagaauugu

SEQ ID NO: 899191 - RNA, 19 nt, Artificial Sequence
  Description of Artificial Sequence: Synthetic oligonucleotide
  Antisense strand to SEQ ID NO: 899190
acaauucuuccaaagugac

SEQ ID NO: 899192 - RNA, 19 nt, Artificial Sequence
  Description of Artificial Sequence: Synthetic oligonucleotide
  Sense strand starting at position 2953 of SEQ ID NO: 588927
gaagaauugucuuugugug

SEQ ID NO: 899193 - RNA, 19 nt, Artificial Sequence
  Description of Artificial Sequence: Synthetic oligonucleotide
  Antisense strand to SEQ ID NO: 899192
cacacaaagacaauucuuc

SEQ ID NO: 899194 - RNA, 19 nt, Artificial Sequence
  Description of Artificial Sequence: Synthetic oligonucleotide
  Sense strand starting at position 2954 of SEQ ID NO: 588927
aagaauugucuuuguguga

SEQ ID NO: 899195 - RNA, 19 nt, Artificial Sequence
  Description of Artificial Sequence: Synthetic oligonucleotide
  Antisense strand to SEQ ID NO: 899194
ucacacaaagacaauucuu

SEQ ID NO: 899196 - RNA, 19 nt, Artificial Sequence
  Description of Artificial Sequence: Synthetic oligonucleotide
  Sense strand starting at position 2955 of SEQ ID NO: 588927
agaauugucuuugugugag

SEQ ID NO: 899197 - RNA, 19 nt, Artificial Sequence
  Description of Artificial Sequence: Synthetic oligonucleotide
  Antisense strand to SEQ ID NO: 899196
cucacacaaagacaauucu

SEQ ID NO: 899198 - RNA, 19 nt, Artificial Sequence
  Description of Artificial Sequence: Synthetic oligonucleotide
  Sense strand starting at position 2963 of SEQ ID NO: 588927
cuuugugugagaggacuau

SEQ ID NO: 899199 - RNA, 19 nt, Artificial Sequence
  Description of Artificial Sequence: Synthetic oligonucleotide
  Antisense strand to SEQ ID NO: 899198
auaguccucucacacaaag

SEQ ID NO: 899200 - RNA, 19 nt, Artificial Sequence
  Description of Artificial Sequence: Synthetic oligonucleotide
  Sense strand starting at position 2983 of SEQ ID NO: 588927
gggcguugccagaggugaa

SEQ ID NO: 899201 - RNA, 19 nt, Artificial Sequence
  Description of Artificial Sequence: Synthetic oligonucleotide
  Antisense strand to SEQ ID NO: 899200
uucaccucuggcaacgccc

SEQ ID NO: 899202 - RNA, 19 nt, Artificial Sequence
  Description of Artificial Sequence: Synthetic oligonucleotide
  Sense strand starting at position 3009 of SEQ ID NO: 588927
agcuucugguggccagaua

SEQ ID NO: 899203 - RNA, 19 nt, Artificial Sequence
  Description of Artificial Sequence: Synthetic oligonucleotide
  Antisense strand to SEQ ID NO: 899202
uaucuggccaccagaagcu

SEQ ID NO: 899204 - RNA, 19 nt, Artificial Sequence
  Description of Artificial Sequence: Synthetic oligonucleotide
  Sense strand starting at position 3010 of SEQ ID NO: 588927
gcuucugguggccagauaa

SEQ ID NO: 899205 - RNA, 19 nt, Artificial Sequence
  Description of Artificial Sequence: Synthetic oligonucleotide
  Antisense strand to SEQ ID NO: 899204
uuaucuggccaccagaagc

SEQ ID NO: 899206 - RNA, 19 nt, Artificial Sequence
  Description of Artificial Sequence: Synthetic oligonucleotide
  Sense strand starting at position 3104 of SEQ ID NO: 588927
auagacuugauucgagaua

SEQ ID NO: 899207 - RNA, 19 nt, Artificial Sequence
  Description of Artificial Sequence: Synthetic oligonucleotide
  Antisense strand to SEQ ID NO: 899206
uaucucgaaucaagucuau

SEQ ID NO: 899208 - RNA, 19 nt, Artificial Sequence
  Description of Artificial Sequence: Synthetic oligonucleotide
  Sense strand starting at position 3105 of SEQ ID NO: 588927
uagacuugauucgagauac

SEQ ID NO: 899209 - RNA, 19 nt, Artificial Sequence
  Description of Artificial Sequence: Synthetic oligonucleotide
  Antisense strand to SEQ ID NO: 899208
guaucucgaaucaagucua

SEQ ID NO: 899210 - RNA, 19 nt, Artificial Sequence
  Description of Artificial Sequence: Synthetic oligonucleotide
  Sense strand starting at position 3137 of SEQ ID NO: 588927
uguuuaauuugcugccuaa

SEQ ID NO: 899211 - RNA, 19 nt, Artificial Sequence
  Description of Artificial Sequence: Synthetic oligonucleotide
  Antisense strand to SEQ ID NO: 899210
uuaggcagcaaauuaaaca

SEQ ID NO: 899212 - RNA, 19 nt, Artificial Sequence
  Description of Artificial Sequence: Synthetic oligonucleotide
  Sense strand starting at position 3761 of SEQ ID NO: 588927
gacggaucaucaggcauuu

SEQ ID NO: 899213 - RNA, 19 nt, Artificial Sequence
  Description of Artificial Sequence: Synthetic oligonucleotide
  Antisense strand to SEQ ID NO: 899212
aaaugccugaugauccguc

SEQ ID NO: 899214 - RNA, 19 nt, Artificial Sequence
  Description of Artificial Sequence: Synthetic oligonucleotide
  Sense strand starting at position 3774 of SEQ ID NO: 588927
gcauuuguuucucauaagg

SEQ ID NO: 899215 - RNA, 19 nt, Artificial Sequence
  Description of Artificial Sequence: Synthetic oligonucleotide
  Antisense strand to SEQ ID NO: 899214
ccuuaugagaaacaaaugc

SEQ ID NO: 899216 - RNA, 19 nt, Artificial Sequence
  Description of Artificial Sequence: Synthetic oligonucleotide
  Sense strand starting at position 3776 of SEQ ID NO: 588927
auuuguuucucauaaggag

SEQ ID NO: 899217 - RNA, 19 nt, Artificial Sequence
  Description of Artificial Sequence: Synthetic oligonucleotide
  Antisense strand to SEQ ID NO: 899216
cuccuuaugagaaacaaau

SEQ ID NO: 899218 - RNA, 19 nt, Artificial Sequence
  Description of Artificial Sequence: Synthetic oligonucleotide
  Sense strand starting at position 29 of SEQ ID NO: 588928
cuagcacuccugugaucuu

SEQ ID NO: 899219 - RNA, 19 nt, Artificial Sequence
  Description of Artificial Sequence: Synthetic oligonucleotide
  Antisense strand to SEQ ID NO: 899218
aagaucacaggagugcuag

SEQ ID NO: 899220 - RNA, 19 nt, Artificial Sequence
  Description of Artificial Sequence: Synthetic oligonucleotide
  Sense strand starting at position 36 of SEQ ID NO: 588928
uccugugaucuuugcucuu

SEQ ID NO: 899221 - RNA, 19 nt, Artificial Sequence
  Description of Artificial Sequence: Synthetic oligonucleotide
  Antisense strand to SEQ ID NO: 899220
aagagcaaagaucacagga

SEQ ID NO: 899222 - RNA, 19 nt, Artificial Sequence
  Description of Artificial Sequence: Synthetic oligonucleotide
  Sense strand starting at position 363 of SEQ ID NO: 588928
ugcaguuucugagccuuga

SEQ ID NO: 899223 - RNA, 19 nt, Artificial Sequence
  Description of Artificial Sequence: Synthetic oligonucleotide
  Antisense strand to SEQ ID NO: 899222
ucaaggcucagaaacugca

SEQ ID NO: 899224 - RNA, 19 nt, Artificial Sequence
  Description of Artificial Sequence: Synthetic oligonucleotide
  Sense strand starting at position 367 of SEQ ID NO: 588928
guuucugagccuugaguuu

SEQ ID NO: 899225 - RNA, 19 nt, Artificial Sequence
  Description of Artificial Sequence: Synthetic oligonucleotide
  Antisense strand to SEQ ID NO: 899224
aaacucaaggcucagaaac

SEQ ID NO: 899226 - RNA, 19 nt, Artificial Sequence
  Description of Artificial Sequence: Synthetic oligonucleotide
  Sense strand starting at position 411 of SEQ ID NO: 588928
agaguuaagucccaaucuc

SEQ ID NO: 899227 - RNA, 19 nt, Artificial Sequence
  Description of Artificial Sequence: Synthetic oligonucleotide
  Antisense strand to SEQ ID NO: 899226
gagauugggacuuaacucu

SEQ ID NO: 899228 - RNA, 19 nt, Artificial Sequence
  Description of Artificial Sequence: Synthetic oligonucleotide
  Sense strand starting at position 463 of SEQ ID NO: 588928
aggcuuugaucccaggaag

SEQ ID NO: 899229 - RNA, 19 nt, Artificial Sequence
  Description of Artificial Sequence: Synthetic oligonucleotide
  Antisense strand to SEQ ID NO: 899228
cuuccugggaucaaagccu

SEQ ID NO: 899230 - RNA, 19 nt, Artificial Sequence
  Description of Artificial Sequence: Synthetic oligonucleotide
  Sense strand starting at position 552 of SEQ ID NO: 588928
aguaguucugcuugugaga

SEQ ID NO: 899231 - RNA, 19 nt, Artificial Sequence
  Description of Artificial Sequence: Synthetic oligonucleotide
  Antisense strand to SEQ ID NO: 899230
ucucacaagcagaacuacu

SEQ ID NO: 899232 - RNA, 19 nt, Artificial Sequence
  Description of Artificial Sequence: Synthetic oligonucleotide
  Sense strand starting at position 554 of SEQ ID NO: 588928
uaguucugcuugugagaau

SEQ ID NO: 899233 - RNA, 19 nt, Artificial Sequence
  Description of Artificial Sequence: Synthetic oligonucleotide
  Antisense strand to SEQ ID NO: 899232
auucucacaagcagaacua

SEQ ID NO: 899234 - RNA, 19 nt, Artificial Sequence
  Description of Artificial Sequence: Synthetic oligonucleotide
  Sense strand starting at position 555 of SEQ ID NO: 588928
aguucugcuugugagaauu

SEQ ID NO: 899235 - RNA, 19 nt, Artificial Sequence
  Description of Artificial Sequence: Synthetic oligonucleotide
  Antisense strand to SEQ ID NO: 899234
aauucucacaagcagaacu

SEQ ID NO: 899236 - RNA, 19 nt, Artificial Sequence
  Description of Artificial Sequence: Synthetic oligonucleotide
  Sense strand starting at position 609 of SEQ ID NO: 588928
ucaccauuauuugagugaa

SEQ ID NO: 899237 - RNA, 19 nt, Artificial Sequence
  Description of Artificial Sequence: Synthetic oligonucleotide
  Antisense strand to SEQ ID NO: 899236
uucacucaaauaaugguga

SEQ ID NO: 899238 - RNA, 19 nt, Artificial Sequence
  Description of Artificial Sequence: Synthetic oligonucleotide
  Sense strand starting at position 1041 of SEQ ID NO: 588928
gccggacaauguuuacauu

SEQ ID NO: 899239 - RNA, 19 nt, Artificial Sequence
  Description of Artificial Sequence: Synthetic oligonucleotide
  Antisense strand to SEQ ID NO: 899238
aauguaaacauuguccggc

SEQ ID NO: 899240 - RNA, 19 nt, Artificial Sequence
  Description of Artificial Sequence: Synthetic oligonucleotide
  Sense strand starting at position 1157 of SEQ ID NO: 588928
cauacuagguaaugagaaa

SEQ ID NO: 899241 - RNA, 19 nt, Artificial Sequence
  Description of Artificial Sequence: Synthetic oligonucleotide
  Antisense strand to SEQ ID NO: 899240
uuucucauuaccuaguaug

SEQ ID NO: 899242 - RNA, 19 nt, Artificial Sequence
  Description of Artificial Sequence: Synthetic oligonucleotide
  Sense strand starting at position 1204 of SEQ ID NO: 588928
accaauauaucguccuuga

SEQ ID NO: 899243 - RNA, 19 nt, Artificial Sequence
  Description of Artificial Sequence: Synthetic oligonucleotide
  Antisense strand to SEQ ID NO: 899242
ucaaggacgauauauuggu

SEQ ID NO: 899244 - RNA, 19 nt, Artificial Sequence
  Description of Artificial Sequence: Synthetic oligonucleotide
  Sense strand starting at position 1208 of SEQ ID NO: 588928
auauaucguccuugaauaa

SEQ ID NO: 899245 - RNA, 19 nt, Artificial Sequence
  Description of Artificial Sequence: Synthetic oligonucleotide
  Antisense strand to SEQ ID NO: 899244
uuauucaaggacgauauau

SEQ ID NO: 899246 - RNA, 19 nt, Artificial Sequence
  Description of Artificial Sequence: Synthetic oligonucleotide
  Sense strand starting at position 1422 of SEQ ID NO: 588928
gcaccaugcccguagugaa

SEQ ID NO: 899247 - RNA, 19 nt, Artificial Sequence
  Description of Artificial Sequence: Synthetic oligonucleotide
  Antisense strand to SEQ ID NO: 899246
uucacuacgggcauggugc

SEQ ID NO: 899248 - RNA, 19 nt, Artificial Sequence
  Description of Artificial Sequence: Synthetic oligonucleotide
  Sense strand starting at position 1706 of SEQ ID NO: 588928
cggcgauaauuucacaagu

SEQ ID NO: 899249 - RNA, 19 nt, Artificial Sequence
  Description of Artificial Sequence: Synthetic oligonucleotide
  Antisense strand to SEQ ID NO: 899248
acuugugaaauuaucgccg

SEQ ID NO: 899250 - RNA, 19 nt, Artificial Sequence
  Description of Artificial Sequence: Synthetic oligonucleotide
  Sense strand starting at position 2401 of SEQ ID NO: 588928
acagauguguucucggcga

SEQ ID NO: 899251 - RNA, 19 nt, Artificial Sequence
  Description of Artificial Sequence: Synthetic oligonucleotide
  Antisense strand to SEQ ID NO: 899250
ucgccgagaacacaucugu

SEQ ID NO: 899252 - RNA, 19 nt, Artificial Sequence
  Description of Artificial Sequence: Synthetic oligonucleotide
  Sense strand starting at position 2403 of SEQ ID NO: 588928
agauguguucucggcgagu

SEQ ID NO: 899253 - RNA, 19 nt, Artificial Sequence
  Description of Artificial Sequence: Synthetic oligonucleotide
  Antisense strand to SEQ ID NO: 899252
acucgccgagaacacaucu

SEQ ID NO: 899254 - RNA, 19 nt, Artificial Sequence
  Description of Artificial Sequence: Synthetic oligonucleotide
  Sense strand starting at position 2404 of SEQ ID NO: 588928
gauguguucucggcgagug

SEQ ID NO: 899255 - RNA, 19 nt, Artificial Sequence
  Description of Artificial Sequence: Synthetic oligonucleotide
  Antisense strand to SEQ ID NO: 899254
cacucgccgagaacacauc

SEQ ID NO: 899256 - RNA, 19 nt, Artificial Sequence
  Description of Artificial Sequence: Synthetic oligonucleotide
  Sense strand starting at position 2405 of SEQ ID NO: 588928
auguguucucggcgagugu

SEQ ID NO: 899257 - RNA, 19 nt, Artificial Sequence
  Description of Artificial Sequence: Synthetic oligonucleotide
  Antisense strand to SEQ ID NO: 899256
acacucgccgagaacacau

SEQ ID NO: 899258 - RNA, 19 nt, Artificial Sequence
  Description of Artificial Sequence: Synthetic oligonucleotide
  Sense strand starting at position 2415 of SEQ ID NO: 588928
ggcgagugucugccguaga

SEQ ID NO: 899259 - RNA, 19 nt, Artificial Sequence
  Description of Artificial Sequence: Synthetic oligonucleotide
  Antisense strand to SEQ ID NO: 899258
ucuacggcagacacucgcc

SEQ ID NO: 899260 - RNA, 19 nt, Artificial Sequence
  Description of Artificial Sequence: Synthetic oligonucleotide
  Sense strand starting at position 2418 of SEQ ID NO: 588928
gagugucugccguagaggu

SEQ ID NO: 899261 - RNA, 19 nt, Artificial Sequence
  Description of Artificial Sequence: Synthetic oligonucleotide
  Antisense strand to SEQ ID NO: 899260
accucuacggcagacacuc

SEQ ID NO: 899262 - RNA, 19 nt, Artificial Sequence
  Description of Artificial Sequence: Synthetic oligonucleotide
  Sense strand starting at position 2428 of SEQ ID NO: 588928
cguagaggugacugauaaa

SEQ ID NO: 899263 - RNA, 19 nt, Artificial Sequence
  Description of Artificial Sequence: Synthetic oligonucleotide
  Antisense strand to SEQ ID NO: 899262
uuuaucagucaccucuacg

SEQ ID NO: 899264 - RNA, 19 nt, Artificial Sequence
  Description of Artificial Sequence: Synthetic oligonucleotide
  Sense strand starting at position 2431 of SEQ ID NO: 588928
agaggugacugauaaaccu

SEQ ID NO: 899265 - RNA, 19 nt, Artificial Sequence
  Description of Artificial Sequence: Synthetic oligonucleotide
  Antisense strand to SEQ ID NO: 899264
agguuuaucagucaccucu

SEQ ID NO: 899266 - RNA, 19 nt, Artificial Sequence
  Description of Artificial Sequence: Synthetic oligonucleotide
  Sense strand starting at position 2917 of SEQ ID NO: 588928
agauguggucuuuauaaua

SEQ ID NO: 899267 - RNA, 19 nt, Artificial Sequence
  Description of Artificial Sequence: Synthetic oligonucleotide
  Antisense strand to SEQ ID NO: 899266
uauuauaaagaccacaucu

SEQ ID NO: 899268 - RNA, 19 nt, Artificial Sequence
  Description of Artificial Sequence: Synthetic oligonucleotide
  Sense strand starting at position 3070 of SEQ ID NO: 588928
gggagaacuuaagagucuu

SEQ ID NO: 899269 - RNA, 19 nt, Artificial Sequence
  Description of Artificial Sequence: Synthetic oligonucleotide
  Antisense strand to SEQ ID NO: 899268
aagacucuuaaguucuccc

SEQ ID NO: 899270 - RNA, 19 nt, Artificial Sequence
  Description of Artificial Sequence: Synthetic oligonucleotide
  Sense strand starting at position 3103 of SEQ ID NO: 588928
aaagguggcugcugauaua

SEQ ID NO: 899271 - RNA, 19 nt, Artificial Sequence
  Description of Artificial Sequence: Synthetic oligonucleotide
  Antisense strand to SEQ ID NO: 899270
uauaucagcagccaccuuu

SEQ ID NO: 899272 - RNA, 19 nt, Artificial Sequence
  Description of Artificial Sequence: Synthetic oligonucleotide
  Sense strand starting at position 3132 of SEQ ID NO: 588928
acagaacuguuguauuuga

SEQ ID NO: 899273 - RNA, 19 nt, Artificial Sequence
  Description of Artificial Sequence: Synthetic oligonucleotide
  Antisense strand to SEQ ID NO: 899272
ucaaauacaacaguucugu

SEQ ID NO: 899274 - RNA, 19 nt, Artificial Sequence
  Description of Artificial Sequence: Synthetic oligonucleotide
  Sense strand starting at position 3399 of SEQ ID NO: 588928
agaagagacgauugcuuga

SEQ ID NO: 899275 - RNA, 19 nt, Artificial Sequence
  Description of Artificial Sequence: Synthetic oligonucleotide
  Antisense strand to SEQ ID NO: 899274
ucaagcaaucgucucuucu

SEQ ID NO: 899276 - RNA, 19 nt, Artificial Sequence
  Description of Artificial Sequence: Synthetic oligonucleotide
  Sense strand starting at position 3562 of SEQ ID NO: 588928
uagugacacuaagguuaau

SEQ ID NO: 899277 - RNA, 19 nt, Artificial Sequence
  Description of Artificial Sequence: Synthetic oligonucleotide
  Antisense strand to SEQ ID NO: 899276
auuaaccuuagugucacua

SEQ ID NO: 899278 - RNA, 19 nt, Artificial Sequence
  Description of Artificial Sequence: Synthetic oligonucleotide
  Sense strand starting at position 3571 of SEQ ID NO: 588928
uaagguuaauuaguucuga

SEQ ID NO: 899279 - RNA, 19 nt, Artificial Sequence
  Description of Artificial Sequence: Synthetic oligonucleotide
  Antisense strand to SEQ ID NO: 899278
ucagaacuaauuaaccuua

SEQ ID NO: 899280 - RNA, 19 nt, Artificial Sequence
  Description of Artificial Sequence: Synthetic oligonucleotide
  Sense strand starting at position 3575 of SEQ ID NO: 588928
guuaauuaguucugacauc

SEQ ID NO: 899281 - RNA, 19 nt, Artificial Sequence
  Description of Artificial Sequence: Synthetic oligonucleotide
  Antisense strand to SEQ ID NO: 899280
gaugucagaacuaauuaac

SEQ ID NO: 899282 - RNA, 19 nt, Artificial Sequence
  Description of Artificial Sequence: Synthetic oligonucleotide
  Sense strand starting at position 3619 of SEQ ID NO: 588928
ggugauguuucauggagga

SEQ ID NO: 899283 - RNA, 19 nt, Artificial Sequence
  Description of Artificial Sequence: Synthetic oligonucleotide
  Antisense strand to SEQ ID NO: 899282
uccuccaugaaacaucacc

SEQ ID NO: 899284 - RNA, 19 nt, Artificial Sequence
  Description of Artificial Sequence: Synthetic oligonucleotide
  Sense strand starting at position 3665 of SEQ ID NO: 588928
ugaacugcuggguaucuua

SEQ ID NO: 899285 - RNA, 19 nt, Artificial Sequence
  Description of Artificial Sequence: Synthetic oligonucleotide
  Antisense strand to SEQ ID NO: 899284
uaagauacccagcaguuca

SEQ ID NO: 899286 - RNA, 19 nt, Artificial Sequence
  Description of Artificial Sequence: Synthetic oligonucleotide
  Sense strand starting at position 3948 of SEQ ID NO: 588928
aauggagagucucacucuu

SEQ ID NO: 899287 - RNA, 19 nt, Artificial Sequence
  Description of Artificial Sequence: Synthetic oligonucleotide
  Antisense strand to SEQ ID NO: 899286
aagagugagacucuccauu

SEQ ID NO: 899288 - RNA, 19 nt, Artificial Sequence
  Description of Artificial Sequence: Synthetic oligonucleotide
  Sense strand starting at position 15 of SEQ ID NO: 588929
ccacaagucuccuuguaug

SEQ ID NO: 899289 - RNA, 19 nt, Artificial Sequence
  Description of Artificial Sequence: Synthetic oligonucleotide
  Antisense strand to SEQ ID NO: 899288
cauacaaggagacuugugg

SEQ ID NO: 899290 - RNA, 19 nt, Artificial Sequence
  Description of Artificial Sequence: Synthetic oligonucleotide
  Sense strand starting at position 25 of SEQ ID NO: 588929
ccuuguaugucaucacaug

SEQ ID NO: 899291 - RNA, 19 nt, Artificial Sequence
  Description of Artificial Sequence: Synthetic oligonucleotide
  Antisense strand to SEQ ID NO: 899290
caugugaugacauacaagg

SEQ ID NO: 899292 - RNA, 19 nt, Artificial Sequence
  Description of Artificial Sequence: Synthetic oligonucleotide
  Sense strand starting at position 31 of SEQ ID NO: 588929
augucaucacauggaaauu

SEQ ID NO: 899293 - RNA, 19 nt, Artificial Sequence
  Description of Artificial Sequence: Synthetic oligonucleotide
  Antisense strand to SEQ ID NO: 899292
aauuuccaugugaugacau

SEQ ID NO: 899294 - RNA, 19 nt, Artificial Sequence
  Description of Artificial Sequence: Synthetic oligonucleotide
  Sense strand starting at position 304 of SEQ ID NO: 588929
uugguuugauccuugaccu

SEQ ID NO: 899295 - RNA, 19 nt, Artificial Sequence
  Description of Artificial Sequence: Synthetic oligonucleotide
  Antisense strand to SEQ ID NO: 899294
aggucaaggaucaaaccaa

SEQ ID NO: 899296 - RNA, 19 nt, Artificial Sequence
  Description of Artificial Sequence: Synthetic oligonucleotide
  Sense strand starting at position 420 of SEQ ID NO: 588929
uuggaaucuugggcuuaac

SEQ ID NO: 899297 - RNA, 19 nt, Artificial Sequence
  Description of Artificial Sequence: Synthetic oligonucleotide
  Antisense strand to SEQ ID NO: 899296
guuaagcccaagauuccaa

SEQ ID NO: 899298 - RNA, 19 nt, Artificial Sequence
  Description of Artificial Sequence: Synthetic oligonucleotide
  Sense strand starting at position 542 of SEQ ID NO: 588929
accgcauguuugucaggaa

SEQ ID NO: 899299 - RNA, 19 nt, Artificial Sequence
  Description of Artificial Sequence: Synthetic oligonucleotide
  Antisense strand to SEQ ID NO: 899298
uuccugacaaacaugcggu

SEQ ID NO: 899300 - RNA, 19 nt, Artificial Sequence
  Description of Artificial Sequence: Synthetic oligonucleotide
  Sense strand starting at position 590 of SEQ ID NO: 588929
aucuuugugauccggguuu

SEQ ID NO: 899301 - RNA, 19 nt, Artificial Sequence
  Description of Artificial Sequence: Synthetic oligonucleotide
  Antisense strand to SEQ ID NO: 899300
aaacccggaucacaaagau

SEQ ID NO: 899302 - RNA, 19 nt, Artificial Sequence
  Description of Artificial Sequence: Synthetic oligonucleotide
  Sense strand starting at position 592 of SEQ ID NO: 588929
cuuugugauccggguuuca

SEQ ID NO: 899303 - RNA, 19 nt, Artificial Sequence
  Description of Artificial Sequence: Synthetic oligonucleotide
  Antisense strand to SEQ ID NO: 899302
ugaaacccggaucacaaag

SEQ ID NO: 899304 - RNA, 19 nt, Artificial Sequence
  Description of Artificial Sequence: Synthetic oligonucleotide
  Sense strand starting at position 650 of SEQ ID NO: 588929
ugguguggugcuuggauuu

SEQ ID NO: 899305 - RNA, 19 nt, Artificial Sequence
  Description of Artificial Sequence: Synthetic oligonucleotide
  Antisense strand to SEQ ID NO: 899304
aaauccaagcaccacacca

SEQ ID NO: 899306 - RNA, 19 nt, Artificial Sequence
  Description of Artificial Sequence: Synthetic oligonucleotide
  Sense strand starting at position 921 of SEQ ID NO: 588929
ucugcuaugagcugggaua

SEQ ID NO: 899307 - RNA, 19 nt, Artificial Sequence
  Description of Artificial Sequence: Synthetic oligonucleotide
  Antisense strand to SEQ ID NO: 899306
uaucccagcucauagcaga

SEQ ID NO: 899308 - RNA, 19 nt, Artificial Sequence
  Description of Artificial Sequence: Synthetic oligonucleotide
  Sense strand starting at position 1075 of SEQ ID NO: 588929
caguuauguggaugaaugu

SEQ ID NO: 899309 - RNA, 19 nt, Artificial Sequence
  Description of Artificial Sequence: Synthetic oligonucleotide
  Antisense strand to SEQ ID NO: 899308
acauucauccacauaacug

SEQ ID NO: 899310 - RNA, 19 nt, Artificial Sequence
  Description of Artificial Sequence: Synthetic oligonucleotide
  Sense strand starting at position 1108 of SEQ ID NO: 588929
gucugaauccucuguguaa

SEQ ID NO: 899311 - RNA, 19 nt, Artificial Sequence
  Description of Artificial Sequence: Synthetic oligonucleotide
  Antisense strand to SEQ ID NO: 899310
uuacacagaggauucagac

SEQ ID NO: 899312 - RNA, 19 nt, Artificial Sequence
  Description of Artificial Sequence: Synthetic oligonucleotide
  Sense strand starting at position 1109 of SEQ ID NO: 588929
ucugaauccucuguguaau

SEQ ID NO: 899313 - RNA, 19 nt, Artificial Sequence
  Description of Artificial Sequence: Synthetic oligonucleotide
  Antisense strand to SEQ ID NO: 899312
auuacacagaggauucaga

SEQ ID NO: 899314 - RNA, 19 nt, Artificial Sequence
  Description of Artificial Sequence: Synthetic oligonucleotide
  Sense strand starting at position 1110 of SEQ ID NO: 588929
cugaauccucuguguaauu

SEQ ID NO: 899315 - RNA, 19 nt, Artificial Sequence
  Description of Artificial Sequence: Synthetic oligonucleotide
  Antisense strand to SEQ ID NO: 899314
aauuacacagaggauucag

SEQ ID NO: 899316 - RNA, 19 nt, Artificial Sequence
  Description of Artificial Sequence: Synthetic oligonucleotide
  Sense strand starting at position 1111 of SEQ ID NO: 588929
ugaauccucuguguaauuc

SEQ ID NO: 899317 - RNA, 19 nt, Artificial Sequence
  Description of Artificial Sequence: Synthetic oligonucleotide
  Antisense strand to SEQ ID NO: 899316
gaauuacacagaggauuca

SEQ ID NO: 899318 - RNA, 19 nt, Artificial Sequence
  Description of Artificial Sequence: Synthetic oligonucleotide
  Sense strand starting at position 1173 of SEQ ID NO: 588929
ucccucgauugcuuggaaa

SEQ ID NO: 899319 - RNA, 19 nt, Artificial Sequence
  Description of Artificial Sequence: Synthetic oligonucleotide
  Antisense strand to SEQ ID NO: 899318
uuuccaagcaaucgaggga

SEQ ID NO: 899320 - RNA, 19 nt, Artificial Sequence
  Description of Artificial Sequence: Synthetic oligonucleotide
  Sense strand starting at position 1175 of SEQ ID NO: 588929
ccucgauugcuuggaaaua

SEQ ID NO: 899321 - RNA, 19 nt, Artificial Sequence
  Description of Artificial Sequence: Synthetic oligonucleotide
  Antisense strand to SEQ ID NO: 899320
uauuuccaagcaaucgagg

SEQ ID NO: 899322 - RNA, 19 nt, Artificial Sequence
  Description of Artificial Sequence: Synthetic oligonucleotide
  Sense strand starting at position 1282 of SEQ ID NO: 588929
gggccaucuguugaaugaa

SEQ ID NO: 899323 - RNA, 19 nt, Artificial Sequence
  Description of Artificial Sequence: Synthetic oligonucleotide
  Antisense strand to SEQ ID NO: 899322
uucauucaacagauggccc

SEQ ID NO: 899324 - RNA, 19 nt, Artificial Sequence
  Description of Artificial Sequence: Synthetic oligonucleotide
  Sense strand starting at position 1368 of SEQ ID NO: 588929
gcucucuaacaacgugaaa

SEQ ID NO: 899325 - RNA, 19 nt, Artificial Sequence
  Description of Artificial Sequence: Synthetic oligonucleotide
  Antisense strand to SEQ ID NO: 899324
uuucacguuguuagagagc

SEQ ID NO: 899326 - RNA, 19 nt, Artificial Sequence
  Description of Artificial Sequence: Synthetic oligonucleotide
  Sense strand starting at position 2203 of SEQ ID NO: 588929
gacagacacucaucggaua

SEQ ID NO: 899327 - RNA, 19 nt, Artificial Sequence
  Description of Artificial Sequence: Synthetic oligonucleotide
  Antisense strand to SEQ ID NO: 899326
uauccgaugagugucuguc

SEQ ID NO: 899328 - RNA, 19 nt, Artificial Sequence
  Description of Artificial Sequence: Synthetic oligonucleotide
  Sense strand starting at position 2262 of SEQ ID NO: 588929
ggaaauguugcggaggauu

SEQ ID NO: 899329 - RNA, 19 nt, Artificial Sequence
  Description of Artificial Sequence: Synthetic oligonucleotide
  Antisense strand to SEQ ID NO: 899328
aauccuccgcaacauuucc

SEQ ID NO: 899330 - RNA, 19 nt, Artificial Sequence
  Description of Artificial Sequence: Synthetic oligonucleotide
  Sense strand starting at position 2341 of SEQ ID NO: 588929
ggaaaucuuccaggacgug

SEQ ID NO: 899331 - RNA, 19 nt, Artificial Sequence
  Description of Artificial Sequence: Synthetic oligonucleotide
  Antisense strand to SEQ ID NO: 899330
cacguccuggaagauuucc

SEQ ID NO: 899332 - RNA, 19 nt, Artificial Sequence
  Description of Artificial Sequence: Synthetic oligonucleotide
  Sense strand starting at position 2344 of SEQ ID NO: 588929
aaucuuccaggacgugaaa

SEQ ID NO: 899333 - RNA, 19 nt, Artificial Sequence
  Description of Artificial Sequence: Synthetic oligonucleotide
  Antisense strand to SEQ ID NO: 899332
uuucacguccuggaagauu

SEQ ID NO: 899334 - RNA, 19 nt, Artificial Sequence
  Description of Artificial Sequence: Synthetic oligonucleotide
  Sense strand starting at position 2441 of SEQ ID NO: 588929
cacacuugaccaggugaca

SEQ ID NO: 899335 - RNA, 19 nt, Artificial Sequence
  Description of Artificial Sequence: Synthetic oligonucleotide
  Antisense strand to SEQ ID NO: 899334
ugucaccuggucaagugug

SEQ ID NO: 899336 - RNA, 19 nt, Artificial Sequence
  Description of Artificial Sequence: Synthetic oligonucleotide
  Sense strand starting at position 2640 of SEQ ID NO: 588929
gaggaaucuaagcgggagu

SEQ ID NO: 899337 - RNA, 19 nt, Artificial Sequence
  Description of Artificial Sequence: Synthetic oligonucleotide
  Antisense strand to SEQ ID NO: 899336
acucccgcuuagauuccuc

SEQ ID NO: 899338 - RNA, 19 nt, Artificial Sequence
  Description of Artificial Sequence: Synthetic oligonucleotide
  Sense strand starting at position 2642 of SEQ ID NO: 588929
ggaaucuaagcgggaguuu

SEQ ID NO: 899339 - RNA, 19 nt, Artificial Sequence
  Description of Artificial Sequence: Synthetic oligonucleotide
  Antisense strand to SEQ ID NO: 899338
aaacucccgcuuagauucc

SEQ ID NO: 899340 - RNA, 19 nt, Artificial Sequence
  Description of Artificial Sequence: Synthetic oligonucleotide
  Sense strand starting at position 2650 of SEQ ID NO: 588929
agcgggaguuuguuguaga

SEQ ID NO: 899341 - RNA, 19 nt, Artificial Sequence
  Description of Artificial Sequence: Synthetic oligonucleotide
  Antisense strand to SEQ ID NO: 899340
ucuacaacaaacucccgcu

SEQ ID NO: 899342 - RNA, 19 nt, Artificial Sequence
  Description of Artificial Sequence: Synthetic oligonucleotide
  Sense strand starting at position 2809 of SEQ ID NO: 588929
ugacacaucucugucuguu

SEQ ID NO: 899343 - RNA, 19 nt, Artificial Sequence
  Description of Artificial Sequence: Synthetic oligonucleotide
  Antisense strand to SEQ ID NO: 899342
aacagacagagauguguca

SEQ ID NO: 899344 - RNA, 19 nt, Artificial Sequence
  Description of Artificial Sequence: Synthetic oligonucleotide
  Sense strand starting at position 2818 of SEQ ID NO: 588929
ucugucuguucuguggaau

SEQ ID NO: 899345 - RNA, 19 nt, Artificial Sequence
  Description of Artificial Sequence: Synthetic oligonucleotide
  Antisense strand to SEQ ID NO: 899344
auuccacagaacagacaga

SEQ ID NO: 899346 - RNA, 19 nt, Artificial Sequence
  Description of Artificial Sequence: Synthetic oligonucleotide
  Sense strand starting at position 2819 of SEQ ID NO: 588929
cugucuguucuguggaauu

SEQ ID NO: 899347 - RNA, 19 nt, Artificial Sequence
  Description of Artificial Sequence: Synthetic oligonucleotide
  Antisense strand to SEQ ID NO: 899346
aauuccacagaacagacag

SEQ ID NO: 899348 - RNA, 19 nt, Artificial Sequence
  Description of Artificial Sequence: Synthetic oligonucleotide
  Sense strand starting at position 2847 of SEQ ID NO: 588929
guuggguugggauguggaa

SEQ ID NO: 899349 - RNA, 19 nt, Artificial Sequence
  Description of Artificial Sequence: Synthetic oligonucleotide
  Antisense strand to SEQ ID NO: 899348
uuccacaucccaacccaac

SEQ ID NO: 899350 - RNA, 19 nt, Artificial Sequence
  Description of Artificial Sequence: Synthetic oligonucleotide
  Sense strand starting at position 2883 of SEQ ID NO: 588929
ggaguugcugcaggaauca

SEQ ID NO: 899351 - RNA, 19 nt, Artificial Sequence
  Description of Artificial Sequence: Synthetic oligonucleotide
  Antisense strand to SEQ ID NO: 899350
ugauuccugcagcaacucc

SEQ ID NO: 899352 - RNA, 19 nt, Artificial Sequence
  Description of Artificial Sequence: Synthetic oligonucleotide
  Sense strand starting at position 3308 of SEQ ID NO: 588929
gcagcugggcauugacaaa

SEQ ID NO: 899353 - RNA, 19 nt, Artificial Sequence
  Description of Artificial Sequence: Synthetic oligonucleotide
  Antisense strand to SEQ ID NO: 899352
uuugucaaugcccagcugc

SEQ ID NO: 899354 - RNA, 19 nt, Artificial Sequence
  Description of Artificial Sequence: Synthetic oligonucleotide
  Sense strand starting at position 3315 of SEQ ID NO: 588929
ggcauugacaaaugagugu

SEQ ID NO: 899355 - RNA, 19 nt, Artificial Sequence
  Description of Artificial Sequence: Synthetic oligonucleotide
  Antisense strand to SEQ ID NO: 899354
acacucauuugucaaugcc

SEQ ID NO: 899356 - RNA, 19 nt, Artificial Sequence
  Description of Artificial Sequence: Synthetic oligonucleotide
  Sense strand starting at position 3319 of SEQ ID NO: 588929
uugacaaaugagugugaag

SEQ ID NO: 899357 - RNA, 19 nt, Artificial Sequence
  Description of Artificial Sequence: Synthetic oligonucleotide
  Antisense strand to SEQ ID NO: 899356
cuucacacucauuugucaa

SEQ ID NO: 899358 - RNA, 19 nt, Artificial Sequence
  Description of Artificial Sequence: Synthetic oligonucleotide
  Sense strand starting at position 3353 of SEQ ID NO: 588929
aguggaauccacuagguuu

SEQ ID NO: 899359 - RNA, 19 nt, Artificial Sequence
  Description of Artificial Sequence: Synthetic oligonucleotide
  Antisense strand to SEQ ID NO: 899358
aaaccuaguggauuccacu

SEQ ID NO: 899360 - RNA, 19 nt, Artificial Sequence
  Description of Artificial Sequence: Synthetic oligonucleotide
  Sense strand starting at position 3409 of SEQ ID NO: 588929
guuugaaggcuuugagcuu

SEQ ID NO: 899361 - RNA, 19 nt, Artificial Sequence
  Description of Artificial Sequence: Synthetic oligonucleotide
  Antisense strand to SEQ ID NO: 899360
aagcucaaagccuucaaac

SEQ ID NO: 899362 - RNA, 19 nt, Artificial Sequence
  Description of Artificial Sequence: Synthetic oligonucleotide
  Sense strand starting at position 3490 of SEQ ID NO: 588929
uguuuacucucugccauga

SEQ ID NO: 899363 - RNA, 19 nt, Artificial Sequence
  Description of Artificial Sequence: Synthetic oligonucleotide
  Antisense strand to SEQ ID NO: 899362
ucauggcagagaguaaaca

SEQ ID NO: 899364 - RNA, 19 nt, Artificial Sequence
  Description of Artificial Sequence: Synthetic oligonucleotide
  Sense strand starting at position 3542 of SEQ ID NO: 588929
ccauauaagggcuaaaguu

SEQ ID NO: 899365 - RNA, 19 nt, Artificial Sequence
  Description of Artificial Sequence: Synthetic oligonucleotide
  Antisense strand to SEQ ID NO: 899364
aacuuuagcccuuauaugg

SEQ ID NO: 899366 - RNA, 19 nt, Artificial Sequence
  Description of Artificial Sequence: Synthetic oligonucleotide
  Sense strand starting at position 3552 of SEQ ID NO: 588929
gcuaaaguuguggagucuu

SEQ ID NO: 899367 - RNA, 19 nt, Artificial Sequence
  Description of Artificial Sequence: Synthetic oligonucleotide
  Antisense strand to SEQ ID NO: 899366
aagacuccacaacuuuagc

SEQ ID NO: 899368 - RNA, 19 nt, Artificial Sequence
  Description of Artificial Sequence: Synthetic oligonucleotide
  Sense strand starting at position 151 of SEQ ID NO: 588930
agugucaaauccucuccaa

SEQ ID NO: 899369 - RNA, 19 nt, Artificial Sequence
  Description of Artificial Sequence: Synthetic oligonucleotide
  Antisense strand to SEQ ID NO: 899368
uuggagaggauuugacacu

SEQ ID NO: 899370 - RNA, 19 nt, Artificial Sequence
  Description of Artificial Sequence: Synthetic oligonucleotide
  Sense strand starting at position 216 of SEQ ID NO: 588930
gcaagaaacugaggucaca

SEQ ID NO: 899371 - RNA, 19 nt, Artificial Sequence
  Description of Artificial Sequence: Synthetic oligonucleotide
  Antisense strand to SEQ ID NO: 899370
ugugaccucaguuucuugc

SEQ ID NO: 899372 - RNA, 19 nt, Artificial Sequence
  Description of Artificial Sequence: Synthetic oligonucleotide
  Sense strand starting at position 265 of SEQ ID NO: 588930
gcaucaucccugcaccaga

SEQ ID NO: 899373 - RNA, 19 nt, Artificial Sequence
  Description of Artificial Sequence: Synthetic oligonucleotide
  Antisense strand to SEQ ID NO: 899372
ucuggugcagggaugaugc

SEQ ID NO: 899374 - RNA, 19 nt, Artificial Sequence
  Description of Artificial Sequence: Synthetic oligonucleotide
  Sense strand starting at position 454 of SEQ ID NO: 588930
aguggucaugguggucaga

SEQ ID NO: 899375 - RNA, 19 nt, Artificial Sequence
  Description of Artificial Sequence: Synthetic oligonucleotide
  Antisense strand to SEQ ID NO: 899374
ucugaccaccaugaccacu

SEQ ID NO: 899376 - RNA, 19 nt, Artificial Sequence
  Description of Artificial Sequence: Synthetic oligonucleotide
  Sense strand starting at position 618 of SEQ ID NO: 588930
gcaagucaaggcuauccaa

SEQ ID NO: 899377 - RNA, 19 nt, Artificial Sequence
  Description of Artificial Sequence: Synthetic oligonucleotide
  Antisense strand to SEQ ID NO: 899376
uuggauagccuugacuugc

SEQ ID NO: 899378 - RNA, 19 nt, Artificial Sequence
  Description of Artificial Sequence: Synthetic oligonucleotide
  Sense strand starting at position 857 of SEQ ID NO: 588930
ggaccucugcucggugaau

SEQ ID NO: 899379 - RNA, 19 nt, Artificial Sequence
  Description of Artificial Sequence: Synthetic oligonucleotide
  Antisense strand to SEQ ID NO: 899378
auucaccgagcagaggucc

SEQ ID NO: 899380 - RNA, 19 nt, Artificial Sequence
  Description of Artificial Sequence: Synthetic oligonucleotide
  Sense strand starting at position 858 of SEQ ID NO: 588930
gaccucugcucggugaauu

SEQ ID NO: 899381 - RNA, 19 nt, Artificial Sequence
  Description of Artificial Sequence: Synthetic oligonucleotide
  Antisense strand to SEQ ID NO: 899380
aauucaccgagcagagguc

SEQ ID NO: 899382 - RNA, 19 nt, Artificial Sequence
  Description of Artificial Sequence: Synthetic oligonucleotide
  Sense strand starting at position 859 of SEQ ID NO: 588930
accucugcucggugaauua

SEQ ID NO: 899383 - RNA, 19 nt, Artificial Sequence
  Description of Artificial Sequence: Synthetic oligonucleotide
  Antisense strand to SEQ ID NO: 899382
uaauucaccgagcagaggu

SEQ ID NO: 899384 - RNA, 19 nt, Artificial Sequence
  Description of Artificial Sequence: Synthetic oligonucleotide
  Sense strand starting at position 1122 of SEQ ID NO: 588930
cgguuugguuccguuucua

SEQ ID NO: 899385 - RNA, 19 nt, Artificial Sequence
  Description of Artificial Sequence: Synthetic oligonucleotide
  Antisense strand to SEQ ID NO: 899384
uagaaacggaaccaaaccg

SEQ ID NO: 899386 - RNA, 19 nt, Artificial Sequence
  Description of Artificial Sequence: Synthetic oligonucleotide
  Sense strand starting at position 1211 of SEQ ID NO: 588930
gcagacaacucuuuaagca

SEQ ID NO: 899387 - RNA, 19 nt, Artificial Sequence
  Description of Artificial Sequence: Synthetic oligonucleotide
  Antisense strand to SEQ ID NO: 899386
ugcuuaaagaguugucugc

SEQ ID NO: 899388 - RNA, 19 nt, Artificial Sequence
  Description of Artificial Sequence: Synthetic oligonucleotide
  Sense strand starting at position 1794 of SEQ ID NO: 588930
ucggcuuucccgucuguga

SEQ ID NO: 899389 - RNA, 19 nt, Artificial Sequence
  Description of Artificial Sequence: Synthetic oligonucleotide
  Antisense strand to SEQ ID NO: 899388
ucacagacgggaaagccga

SEQ ID NO: 899390 - RNA, 19 nt, Artificial Sequence
  Description of Artificial Sequence: Synthetic oligonucleotide
  Sense strand starting at position 1795 of SEQ ID NO: 588930
cggcuuucccgucugugaa

SEQ ID NO: 899391 - RNA, 19 nt, Artificial Sequence
  Description of Artificial Sequence: Synthetic oligonucleotide
  Antisense strand to SEQ ID NO: 899390
uucacagacgggaaagccg

SEQ ID NO: 899392 - RNA, 19 nt, Artificial Sequence
  Description of Artificial Sequence: Synthetic oligonucleotide
  Sense strand starting at position 2069 of SEQ ID NO: 588930
ggcgguuccaugcaacuua

SEQ ID NO: 899393 - RNA, 19 nt, Artificial Sequence
  Description of Artificial Sequence: Synthetic oligonucleotide
  Antisense strand to SEQ ID NO: 899392
uaaguugcauggaaccgcc

SEQ ID NO: 899394 - RNA, 19 nt, Artificial Sequence
  Description of Artificial Sequence: Synthetic oligonucleotide
  Sense strand starting at position 2351 of SEQ ID NO: 588930
ggauucggccgguaccaaa

SEQ ID NO: 899395 - RNA, 19 nt, Artificial Sequence
  Description of Artificial Sequence: Synthetic oligonucleotide
  Antisense strand to SEQ ID NO: 899394
uuugguaccggccgaaucc

SEQ ID NO: 899396 - RNA, 19 nt, Artificial Sequence
  Description of Artificial Sequence: Synthetic oligonucleotide
  Sense strand starting at position 2422 of SEQ ID NO: 588930
cccagaguccuguguggac

SEQ ID NO: 899397 - RNA, 19 nt, Artificial Sequence
  Description of Artificial Sequence: Synthetic oligonucleotide
  Antisense strand to SEQ ID NO: 899396
guccacacaggacucuggg

SEQ ID NO: 899398 - RNA, 19 nt, Artificial Sequence
  Description of Artificial Sequence: Synthetic oligonucleotide
  Sense strand starting at position 2654 of SEQ ID NO: 588930
agcugugauccgggcucuu

SEQ ID NO: 899399 - RNA, 19 nt, Artificial Sequence
  Description of Artificial Sequence: Synthetic oligonucleotide
  Antisense strand to SEQ ID NO: 899398
aagagcccggaucacagcu

SEQ ID NO: 899400 - RNA, 19 nt, Artificial Sequence
  Description of Artificial Sequence: Synthetic oligonucleotide
  Sense strand starting at position 2742 of SEQ ID NO: 588930
ggugucaggccucagacau

SEQ ID NO: 899401 - RNA, 19 nt, Artificial Sequence
  Description of Artificial Sequence: Synthetic oligonucleotide
  Antisense strand to SEQ ID NO: 899400
augucugaggccugacacc

SEQ ID NO: 899402 - RNA, 19 nt, Artificial Sequence
  Description of Artificial Sequence: Synthetic oligonucleotide
  Sense strand starting at position 2752 of SEQ ID NO: 588930
cucagacauccuggaucuu

SEQ ID NO: 899403 - RNA, 19 nt, Artificial Sequence
  Description of Artificial Sequence: Synthetic oligonucleotide
  Antisense strand to SEQ ID NO: 899402
aagauccaggaugucugag

SEQ ID NO: 899404 - RNA, 19 nt, Artificial Sequence
  Description of Artificial Sequence: Synthetic oligonucleotide
  Sense strand starting at position 2800 of SEQ ID NO: 588930
ugccuauuccuguggagcu

SEQ ID NO: 899405 - RNA, 19 nt, Artificial Sequence
  Description of Artificial Sequence: Synthetic oligonucleotide
  Antisense strand to SEQ ID NO: 899404
agcuccacaggaauaggca

SEQ ID NO: 899406 - RNA, 19 nt, Artificial Sequence
  Description of Artificial Sequence: Synthetic oligonucleotide
  Sense strand starting at position 2969 of SEQ ID NO: 588930
gcaggugaccgugaagagu

SEQ ID NO: 899407 - RNA, 19 nt, Artificial Sequence
  Description of Artificial Sequence: Synthetic oligonucleotide
  Antisense strand to SEQ ID NO: 899406
acucuucacggucaccugc

SEQ ID NO: 899408 - RNA, 19 nt, Artificial Sequence
  Description of Artificial Sequence: Synthetic oligonucleotide
  Sense strand starting at position 2975 of SEQ ID NO: 588930
gaccgugaagaguguggau

SEQ ID NO: 899409 - RNA, 19 nt, Artificial Sequence
  Description of Artificial Sequence: Synthetic oligonucleotide
  Antisense strand to SEQ ID NO: 899408
auccacacucuucacgguc

SEQ ID NO: 899410 - RNA, 19 nt, Artificial Sequence
  Description of Artificial Sequence: Synthetic oligonucleotide
  Sense strand starting at position 2977 of SEQ ID NO: 588930
ccgugaagaguguggaugu

SEQ ID NO: 899411 - RNA, 19 nt, Artificial Sequence
  Description of Artificial Sequence: Synthetic oligonucleotide
  Antisense strand to SEQ ID NO: 899410
acauccacacucuucacgg

SEQ ID NO: 899412 - RNA, 19 nt, Artificial Sequence
  Description of Artificial Sequence: Synthetic oligonucleotide
  Sense strand starting at position 3065 of SEQ ID NO: 588930
agcugagguucagugugaa

SEQ ID NO: 899413 - RNA, 19 nt, Artificial Sequence
  Description of Artificial Sequence: Synthetic oligonucleotide
  Antisense strand to SEQ ID NO: 899412
uucacacugaaccucagcu

SEQ ID NO: 899414 - RNA, 19 nt, Artificial Sequence
  Description of Artificial Sequence: Synthetic oligonucleotide
  Sense strand starting at position 3069 of SEQ ID NO: 588930
gagguucagugugaaacgu

SEQ ID NO: 899415 - RNA, 19 nt, Artificial Sequence
  Description of Artificial Sequence: Synthetic oligonucleotide
  Antisense strand to SEQ ID NO: 899414
acguuucacacugaaccuc

SEQ ID NO: 899416 - RNA, 19 nt, Artificial Sequence
  Description of Artificial Sequence: Synthetic oligonucleotide
  Sense strand starting at position 3129 of SEQ ID NO: 588930
cugauauguucuucccacu

SEQ ID NO: 899417 - RNA, 19 nt, Artificial Sequence
  Description of Artificial Sequence: Synthetic oligonucleotide
  Antisense strand to SEQ ID NO: 899416
agugggaagaacauaucag

SEQ ID NO: 899418 - RNA, 19 nt, Artificial Sequence
  Description of Artificial Sequence: Synthetic oligonucleotide
  Sense strand starting at position 3206 of SEQ ID NO: 588930
uguguauucuuucugccau

SEQ ID NO: 899419 - RNA, 19 nt, Artificial Sequence
  Description of Artificial Sequence: Synthetic oligonucleotide
  Antisense strand to SEQ ID NO: 899418
auggcagaaagaauacaca

SEQ ID NO: 899420 - RNA, 19 nt, Artificial Sequence
  Description of Artificial Sequence: Synthetic oligonucleotide
  Sense strand starting at position 3278 of SEQ ID NO: 588930
cccagaaugucuugccaag

SEQ ID NO: 899421 - RNA, 19 nt, Artificial Sequence
  Description of Artificial Sequence: Synthetic oligonucleotide
  Antisense strand to SEQ ID NO: 899420
cuuggcaagacauucuggg

SEQ ID NO: 899422 - RNA, 19 nt, Artificial Sequence
  Description of Artificial Sequence: Synthetic oligonucleotide
  Sense strand starting at position 3538 of SEQ ID NO: 588930
ccauuuaggaaguguguuu

SEQ ID NO: 899423 - RNA, 19 nt, Artificial Sequence
  Description of Artificial Sequence: Synthetic oligonucleotide
  Antisense strand to SEQ ID NO: 899422
aaacacacuuccuaaaugg

SEQ ID NO: 899424 - RNA, 19 nt, Artificial Sequence
  Description of Artificial Sequence: Synthetic oligonucleotide
  Sense strand starting at position 3543 of SEQ ID NO: 588930
uaggaaguguguuuccuag

SEQ ID NO: 899425 - RNA, 19 nt, Artificial Sequence
  Description of Artificial Sequence: Synthetic oligonucleotide
  Antisense strand to SEQ ID NO: 899424
cuaggaaacacacuuccua

SEQ ID NO: 899426 - RNA, 19 nt, Artificial Sequence
  Description of Artificial Sequence: Synthetic oligonucleotide
  Sense strand starting at position 3545 of SEQ ID NO: 588930
ggaaguguguuuccuagag

SEQ ID NO: 899427 - RNA, 19 nt, Artificial Sequence
  Description of Artificial Sequence: Synthetic oligonucleotide
  Antisense strand to SEQ ID NO: 899426
cucuaggaaacacacuucc

SEQ ID NO: 899428 - RNA, 19 nt, Artificial Sequence
  Description of Artificial Sequence: Synthetic oligonucleotide
  Sense strand starting at position 3549 of SEQ ID NO: 588930
guguguuuccuagagcugu

SEQ ID NO: 899429 - RNA, 19 nt, Artificial Sequence
  Description of Artificial Sequence: Synthetic oligonucleotide
  Antisense strand to SEQ ID NO: 899428
acagcucuaggaaacacac

SEQ ID NO: 899430 - RNA, 19 nt, Artificial Sequence
  Description of Artificial Sequence: Synthetic oligonucleotide
  Sense strand starting at position 3551 of SEQ ID NO: 588930
guguuuccuagagcugugu

SEQ ID NO: 899431 - RNA, 19 nt, Artificial Sequence
  Description of Artificial Sequence: Synthetic oligonucleotide
  Antisense strand to SEQ ID NO: 899430
acacagcucuaggaaacac

SEQ ID NO: 899432 - RNA, 19 nt, Artificial Sequence
  Description of Artificial Sequence: Synthetic oligonucleotide
  Sense strand starting at position 3553 of SEQ ID NO: 588930
guuuccuagagcuguguaa

SEQ ID NO: 899433 - RNA, 19 nt, Artificial Sequence
  Description of Artificial Sequence: Synthetic oligonucleotide
  Antisense strand to SEQ ID NO: 899432
uuacacagcucuaggaaac

SEQ ID NO: 899434 - RNA, 19 nt, Artificial Sequence
  Description of Artificial Sequence: Synthetic oligonucleotide
  Sense strand starting at position 3555 of SEQ ID NO: 588930
uuccuagagcuguguaaca

SEQ ID NO: 899435 - RNA, 19 nt, Artificial Sequence
  Description of Artificial Sequence: Synthetic oligonucleotide
  Antisense strand to SEQ ID NO: 899434
uguuacacagcucuaggaa

SEQ ID NO: 899436 - RNA, 19 nt, Artificial Sequence
  Description of Artificial Sequence: Synthetic oligonucleotide
  Sense strand starting at position 3557 of SEQ ID NO: 588930
ccuagagcuguguaacaua

SEQ ID NO: 899437 - RNA, 19 nt, Artificial Sequence
  Description of Artificial Sequence: Synthetic oligonucleotide
  Antisense strand to SEQ ID NO: 899436
uauguuacacagcucuagg

SEQ ID NO: 899438 - RNA, 19 nt, Artificial Sequence
  Description of Artificial Sequence: Synthetic oligonucleotide
  Sense strand starting at position 3560 of SEQ ID NO: 588930
agagcuguguaacauagua

SEQ ID NO: 899439 - RNA, 19 nt, Artificial Sequence
  Description of Artificial Sequence: Synthetic oligonucleotide
  Antisense strand to SEQ ID NO: 899438
uacuauguuacacagcucu

SEQ ID NO: 899440 - RNA, 19 nt, Artificial Sequence
  Description of Artificial Sequence: Synthetic oligonucleotide
  Sense strand starting at position 3690 of SEQ ID NO: 588930
agaacagccuuccuuguau

SEQ ID NO: 899441 - RNA, 19 nt, Artificial Sequence
  Description of Artificial Sequence: Synthetic oligonucleotide
  Antisense strand to SEQ ID NO: 899440
auacaaggaaggcuguucu

SEQ ID NO: 899442 - RNA, 19 nt, Artificial Sequence
  Description of Artificial Sequence: Synthetic oligonucleotide
  Sense strand starting at position 3835 of SEQ ID NO: 588930
accguaauguccucaucuu

SEQ ID NO: 899443 - RNA, 19 nt, Artificial Sequence
  Description of Artificial Sequence: Synthetic oligonucleotide
  Antisense strand to SEQ ID NO: 899442
aagaugaggacauuacggu

SEQ ID NO: 899444 - RNA, 19 nt, Artificial Sequence
  Description of Artificial Sequence: Synthetic oligonucleotide
  Sense strand starting at position 3836 of SEQ ID NO: 588930
ccguaauguccucaucuua

SEQ ID NO: 899445 - RNA, 19 nt, Artificial Sequence
  Description of Artificial Sequence: Synthetic oligonucleotide
  Antisense strand to SEQ ID NO: 899444
uaagaugaggacauuacgg

SEQ ID NO: 899446 - RNA, 19 nt, Artificial Sequence
  Description of Artificial Sequence: Synthetic oligonucleotide
  Sense strand starting at position 3865 of SEQ ID NO: 588930
cuauaaagagucuguaaag

SEQ ID NO: 899447 - RNA, 19 nt, Artificial Sequence
  Description of Artificial Sequence: Synthetic oligonucleotide
  Antisense strand to SEQ ID NO: 899446
cuuuacagacucuuuauag

SEQ ID NO: 899448 - RNA, 19 nt, Artificial Sequence
  Description of Artificial Sequence: Synthetic oligonucleotide
  Sense strand starting at position 101 of SEQ ID NO: 588931
cugagauacucugcugaug

SEQ ID NO: 899449 - RNA, 19 nt, Artificial Sequence
  Description of Artificial Sequence: Synthetic oligonucleotide
  Antisense strand to SEQ ID NO: 899448
caucagcagaguaucucag

SEQ ID NO: 899450 - RNA, 19 nt, Artificial Sequence
  Description of Artificial Sequence: Synthetic oligonucleotide
  Sense strand starting at position 263 of SEQ ID NO: 588931
cacgauaacuuaguaagga

SEQ ID NO: 899451 - RNA, 19 nt, Artificial Sequence
  Description of Artificial Sequence: Synthetic oligonucleotide
  Antisense strand to SEQ ID NO: 899450
uccuuacuaaguuaucgug

SEQ ID NO: 899452 - RNA, 19 nt, Artificial Sequence
  Description of Artificial Sequence: Synthetic oligonucleotide
  Sense strand starting at position 299 of SEQ ID NO: 588931
acaauaagugauuguugca

SEQ ID NO: 899453 - RNA, 19 nt, Artificial Sequence
  Description of Artificial Sequence: Synthetic oligonucleotide
  Antisense strand to SEQ ID NO: 899452
ugcaacaaucacuuauugu

SEQ ID NO: 899454 - RNA, 19 nt, Artificial Sequence
  Description of Artificial Sequence: Synthetic oligonucleotide
  Sense strand starting at position 323 of SEQ ID NO: 588931
uggaauaguaugcagcuaa

SEQ ID NO: 899455 - RNA, 19 nt, Artificial Sequence
  Description of Artificial Sequence: Synthetic oligonucleotide
  Antisense strand to SEQ ID NO: 899454
uuagcugcauacuauucca

SEQ ID NO: 899456 - RNA, 19 nt, Artificial Sequence
  Description of Artificial Sequence: Synthetic oligonucleotide
  Sense strand starting at position 334 of SEQ ID NO: 588931
gcagcuaauguagaacauu

SEQ ID NO: 899457 - RNA, 19 nt, Artificial Sequence
  Description of Artificial Sequence: Synthetic oligonucleotide
  Antisense strand to SEQ ID NO: 899456
aauguucuacauuagcugc

SEQ ID NO: 899458 - RNA, 19 nt, Artificial Sequence
  Description of Artificial Sequence: Synthetic oligonucleotide
  Sense strand starting at position 591 of SEQ ID NO: 588931
uggauuaauuuguaaucag

SEQ ID NO: 899459 - RNA, 19 nt, Artificial Sequence
  Description of Artificial Sequence: Synthetic oligonucleotide
  Antisense strand to SEQ ID NO: 899458
cugauuacaaauuaaucca

SEQ ID NO: 899460 - RNA, 19 nt, Artificial Sequence
  Description of Artificial Sequence: Synthetic oligonucleotide
  Sense strand starting at position 841 of SEQ ID NO: 588931
uacaaacgugaaugugauu

SEQ ID NO: 899461 - RNA, 19 nt, Artificial Sequence
  Description of Artificial Sequence: Synthetic oligonucleotide
  Antisense strand to SEQ ID NO: 899460
aaucacauucacguuugua

SEQ ID NO: 899462 - RNA, 19 nt, Artificial Sequence
  Description of Artificial Sequence: Synthetic oligonucleotide
  Sense strand starting at position 1268 of SEQ ID NO: 588931
guaguucuuggacgagaag

SEQ ID NO: 899463 - RNA, 19 nt, Artificial Sequence
  Description of Artificial Sequence: Synthetic oligonucleotide
  Antisense strand to SEQ ID NO: 899462
cuucucguccaagaacuac

SEQ ID NO: 899464 - RNA, 19 nt, Artificial Sequence
  Description of Artificial Sequence: Synthetic oligonucleotide
  Sense strand starting at position 1588 of SEQ ID NO: 588931
gggacaucugcugaaaggu

SEQ ID NO: 899465 - RNA, 19 nt, Artificial Sequence
  Description of Artificial Sequence: Synthetic oligonucleotide
  Antisense strand to SEQ ID NO: 899464
accuuucagcagauguccc

SEQ ID NO: 899466 - RNA, 19 nt, Artificial Sequence
  Description of Artificial Sequence: Synthetic oligonucleotide
  Sense strand starting at position 2121 of SEQ ID NO: 588931
gcgucugucaggcugucaa

SEQ ID NO: 899467 - RNA, 19 nt, Artificial Sequence
  Description of Artificial Sequence: Synthetic oligonucleotide
  Antisense strand to SEQ ID NO: 899466
uugacagccugacagacgc

SEQ ID NO: 899468 - RNA, 19 nt, Artificial Sequence
  Description of Artificial Sequence: Synthetic oligonucleotide
  Sense strand starting at position 2169 of SEQ ID NO: 588931
agcccugauugaucccaua

SEQ ID NO: 899469 - RNA, 19 nt, Artificial Sequence
  Description of Artificial Sequence: Synthetic oligonucleotide
  Antisense strand to SEQ ID NO: 899468
uaugggaucaaucagggcu

SEQ ID NO: 899470 - RNA, 19 nt, Artificial Sequence
  Description of Artificial Sequence: Synthetic oligonucleotide
  Sense strand starting at position 2235 of SEQ ID NO: 588931
ccgagagugccacaguaau

SEQ ID NO: 899471 - RNA, 19 nt, Artificial Sequence
  Description of Artificial Sequence: Synthetic oligonucleotide
  Antisense strand to SEQ ID NO: 899470
auuacuguggcacucucgg

SEQ ID NO: 899472 - RNA, 19 nt, Artificial Sequence
  Description of Artificial Sequence: Synthetic oligonucleotide
  Sense strand starting at position 2241 of SEQ ID NO: 588931
gugccacaguaauuggaaa

SEQ ID NO: 899473 - RNA, 19 nt, Artificial Sequence
  Description of Artificial Sequence: Synthetic oligonucleotide
  Antisense strand to SEQ ID NO: 899472
uuuccaauuacuguggcac

SEQ ID NO: 899474 - RNA, 19 nt, Artificial Sequence
  Description of Artificial Sequence: Synthetic oligonucleotide
  Sense strand starting at position 2301 of SEQ ID NO: 588931
uugaaagcauccuuugaaa

SEQ ID NO: 899475 - RNA, 19 nt, Artificial Sequence
  Description of Artificial Sequence: Synthetic oligonucleotide
  Antisense strand to SEQ ID NO: 899474
uuucaaaggaugcuuucaa

SEQ ID NO: 899476 - RNA, 19 nt, Artificial Sequence
  Description of Artificial Sequence: Synthetic oligonucleotide
  Sense strand starting at position 2374 of SEQ ID NO: 588931
cgccaaauagaugauugua

SEQ ID NO: 899477 - RNA, 19 nt, Artificial Sequence
  Description of Artificial Sequence: Synthetic oligonucleotide
  Antisense strand to SEQ ID NO: 899476
uacaaucaucuauuuggcg

SEQ ID NO: 899478 - RNA, 19 nt, Artificial Sequence
  Description of Artificial Sequence: Synthetic oligonucleotide
  Sense strand starting at position 2496 of SEQ ID NO: 588931
uuaugcguuccacaggaau

SEQ ID NO: 899479 - RNA, 19 nt, Artificial Sequence
  Description of Artificial Sequence: Synthetic oligonucleotide
  Antisense strand to SEQ ID NO: 899478
auuccuguggaacgcauaa

SEQ ID NO: 899480 - RNA, 19 nt, Artificial Sequence
  Description of Artificial Sequence: Synthetic oligonucleotide
  Sense strand starting at position 2499 of SEQ ID NO: 588931
ugcguuccacaggaaugau

SEQ ID NO: 899481 - RNA, 19 nt, Artificial Sequence
  Description of Artificial Sequence: Synthetic oligonucleotide
  Antisense strand to SEQ ID NO: 899480
aucauuccuguggaacgca

SEQ ID NO: 899482 - RNA, 19 nt, Artificial Sequence
  Description of Artificial Sequence: Synthetic oligonucleotide
  Sense strand starting at position 2525 of SEQ ID NO: 588931
gguacuucagucgugcauu

SEQ ID NO: 899483 - RNA, 19 nt, Artificial Sequence
  Description of Artificial Sequence: Synthetic oligonucleotide
  Antisense strand to SEQ ID NO: 899482
aaugcacgacugaaguacc

SEQ ID NO: 899484 - RNA, 19 nt, Artificial Sequence
  Description of Artificial Sequence: Synthetic oligonucleotide
  Sense strand starting at position 2658 of SEQ ID NO: 588931
gggauucuauccucaauga

SEQ ID NO: 899485 - RNA, 19 nt, Artificial Sequence
  Description of Artificial Sequence: Synthetic oligonucleotide
  Antisense strand to SEQ ID NO: 899484
ucauugaggauagaauccc

SEQ ID NO: 899486 - RNA, 19 nt, Artificial Sequence
  Description of Artificial Sequence: Synthetic oligonucleotide
  Sense strand starting at position 2697 of SEQ ID NO: 588931
ggugaccauuaaccagaua

SEQ ID NO: 899487 - RNA, 19 nt, Artificial Sequence
  Description of Artificial Sequence: Synthetic oligonucleotide
  Antisense strand to SEQ ID NO: 899486
uaucugguuaauggucacc

SEQ ID NO: 899488 - RNA, 19 nt, Artificial Sequence
  Description of Artificial Sequence: Synthetic oligonucleotide
  Sense strand starting at position 2772 of SEQ ID NO: 588931
gguagacagacuugaccuu

SEQ ID NO: 899489 - RNA, 19 nt, Artificial Sequence
  Description of Artificial Sequence: Synthetic oligonucleotide
  Antisense strand to SEQ ID NO: 899488
aaggucaagucugucuacc

SEQ ID NO: 899490 - RNA, 19 nt, Artificial Sequence
  Description of Artificial Sequence: Synthetic oligonucleotide
  Sense strand starting at position 2818 of SEQ ID NO: 588931
gacagaaaguuugugcuga

SEQ ID NO: 899491 - RNA, 19 nt, Artificial Sequence
  Description of Artificial Sequence: Synthetic oligonucleotide
  Antisense strand to SEQ ID NO: 899490
ucagcacaaacuuucuguc

SEQ ID NO: 899492 - RNA, 19 nt, Artificial Sequence
  Description of Artificial Sequence: Synthetic oligonucleotide
  Sense strand starting at position 2820 of SEQ ID NO: 588931
cagaaaguuugugcugaag

SEQ ID NO: 899493 - RNA, 19 nt, Artificial Sequence
  Description of Artificial Sequence: Synthetic oligonucleotide
  Antisense strand to SEQ ID NO: 899492
cuucagcacaaacuuucug

SEQ ID NO: 899494 - RNA, 19 nt, Artificial Sequence
  Description of Artificial Sequence: Synthetic oligonucleotide
  Sense strand starting at position 2873 of SEQ ID NO: 588931
ucauguguucuugaucuau

SEQ ID NO: 899495 - RNA, 19 nt, Artificial Sequence
  Description of Artificial Sequence: Synthetic oligonucleotide
  Antisense strand to SEQ ID NO: 899494
auagaucaagaacacauga

SEQ ID NO: 899496 - RNA, 19 nt, Artificial Sequence
  Description of Artificial Sequence: Synthetic oligonucleotide
  Sense strand starting at position 2875 of SEQ ID NO: 588931
auguguucuugaucuauuu

SEQ ID NO: 899497 - RNA, 19 nt, Artificial Sequence
  Description of Artificial Sequence: Synthetic oligonucleotide
  Antisense strand to SEQ ID NO: 899496
aaauagaucaagaacacau

SEQ ID NO: 899498 - RNA, 19 nt, Artificial Sequence
  Description of Artificial Sequence: Synthetic oligonucleotide
  Sense strand starting at position 3114 of SEQ ID NO: 588931
ugaacugagucacuuccaa

SEQ ID NO: 899499 - RNA, 19 nt, Artificial Sequence
  Description of Artificial Sequence: Synthetic oligonucleotide
  Antisense strand to SEQ ID NO: 899498
uuggaagugacucaguuca

SEQ ID NO: 899500 - RNA, 19 nt, Artificial Sequence
  Description of Artificial Sequence: Synthetic oligonucleotide
  Sense strand starting at position 3206 of SEQ ID NO: 588931
augauuuaacuccgucugu

SEQ ID NO: 899501 - RNA, 19 nt, Artificial Sequence
  Description of Artificial Sequence: Synthetic oligonucleotide
  Antisense strand to SEQ ID NO: 899500
acagacggaguuaaaucau

SEQ ID NO: 899502 - RNA, 19 nt, Artificial Sequence
  Description of Artificial Sequence: Synthetic oligonucleotide
  Sense strand starting at position 3207 of SEQ ID NO: 588931
ugauuuaacuccgucugua

SEQ ID NO: 899503 - RNA, 19 nt, Artificial Sequence
  Description of Artificial Sequence: Synthetic oligonucleotide
  Antisense strand to SEQ ID NO: 899502
uacagacggaguuaaauca

SEQ ID NO: 899504 - RNA, 19 nt, Artificial Sequence
  Description of Artificial Sequence: Synthetic oligonucleotide
  Sense strand starting at position 3210 of SEQ ID NO: 588931
uuuaacuccgucuguauuu

SEQ ID NO: 899505 - RNA, 19 nt, Artificial Sequence
  Description of Artificial Sequence: Synthetic oligonucleotide
  Antisense strand to SEQ ID NO: 899504
aaauacagacggaguuaaa

SEQ ID NO: 899506 - RNA, 19 nt, Artificial Sequence
  Description of Artificial Sequence: Synthetic oligonucleotide
  Sense strand starting at position 3211 of SEQ ID NO: 588931
uuaacuccgucuguauuua

SEQ ID NO: 899507 - RNA, 19 nt, Artificial Sequence
  Description of Artificial Sequence: Synthetic oligonucleotide
  Antisense strand to SEQ ID NO: 899506
uaaauacagacggaguuaa

SEQ ID NO: 899508 - RNA, 19 nt, Artificial Sequence
  Description of Artificial Sequence: Synthetic oligonucleotide
  Sense strand starting at position 3215 of SEQ ID NO: 588931
cuccgucuguauuuaacaa

SEQ ID NO: 899509 - RNA, 19 nt, Artificial Sequence
  Description of Artificial Sequence: Synthetic oligonucleotide
  Antisense strand to SEQ ID NO: 899508
uuguuaaauacagacggag

SEQ ID NO: 899510 - RNA, 19 nt, Artificial Sequence
  Description of Artificial Sequence: Synthetic oligonucleotide
  Sense strand starting at position 3257 of SEQ ID NO: 588931
caauguauuguguaacaug

SEQ ID NO: 899511 - RNA, 19 nt, Artificial Sequence
  Description of Artificial Sequence: Synthetic oligonucleotide
  Antisense strand to SEQ ID NO: 899510
cauguuacacaauacauug

SEQ ID NO: 899512 - RNA, 19 nt, Artificial Sequence
  Description of Artificial Sequence: Synthetic oligonucleotide
  Sense strand starting at position 3384 of SEQ ID NO: 588931
cauauuaagggcugucaua

SEQ ID NO: 899513 - RNA, 19 nt, Artificial Sequence
  Description of Artificial Sequence: Synthetic oligonucleotide
  Antisense strand to SEQ ID NO: 899512
uaugacagcccuuaauaug

SEQ ID NO: 899514 - RNA, 19 nt, Artificial Sequence
  Description of Artificial Sequence: Synthetic oligonucleotide
  Sense strand starting at position 3561 of SEQ ID NO: 588931
gcauguuagauacggagga

SEQ ID NO: 899515 - RNA, 19 nt, Artificial Sequence
  Description of Artificial Sequence: Synthetic oligonucleotide
  Antisense strand to SEQ ID NO: 899514
uccuccguaucuaacaugc

SEQ ID NO: 899516 - RNA, 19 nt, Artificial Sequence
  Description of Artificial Sequence: Synthetic oligonucleotide
  Sense strand starting at position 3586 of SEQ ID NO: 588931
ggugaauaagacugaguuc

SEQ ID NO: 899517 - RNA, 19 nt, Artificial Sequence
  Description of Artificial Sequence: Synthetic oligonucleotide
  Antisense strand to SEQ ID NO: 899516
gaacucagucuuauucacc

SEQ ID NO: 899518 - RNA, 19 nt, Artificial Sequence
  Description of Artificial Sequence: Synthetic oligonucleotide
  Sense strand starting at position 3599 of SEQ ID NO: 588931
gaguuccaguccuccagaa

SEQ ID NO: 899519 - RNA, 19 nt, Artificial Sequence
  Description of Artificial Sequence: Synthetic oligonucleotide
  Antisense strand to SEQ ID NO: 899518
uucuggaggacuggaacuc

SEQ ID NO: 899520 - RNA, 19 nt, Artificial Sequence
  Description of Artificial Sequence: Synthetic oligonucleotide
  Sense strand starting at position 3601 of SEQ ID NO: 588931
guuccaguccuccagaagu

SEQ ID NO: 899521 - RNA, 19 nt, Artificial Sequence
  Description of Artificial Sequence: Synthetic oligonucleotide
  Antisense strand to SEQ ID NO: 899520
acuucuggaggacuggaac

SEQ ID NO: 899522 - RNA, 19 nt, Artificial Sequence
  Description of Artificial Sequence: Synthetic oligonucleotide
  Sense strand starting at position 3899 of SEQ ID NO: 588931
gguacucaauugcuuuaga

SEQ ID NO: 899523 - RNA, 19 nt, Artificial Sequence
  Description of Artificial Sequence: Synthetic oligonucleotide
  Antisense strand to SEQ ID NO: 899522
ucuaaagcaauugaguacc

SEQ ID NO: 899524 - RNA, 19 nt, Artificial Sequence
  Description of Artificial Sequence: Synthetic oligonucleotide
  Sense strand starting at position 3900 of SEQ ID NO: 588931
guacucaauugcuuuagaa

SEQ ID NO: 899525 - RNA, 19 nt, Artificial Sequence
  Description of Artificial Sequence: Synthetic oligonucleotide
  Antisense strand to SEQ ID NO: 899524
uucuaaagcaauugaguac

SEQ ID NO: 899526 - RNA, 19 nt, Artificial Sequence
  Description of Artificial Sequence: Synthetic oligonucleotide
  Sense strand starting at position 3977 of SEQ ID NO: 588931
ugguuaguauaacuaaacu

SEQ ID NO: 899527 - RNA, 19 nt, Artificial Sequence
  Description of Artificial Sequence: Synthetic oligonucleotide
  Antisense strand to SEQ ID NO: 899526
aguuuaguuauacuaacca

SEQ ID NO: 899528 - RNA, 19 nt, Artificial Sequence
  Description of Artificial Sequence: Synthetic oligonucleotide
  Sense strand starting at position 227 of SEQ ID NO: 588932
aaggcaugaucugcaguga

SEQ ID NO: 899529 - RNA, 19 nt, Artificial Sequence
  Description of Artificial Sequence: Synthetic oligonucleotide
  Antisense strand to SEQ ID NO: 899528
ucacugcagaucaugccuu

SEQ ID NO: 899530 - RNA, 19 nt, Artificial Sequence
  Description of Artificial Sequence: Synthetic oligonucleotide
  Sense strand starting at position 231 of SEQ ID NO: 588932
caugaucugcagugaguua

SEQ ID NO: 899531 - RNA, 19 nt, Artificial Sequence
  Description of Artificial Sequence: Synthetic oligonucleotide
  Antisense strand to SEQ ID NO: 899530
uaacucacugcagaucaug

SEQ ID NO: 899532 - RNA, 19 nt, Artificial Sequence
  Description of Artificial Sequence: Synthetic oligonucleotide
  Sense strand starting at position 243 of SEQ ID NO: 588932
ugaguuaccgcauggucaa

SEQ ID NO: 899533 - RNA, 19 nt, Artificial Sequence
  Description of Artificial Sequence: Synthetic oligonucleotide
  Antisense strand to SEQ ID NO: 899532
uugaccaugcgguaacuca

SEQ ID NO: 899534 - RNA, 19 nt, Artificial Sequence
  Description of Artificial Sequence: Synthetic oligonucleotide
  Sense strand starting at position 244 of SEQ ID NO: 588932
gaguuaccgcauggucaaa

SEQ ID NO: 899535 - RNA, 19 nt, Artificial Sequence
  Description of Artificial Sequence: Synthetic oligonucleotide
  Antisense strand to SEQ ID NO: 899534
uuugaccaugcgguaacuc

SEQ ID NO: 899536 - RNA, 19 nt, Artificial Sequence
  Description of Artificial Sequence: Synthetic oligonucleotide
  Sense strand starting at position 348 of SEQ ID NO: 588932
aucugagcucacugugagu

SEQ ID NO: 899537 - RNA, 19 nt, Artificial Sequence
  Description of Artificial Sequence: Synthetic oligonucleotide
  Antisense strand to SEQ ID NO: 899536
acucacagugagcucagau

SEQ ID NO: 899538 - RNA, 19 nt, Artificial Sequence
  Description of Artificial Sequence: Synthetic oligonucleotide
  Sense strand starting at position 440 of SEQ ID NO: 588932
aucucagaaccaugugcau

SEQ ID NO: 899539 - RNA, 19 nt, Artificial Sequence
  Description of Artificial Sequence: Synthetic oligonucleotide
  Antisense strand to SEQ ID NO: 899538
augcacaugguucugagau

SEQ ID NO: 899540 - RNA, 19 nt, Artificial Sequence
  Description of Artificial Sequence: Synthetic oligonucleotide
  Sense strand starting at position 453 of SEQ ID NO: 588932
gugcauacuuguccuggaa

SEQ ID NO: 899541 - RNA, 19 nt, Artificial Sequence
  Description of Artificial Sequence: Synthetic oligonucleotide
  Antisense strand to SEQ ID NO: 899540
uuccaggacaaguaugcac

SEQ ID NO: 899542 - RNA, 19 nt, Artificial Sequence
  Description of Artificial Sequence: Synthetic oligonucleotide
  Sense strand starting at position 457 of SEQ ID NO: 588932
auacuuguccuggaauuau

SEQ ID NO: 899543 - RNA, 19 nt, Artificial Sequence
  Description of Artificial Sequence: Synthetic oligonucleotide
  Antisense strand to SEQ ID NO: 899542
auaauuccaggacaaguau

SEQ ID NO: 899544 - RNA, 19 nt, Artificial Sequence
  Description of Artificial Sequence: Synthetic oligonucleotide
  Sense strand starting at position 593 of SEQ ID NO: 588932
uugagacuugucuagcucu

SEQ ID NO: 899545 - RNA, 19 nt, Artificial Sequence
  Description of Artificial Sequence: Synthetic oligonucleotide
  Antisense strand to SEQ ID NO: 899544
agagcuagacaagucucaa

SEQ ID NO: 899546 - RNA, 19 nt, Artificial Sequence
  Description of Artificial Sequence: Synthetic oligonucleotide
  Sense strand starting at position 596 of SEQ ID NO: 588932
agacuugucuagcucuguu

SEQ ID NO: 899547 - RNA, 19 nt, Artificial Sequence
  Description of Artificial Sequence: Synthetic oligonucleotide
  Antisense strand to SEQ ID NO: 899546
aacagagcuagacaagucu

SEQ ID NO: 899548 - RNA, 19 nt, Artificial Sequence
  Description of Artificial Sequence: Synthetic oligonucleotide
  Sense strand starting at position 880 of SEQ ID NO: 588932
cacgaucuaccuuaagagu

SEQ ID NO: 899549 - RNA, 19 nt, Artificial Sequence
  Description of Artificial Sequence: Synthetic oligonucleotide
  Antisense strand to SEQ ID NO: 899548
acucuuaagguagaucgug

SEQ ID NO: 899550 - RNA, 19 nt, Artificial Sequence
  Description of Artificial Sequence: Synthetic oligonucleotide
  Sense strand starting at position 887 of SEQ ID NO: 588932
uaccuuaagagugguggua

SEQ ID NO: 899551 - RNA, 19 nt, Artificial Sequence
  Description of Artificial Sequence: Synthetic oligonucleotide
  Antisense strand to SEQ ID NO: 899550
uaccaccacucuuaaggua

SEQ ID NO: 899552 - RNA, 19 nt, Artificial Sequence
  Description of Artificial Sequence: Synthetic oligonucleotide
  Sense strand starting at position 902 of SEQ ID NO: 588932
gguaguuguaguggcaacu

SEQ ID NO: 899553 - RNA, 19 nt, Artificial Sequence
  Description of Artificial Sequence: Synthetic oligonucleotide
  Antisense strand to SEQ ID NO: 899552
aguugccacuacaacuacc

SEQ ID NO: 899554 - RNA, 19 nt, Artificial Sequence
  Description of Artificial Sequence: Synthetic oligonucleotide
  Sense strand starting at position 982 of SEQ ID NO: 588932
agagacuauuagcaacgaa

SEQ ID NO: 899555 - RNA, 19 nt, Artificial Sequence
  Description of Artificial Sequence: Synthetic oligonucleotide
  Antisense strand to SEQ ID NO: 899554
uucguugcuaauagucucu

SEQ ID NO: 899556 - RNA, 19 nt, Artificial Sequence
  Description of Artificial Sequence: Synthetic oligonucleotide
  Sense strand starting at position 1231 of SEQ ID NO: 588932
gggagggauucgggaauga

SEQ ID NO: 899557 - RNA, 19 nt, Artificial Sequence
  Description of Artificial Sequence: Synthetic oligonucleotide
  Antisense strand to SEQ ID NO: 899556
ucauucccgaaucccuccc

SEQ ID NO: 899558 - RNA, 19 nt, Artificial Sequence
  Description of Artificial Sequence: Synthetic oligonucleotide
  Sense strand starting at position 1258 of SEQ ID NO: 588932
uucucagucgacugggaga

SEQ ID NO: 899559 - RNA, 19 nt, Artificial Sequence
  Description of Artificial Sequence: Synthetic oligonucleotide
  Antisense strand to SEQ ID NO: 899558
ucucccagucgacugagaa

SEQ ID NO: 899560 - RNA, 19 nt, Artificial Sequence
  Description of Artificial Sequence: Synthetic oligonucleotide
  Sense strand starting at position 1652 of SEQ ID NO: 588932
gggagucuuuggaggugau

SEQ ID NO: 899561 - RNA, 19 nt, Artificial Sequence
  Description of Artificial Sequence: Synthetic oligonucleotide
  Antisense strand to SEQ ID NO: 899560
aucaccuccaaagacuccc

SEQ ID NO: 899562 - RNA, 19 nt, Artificial Sequence
  Description of Artificial Sequence: Synthetic oligonucleotide
  Sense strand starting at position 1653 of SEQ ID NO: 588932
ggagucuuuggaggugauu

SEQ ID NO: 899563 - RNA, 19 nt, Artificial Sequence
  Description of Artificial Sequence: Synthetic oligonucleotide
  Antisense strand to SEQ ID NO: 899562
aaucaccuccaaagacucc

SEQ ID NO: 899564 - RNA, 19 nt, Artificial Sequence
  Description of Artificial Sequence: Synthetic oligonucleotide
  Sense strand starting at position 2067 of SEQ ID NO: 588932
cccauucugcgcuccagua

SEQ ID NO: 899565 - RNA, 19 nt, Artificial Sequence
  Description of Artificial Sequence: Synthetic oligonucleotide
  Antisense strand to SEQ ID NO: 899564
uacuggagcgcagaauggg

SEQ ID NO: 899566 - RNA, 19 nt, Artificial Sequence
  Description of Artificial Sequence: Synthetic oligonucleotide
  Sense strand starting at position 2068 of SEQ ID NO: 588932
ccauucugcgcuccaguau

SEQ ID NO: 899567 - RNA, 19 nt, Artificial Sequence
  Description of Artificial Sequence: Synthetic oligonucleotide
  Antisense strand to SEQ ID NO: 899566
auacuggagcgcagaaugg

SEQ ID NO: 899568 - RNA, 19 nt, Artificial Sequence
  Description of Artificial Sequence: Synthetic oligonucleotide
  Sense strand starting at position 2834 of SEQ ID NO: 588932
gagaccagucuuugaucuu

SEQ ID NO: 899569 - RNA, 19 nt, Artificial Sequence
  Description of Artificial Sequence: Synthetic oligonucleotide
  Antisense strand to SEQ ID NO: 899568
aagaucaaagacuggucuc

SEQ ID NO: 899570 - RNA, 19 nt, Artificial Sequence
  Description of Artificial Sequence: Synthetic oligonucleotide
  Sense strand starting at position 2987 of SEQ ID NO: 588932
agacauugacagugugaaa

SEQ ID NO: 899571 - RNA, 19 nt, Artificial Sequence
  Description of Artificial Sequence: Synthetic oligonucleotide
  Antisense strand to SEQ ID NO: 899570
uuucacacugucaaugucu

SEQ ID NO: 899572 - RNA, 19 nt, Artificial Sequence
  Description of Artificial Sequence: Synthetic oligonucleotide
  Sense strand starting at position 3181 of SEQ ID NO: 588932
uucaguggucucuggaaug

SEQ ID NO: 899573 - RNA, 19 nt, Artificial Sequence
  Description of Artificial Sequence: Synthetic oligonucleotide
  Antisense strand to SEQ ID NO: 899572
cauuccagagaccacugaa

SEQ ID NO: 899574 - RNA, 19 nt, Artificial Sequence
  Description of Artificial Sequence: Synthetic oligonucleotide
  Sense strand starting at position 3186 of SEQ ID NO: 588932
uggucucuggaaugagauc

SEQ ID NO: 899575 - RNA, 19 nt, Artificial Sequence
  Description of Artificial Sequence: Synthetic oligonucleotide
  Antisense strand to SEQ ID NO: 899574
gaucucauuccagagacca

SEQ ID NO: 899576 - RNA, 19 nt, Artificial Sequence
  Description of Artificial Sequence: Synthetic oligonucleotide
  Sense strand starting at position 3193 of SEQ ID NO: 588932
uggaaugagaucugcuuau

SEQ ID NO: 899577 - RNA, 19 nt, Artificial Sequence
  Description of Artificial Sequence: Synthetic oligonucleotide
  Antisense strand to SEQ ID NO: 899576
auaagcagaucucauucca

SEQ ID NO: 899578 - RNA, 19 nt, Artificial Sequence
  Description of Artificial Sequence: Synthetic oligonucleotide
  Sense strand starting at position 3197 of SEQ ID NO: 588932
augagaucugcuuaucuuc

SEQ ID NO: 899579 - RNA, 19 nt, Artificial Sequence
  Description of Artificial Sequence: Synthetic oligonucleotide
  Antisense strand to SEQ ID NO: 899578
gaagauaagcagaucucau

SEQ ID NO: 899580 - RNA, 19 nt, Artificial Sequence
  Description of Artificial Sequence: Synthetic oligonucleotide
  Sense strand starting at position 3285 of SEQ ID NO: 588932
cuuggagugccacaggaua

SEQ ID NO: 899581 - RNA, 19 nt, Artificial Sequence
  Description of Artificial Sequence: Synthetic oligonucleotide
  Antisense strand to SEQ ID NO: 899580
uauccuguggcacuccaag

SEQ ID NO: 899582 - RNA, 19 nt, Artificial Sequence
  Description of Artificial Sequence: Synthetic oligonucleotide
  Sense strand starting at position 3287 of SEQ ID NO: 588932
uggagugccacaggauaaa

SEQ ID NO: 899583 - RNA, 19 nt, Artificial Sequence
  Description of Artificial Sequence: Synthetic oligonucleotide
  Antisense strand to SEQ ID NO: 899582
uuuauccuguggcacucca

SEQ ID NO: 899584 - RNA, 19 nt, Artificial Sequence
  Description of Artificial Sequence: Synthetic oligonucleotide
  Sense strand starting at position 3325 of SEQ ID NO: 588932
gcaucagucucccuuuauu

SEQ ID NO: 899585 - RNA, 19 nt, Artificial Sequence
  Description of Artificial Sequence: Synthetic oligonucleotide
  Antisense strand to SEQ ID NO: 899584
aauaaagggagacugaugc

SEQ ID NO: 899586 - RNA, 19 nt, Artificial Sequence
  Description of Artificial Sequence: Synthetic oligonucleotide
  Sense strand starting at position 3377 of SEQ ID NO: 588932
ggaugacagucacauaaau

SEQ ID NO: 899587 - RNA, 19 nt, Artificial Sequence
  Description of Artificial Sequence: Synthetic oligonucleotide
  Antisense strand to SEQ ID NO: 899586
auuuaugugacugucaucc

SEQ ID NO: 899588 - RNA, 19 nt, Artificial Sequence
  Description of Artificial Sequence: Synthetic oligonucleotide
  Sense strand starting at position 3448 of SEQ ID NO: 588932
ucuguuaaauucccagguu

SEQ ID NO: 899589 - RNA, 19 nt, Artificial Sequence
  Description of Artificial Sequence: Synthetic oligonucleotide
  Antisense strand to SEQ ID NO: 899588
aaccugggaauuuaacaga

SEQ ID NO: 899590 - RNA, 19 nt, Artificial Sequence
  Description of Artificial Sequence: Synthetic oligonucleotide
  Sense strand starting at position 3514 of SEQ ID NO: 588932
uugagaggcauuggugcau

SEQ ID NO: 899591 - RNA, 19 nt, Artificial Sequence
  Description of Artificial Sequence: Synthetic oligonucleotide
  Antisense strand to SEQ ID NO: 899590
augcaccaaugccucucaa

SEQ ID NO: 899592 - RNA, 19 nt, Artificial Sequence
  Description of Artificial Sequence: Synthetic oligonucleotide
  Sense strand starting at position 3525 of SEQ ID NO: 588932
uggugcauuucuuaacauu

SEQ ID NO: 899593 - RNA, 19 nt, Artificial Sequence
  Description of Artificial Sequence: Synthetic oligonucleotide
  Antisense strand to SEQ ID NO: 899592
aauguuaagaaaugcacca

SEQ ID NO: 899594 - RNA, 19 nt, Artificial Sequence
  Description of Artificial Sequence: Synthetic oligonucleotide
  Sense strand starting at position 3542 of SEQ ID NO: 588932
uuaccaaacgugugaggau

SEQ ID NO: 899595 - RNA, 19 nt, Artificial Sequence
  Description of Artificial Sequence: Synthetic oligonucleotide
  Antisense strand to SEQ ID NO: 899594
auccucacacguuugguaa

SEQ ID NO: 899596 - RNA, 19 nt, Artificial Sequence
  Description of Artificial Sequence: Synthetic oligonucleotide
  Sense strand starting at position 3585 of SEQ ID NO: 588932
acaguuccugccgacuuaa

SEQ ID NO: 899597 - RNA, 19 nt, Artificial Sequence
  Description of Artificial Sequence: Synthetic oligonucleotide
  Antisense strand to SEQ ID NO: 899596
uuaagucggcaggaacugu

SEQ ID NO: 899598 - RNA, 19 nt, Artificial Sequence
  Description of Artificial Sequence: Synthetic oligonucleotide
  Sense strand starting at position 3758 of SEQ ID NO: 588932
uugaauucuccuuggugga

SEQ ID NO: 899599 - RNA, 19 nt, Artificial Sequence
  Description of Artificial Sequence: Synthetic oligonucleotide
  Antisense strand to SEQ ID NO: 899598
uccaccaaggagaauucaa

SEQ ID NO: 899600 - RNA, 19 nt, Artificial Sequence
  Description of Artificial Sequence: Synthetic oligonucleotide
  Sense strand starting at position 3759 of SEQ ID NO: 588932
ugaauucuccuugguggag

SEQ ID NO: 899601 - RNA, 19 nt, Artificial Sequence
  Description of Artificial Sequence: Synthetic oligonucleotide
  Antisense strand to SEQ ID NO: 899600
cuccaccaaggagaauuca

SEQ ID NO: 899602 - RNA, 19 nt, Artificial Sequence
  Description of Artificial Sequence: Synthetic oligonucleotide
  Sense strand starting at position 3760 of SEQ ID NO: 588932
gaauucuccuugguggagu

SEQ ID NO: 899603 - RNA, 19 nt, Artificial Sequence
  Description of Artificial Sequence: Synthetic oligonucleotide
  Antisense strand to SEQ ID NO: 899602
acuccaccaaggagaauuc

SEQ ID NO: 899604 - RNA, 19 nt, Artificial Sequence
  Description of Artificial Sequence: Synthetic oligonucleotide
  Sense strand starting at position 3813 of SEQ ID NO: 588932
guaauuagugcgugaaacc

SEQ ID NO: 899605 - RNA, 19 nt, Artificial Sequence
  Description of Artificial Sequence: Synthetic oligonucleotide
  Antisense strand to SEQ ID NO: 899604
gguuucacgcacuaauuac

SEQ ID NO: 899606 - RNA, 19 nt, Artificial Sequence
  Description of Artificial Sequence: Synthetic oligonucleotide
  Sense strand starting at position 3814 of SEQ ID NO: 588932
uaauuagugcgugaaacca

SEQ ID NO: 899607 - RNA, 19 nt, Artificial Sequence
  Description of Artificial Sequence: Synthetic oligonucleotide
  Antisense strand to SEQ ID NO: 899606
ugguuucacgcacuaauua

SEQ ID NO: 899608 - RNA, 19 nt, Artificial Sequence
  Description of Artificial Sequence: Synthetic oligonucleotide
  Sense strand starting at position 6 of SEQ ID NO: 588933
gugcuaaauaagugaaguu

SEQ ID NO: 899609 - RNA, 19 nt, Artificial Sequence
  Description of Artificial Sequence: Synthetic oligonucleotide
  Antisense strand to SEQ ID NO: 899608
aacuucacuuauuuagcac

SEQ ID NO: 899610 - RNA, 19 nt, Artificial Sequence
  Description of Artificial Sequence: Synthetic oligonucleotide
  Sense strand starting at position 364 of SEQ ID NO: 588933
guagaagaguaagaggaua

SEQ ID NO: 899611 - RNA, 19 nt, Artificial Sequence
  Description of Artificial Sequence: Synthetic oligonucleotide
  Antisense strand to SEQ ID NO: 899610
uauccucuuacucuucuac

SEQ ID NO: 899612 - RNA, 19 nt, Artificial Sequence
  Description of Artificial Sequence: Synthetic oligonucleotide
  Sense strand starting at position 787 of SEQ ID NO: 588933
gggauuaaaugguuccuuu

SEQ ID NO: 899613 - RNA, 19 nt, Artificial Sequence
  Description of Artificial Sequence: Synthetic oligonucleotide
  Antisense strand to SEQ ID NO: 899612
aaaggaaccauuuaauccc

SEQ ID NO: 899614 - RNA, 19 nt, Artificial Sequence
  Description of Artificial Sequence: Synthetic oligonucleotide
  Sense strand starting at position 880 of SEQ ID NO: 588933
ugcuuugaacucuacuuga

SEQ ID NO: 899615 - RNA, 19 nt, Artificial Sequence
  Description of Artificial Sequence: Synthetic oligonucleotide
  Antisense strand to SEQ ID NO: 899614
ucaaguagaguucaaagca

SEQ ID NO: 899616 - RNA, 19 nt, Artificial Sequence
  Description of Artificial Sequence: Synthetic oligonucleotide
  Sense strand starting at position 883 of SEQ ID NO: 588933
uuugaacucuacuugaguu

SEQ ID NO: 899617 - RNA, 19 nt, Artificial Sequence
  Description of Artificial Sequence: Synthetic oligonucleotide
  Antisense strand to SEQ ID NO: 899616
aacucaaguagaguucaaa

SEQ ID NO: 899618 - RNA, 19 nt, Artificial Sequence
  Description of Artificial Sequence: Synthetic oligonucleotide
  Sense strand starting at position 890 of SEQ ID NO: 588933
ucuacuugaguucgacuga

SEQ ID NO: 899619 - RNA, 19 nt, Artificial Sequence
  Description of Artificial Sequence: Synthetic oligonucleotide
  Antisense strand to SEQ ID NO: 899618
ucagucgaacucaaguaga

SEQ ID NO: 899620 - RNA, 19 nt, Artificial Sequence
  Description of Artificial Sequence: Synthetic oligonucleotide
  Sense strand starting at position 895 of SEQ ID NO: 588933
uugaguucgacugaaucuu

SEQ ID NO: 899621 - RNA, 19 nt, Artificial Sequence
  Description of Artificial Sequence: Synthetic oligonucleotide
  Antisense strand to SEQ ID NO: 899620
aagauucagucgaacucaa

SEQ ID NO: 899622 - RNA, 19 nt, Artificial Sequence
  Description of Artificial Sequence: Synthetic oligonucleotide
  Sense strand starting at position 901 of SEQ ID NO: 588933
ucgacugaaucuuugcuaa

SEQ ID NO: 899623 - RNA, 19 nt, Artificial Sequence
  Description of Artificial Sequence: Synthetic oligonucleotide
  Antisense strand to SEQ ID NO: 899622
uuagcaaagauucagucga

SEQ ID NO: 899624 - RNA, 19 nt, Artificial Sequence
  Description of Artificial Sequence: Synthetic oligonucleotide
  Sense strand starting at position 903 of SEQ ID NO: 588933
gacugaaucuuugcuaagu

SEQ ID NO: 899625 - RNA, 19 nt, Artificial Sequence
  Description of Artificial Sequence: Synthetic oligonucleotide
  Antisense strand to SEQ ID NO: 899624
acuuagcaaagauucaguc

SEQ ID NO: 899626 - RNA, 19 nt, Artificial Sequence
  Description of Artificial Sequence: Synthetic oligonucleotide
  Sense strand starting at position 1251 of SEQ ID NO: 588933
aaggguuguuguuugaaug

SEQ ID NO: 899627 - RNA, 19 nt, Artificial Sequence
  Description of Artificial Sequence: Synthetic oligonucleotide
  Antisense strand to SEQ ID NO: 899626
cauucaaacaacaacccuu

SEQ ID NO: 899628 - RNA, 19 nt, Artificial Sequence
  Description of Artificial Sequence: Synthetic oligonucleotide
  Sense strand starting at position 1299 of SEQ ID NO: 588933
uuugucuaagcucauaaga

SEQ ID NO: 899629 - RNA, 19 nt, Artificial Sequence
  Description of Artificial Sequence: Synthetic oligonucleotide
  Antisense strand to SEQ ID NO: 899628
ucuuaugagcuuagacaaa

SEQ ID NO: 899630 - RNA, 19 nt, Artificial Sequence
  Description of Artificial Sequence: Synthetic oligonucleotide
  Sense strand starting at position 1310 of SEQ ID NO: 588933
ucauaagacgucuggacau

SEQ ID NO: 899631 - RNA, 19 nt, Artificial Sequence
  Description of Artificial Sequence: Synthetic oligonucleotide
  Antisense strand to SEQ ID NO: 899630
auguccagacgucuuauga

SEQ ID NO: 899632 - RNA, 19 nt, Artificial Sequence
  Description of Artificial Sequence: Synthetic oligonucleotide
  Sense strand starting at position 1367 of SEQ ID NO: 588933
uccaguggauucguguaaa

SEQ ID NO: 899633 - RNA, 19 nt, Artificial Sequence
  Description of Artificial Sequence: Synthetic oligonucleotide
  Antisense strand to SEQ ID NO: 899632
uuuacacgaauccacugga

SEQ ID NO: 899634 - RNA, 19 nt, Artificial Sequence
  Description of Artificial Sequence: Synthetic oligonucleotide
  Sense strand starting at position 1370 of SEQ ID NO: 588933
aguggauucguguaaaugg

SEQ ID NO: 899635 - RNA, 19 nt, Artificial Sequence
  Description of Artificial Sequence: Synthetic oligonucleotide
  Antisense strand to SEQ ID NO: 899634
ccauuuacacgaauccacu

SEQ ID NO: 899636 - RNA, 19 nt, Artificial Sequence
  Description of Artificial Sequence: Synthetic oligonucleotide
  Sense strand starting at position 1375 of SEQ ID NO: 588933
auucguguaaauggccaaa

SEQ ID NO: 899637 - RNA, 19 nt, Artificial Sequence
  Description of Artificial Sequence: Synthetic oligonucleotide
  Antisense strand to SEQ ID NO: 899636
uuuggccauuuacacgaau

SEQ ID NO: 899638 - RNA, 19 nt, Artificial Sequence
  Description of Artificial Sequence: Synthetic oligonucleotide
  Sense strand starting at position 1631 of SEQ ID NO: 588933
gcggaacccaccuguauuu

SEQ ID NO: 899639 - RNA, 19 nt, Artificial Sequence
  Description of Artificial Sequence: Synthetic oligonucleotide
  Antisense strand to SEQ ID NO: 899638
aaauacagguggguuccgc

SEQ ID NO: 899640 - RNA, 19 nt, Artificial Sequence
  Description of Artificial Sequence: Synthetic oligonucleotide
  Sense strand starting at position 2273 of SEQ ID NO: 588933
auggcauauucccuggagu

SEQ ID NO: 899641 - RNA, 19 nt, Artificial Sequence
  Description of Artificial Sequence: Synthetic oligonucleotide
  Antisense strand to SEQ ID NO: 899640
acuccagggaauaugccau

SEQ ID NO: 899642 - RNA, 19 nt, Artificial Sequence
  Description of Artificial Sequence: Synthetic oligonucleotide
  Sense strand starting at position 2274 of SEQ ID NO: 588933
uggcauauucccuggagug

SEQ ID NO: 899643 - RNA, 19 nt, Artificial Sequence
  Description of Artificial Sequence: Synthetic oligonucleotide
  Antisense strand to SEQ ID NO: 899642
cacuccagggaauaugcca

SEQ ID NO: 899644 - RNA, 19 nt, Artificial Sequence
  Description of Artificial Sequence: Synthetic oligonucleotide
  Sense strand starting at position 2276 of SEQ ID NO: 588933
gcauauucccuggagugua

SEQ ID NO: 899645 - RNA, 19 nt, Artificial Sequence
  Description of Artificial Sequence: Synthetic oligonucleotide
  Antisense strand to SEQ ID NO: 899644
uacacuccagggaauaugc

SEQ ID NO: 899646 - RNA, 19 nt, Artificial Sequence
  Description of Artificial Sequence: Synthetic oligonucleotide
  Sense strand starting at position 2288 of SEQ ID NO: 588933
gaguguaucuuggucacca

SEQ ID NO: 899647 - RNA, 19 nt, Artificial Sequence
  Description of Artificial Sequence: Synthetic oligonucleotide
  Antisense strand to SEQ ID NO: 899646
uggugaccaagauacacuc

SEQ ID NO: 899648 - RNA, 19 nt, Artificial Sequence
  Description of Artificial Sequence: Synthetic oligonucleotide
  Sense strand starting at position 2289 of SEQ ID NO: 588933
aguguaucuuggucaccaa

SEQ ID NO: 899649 - RNA, 19 nt, Artificial Sequence
  Description of Artificial Sequence: Synthetic oligonucleotide
  Antisense strand to SEQ ID NO: 899648
uuggugaccaagauacacu

SEQ ID NO: 899650 - RNA, 19 nt, Artificial Sequence
  Description of Artificial Sequence: Synthetic oligonucleotide
  Sense strand starting at position 2290 of SEQ ID NO: 588933
guguaucuuggucaccaaa

SEQ ID NO: 899651 - RNA, 19 nt, Artificial Sequence
  Description of Artificial Sequence: Synthetic oligonucleotide
  Antisense strand to SEQ ID NO: 899650
uuuggugaccaagauacac

SEQ ID NO: 899652 - RNA, 19 nt, Artificial Sequence
  Description of Artificial Sequence: Synthetic oligonucleotide
  Sense strand starting at position 2703 of SEQ ID NO: 588933
auauaaugugcuggauugu

SEQ ID NO: 899653 - RNA, 19 nt, Artificial Sequence
  Description of Artificial Sequence: Synthetic oligonucleotide
  Antisense strand to SEQ ID NO: 899652
acaauccagcacauuauau

SEQ ID NO: 899654 - RNA, 19 nt, Artificial Sequence
  Description of Artificial Sequence: Synthetic oligonucleotide
  Sense strand starting at position 2704 of SEQ ID NO: 588933
uauaaugugcuggauugua

SEQ ID NO: 899655 - RNA, 19 nt, Artificial Sequence
  Description of Artificial Sequence: Synthetic oligonucleotide
  Antisense strand to SEQ ID NO: 899654
uacaauccagcacauuaua

SEQ ID NO: 899656 - RNA, 19 nt, Artificial Sequence
  Description of Artificial Sequence: Synthetic oligonucleotide
  Sense strand starting at position 2718 of SEQ ID NO: 588933
uuguaauugccauggagaa

SEQ ID NO: 899657 - RNA, 19 nt, Artificial Sequence
  Description of Artificial Sequence: Synthetic oligonucleotide
  Antisense strand to SEQ ID NO: 899656
uucuccauggcaauuacaa

SEQ ID NO: 899658 - RNA, 19 nt, Artificial Sequence
  Description of Artificial Sequence: Synthetic oligonucleotide
  Sense strand starting at position 2719 of SEQ ID NO: 588933
uguaauugccauggagaaa

SEQ ID NO: 899659 - RNA, 19 nt, Artificial Sequence
  Description of Artificial Sequence: Synthetic oligonucleotide
  Antisense strand to SEQ ID NO: 899658
uuucuccauggcaauuaca

SEQ ID NO: 899660 - RNA, 19 nt, Artificial Sequence
  Description of Artificial Sequence: Synthetic oligonucleotide
  Sense strand starting at position 2747 of SEQ ID NO: 588933
ugggacuauuuacacuuau

SEQ ID NO: 899661 - RNA, 19 nt, Artificial Sequence
  Description of Artificial Sequence: Synthetic oligonucleotide
  Antisense strand to SEQ ID NO: 899660
auaaguguaaauaguccca

SEQ ID NO: 899662 - RNA, 19 nt, Artificial Sequence
  Description of Artificial Sequence: Synthetic oligonucleotide
  Sense strand starting at position 2787 of SEQ ID NO: 588933
cuuccaggguuauuggauu

SEQ ID NO: 899663 - RNA, 19 nt, Artificial Sequence
  Description of Artificial Sequence: Synthetic oligonucleotide
  Antisense strand to SEQ ID NO: 899662
aauccaauaacccuggaag

SEQ ID NO: 899664 - RNA, 19 nt, Artificial Sequence
  Description of Artificial Sequence: Synthetic oligonucleotide
  Sense strand starting at position 3239 of SEQ ID NO: 588933
cucagaucauacuuagguu

SEQ ID NO: 899665 - RNA, 19 nt, Artificial Sequence
  Description of Artificial Sequence: Synthetic oligonucleotide
  Antisense strand to SEQ ID NO: 899664
aaccuaaguaugaucugag

SEQ ID NO: 899666 - RNA, 19 nt, Artificial Sequence
  Description of Artificial Sequence: Synthetic oligonucleotide
  Sense strand starting at position 3291 of SEQ ID NO: 588933
ugguuauauuugcuuauca

SEQ ID NO: 899667 - RNA, 19 nt, Artificial Sequence
  Description of Artificial Sequence: Synthetic oligonucleotide
  Antisense strand to SEQ ID NO: 899666
ugauaagcaaauauaacca

SEQ ID NO: 899668 - RNA, 19 nt, Artificial Sequence
  Description of Artificial Sequence: Synthetic oligonucleotide
  Sense strand starting at position 3292 of SEQ ID NO: 588933
gguuauauuugcuuaucau

SEQ ID NO: 899669 - RNA, 19 nt, Artificial Sequence
  Description of Artificial Sequence: Synthetic oligonucleotide
  Antisense strand to SEQ ID NO: 899668
augauaagcaaauauaacc

SEQ ID NO: 899670 - RNA, 19 nt, Artificial Sequence
  Description of Artificial Sequence: Synthetic oligonucleotide
  Sense strand starting at position 3296 of SEQ ID NO: 588933
auauuugcuuaucauugga

SEQ ID NO: 899671 - RNA, 19 nt, Artificial Sequence
  Description of Artificial Sequence: Synthetic oligonucleotide
  Antisense strand to SEQ ID NO: 899670
uccaaugauaagcaaauau

SEQ ID NO: 899672 - RNA, 19 nt, Artificial Sequence
  Description of Artificial Sequence: Synthetic oligonucleotide
  Sense strand starting at position 3299 of SEQ ID NO: 588933
uuugcuuaucauuggacuu

SEQ ID NO: 899673 - RNA, 19 nt, Artificial Sequence
  Description of Artificial Sequence: Synthetic oligonucleotide
  Antisense strand to SEQ ID NO: 899672
aaguccaaugauaagcaaa

SEQ ID NO: 899674 - RNA, 19 nt, Artificial Sequence
  Description of Artificial Sequence: Synthetic oligonucleotide
  Sense strand starting at position 3344 of SEQ ID NO: 588933
uagccauuguuccugagau

SEQ ID NO: 899675 - RNA, 19 nt, Artificial Sequence
  Description of Artificial Sequence: Synthetic oligonucleotide
  Antisense strand to SEQ ID NO: 899674
aucucaggaacaauggcua

SEQ ID NO: 899676 - RNA, 19 nt, Artificial Sequence
  Description of Artificial Sequence: Synthetic oligonucleotide
  Sense strand starting at position 3346 of SEQ ID NO: 588933
gccauuguuccugagaugg

SEQ ID NO: 899677 - RNA, 19 nt, Artificial Sequence
  Description of Artificial Sequence: Synthetic oligonucleotide
  Antisense strand to SEQ ID NO: 899676
ccaucucaggaacaauggc

SEQ ID NO: 899678 - RNA, 19 nt, Artificial Sequence
  Description of Artificial Sequence: Synthetic oligonucleotide
  Sense strand starting at position 3393 of SEQ ID NO: 588933
cagaguugucagcauuauu

SEQ ID NO: 899679 - RNA, 19 nt, Artificial Sequence
  Description of Artificial Sequence: Synthetic oligonucleotide
  Antisense strand to SEQ ID NO: 899678
aauaaugcugacaacucug

SEQ ID NO: 899680 - RNA, 19 nt, Artificial Sequence
  Description of Artificial Sequence: Synthetic oligonucleotide
  Sense strand starting at position 3396 of SEQ ID NO: 588933
aguugucagcauuauugga

SEQ ID NO: 899681 - RNA, 19 nt, Artificial Sequence
  Description of Artificial Sequence: Synthetic oligonucleotide
  Antisense strand to SEQ ID NO: 899680
uccaauaaugcugacaacu

SEQ ID NO: 899682 - RNA, 19 nt, Artificial Sequence
  Description of Artificial Sequence: Synthetic oligonucleotide
  Sense strand starting at position 3398 of SEQ ID NO: 588933
uugucagcauuauuggaga

SEQ ID NO: 899683 - RNA, 19 nt, Artificial Sequence
  Description of Artificial Sequence: Synthetic oligonucleotide
  Antisense strand to SEQ ID NO: 899682
ucuccaauaaugcugacaa

SEQ ID NO: 899684 - RNA, 19 nt, Artificial Sequence
  Description of Artificial Sequence: Synthetic oligonucleotide
  Sense strand starting at position 3915 of SEQ ID NO: 588933
cauuauguaucaucaggga

SEQ ID NO: 899685 - RNA, 19 nt, Artificial Sequence
  Description of Artificial Sequence: Synthetic oligonucleotide
  Antisense strand to SEQ ID NO: 899684
ucccugaugauacauaaug

SEQ ID NO: 899686 - RNA, 19 nt, Artificial Sequence
  Description of Artificial Sequence: Synthetic oligonucleotide
  Sense strand starting at position 3955 of SEQ ID NO: 588933
auaucaguauggcccaaau

SEQ ID NO: 899687 - RNA, 19 nt, Artificial Sequence
  Description of Artificial Sequence: Synthetic oligonucleotide
  Antisense strand to SEQ ID NO: 899686
auuugggccauacugauau

SEQ ID NO: 899688 - RNA, 19 nt, Artificial Sequence
  Description of Artificial Sequence: Synthetic oligonucleotide
  Sense strand starting at position 434 of SEQ ID NO: 588934
gcacucuaaugucugagaa

SEQ ID NO: 899689 - RNA, 19 nt, Artificial Sequence
  Description of Artificial Sequence: Synthetic oligonucleotide
  Antisense strand to SEQ ID NO: 899688
uucucagacauuagagugc

SEQ ID NO: 899690 - RNA, 19 nt, Artificial Sequence
  Description of Artificial Sequence: Synthetic oligonucleotide
  Sense strand starting at position 446 of SEQ ID NO: 588934
cugagaaccucugcuauaa

SEQ ID NO: 899691 - RNA, 19 nt, Artificial Sequence
  Description of Artificial Sequence: Synthetic oligonucleotide
  Antisense strand to SEQ ID NO: 899690
uuauagcagagguucucag

SEQ ID NO: 899692 - RNA, 19 nt, Artificial Sequence
  Description of Artificial Sequence: Synthetic oligonucleotide
  Sense strand starting at position 633 of SEQ ID NO: 588934
gggagacaucucugcaguu

SEQ ID NO: 899693 - RNA, 19 nt, Artificial Sequence
  Description of Artificial Sequence: Synthetic oligonucleotide
  Antisense strand to SEQ ID NO: 899692
aacugcagagaugucuccc

SEQ ID NO: 899694 - RNA, 19 nt, Artificial Sequence
  Description of Artificial Sequence: Synthetic oligonucleotide
  Sense strand starting at position 634 of SEQ ID NO: 588934
ggagacaucucugcaguuc

SEQ ID NO: 899695 - RNA, 19 nt, Artificial Sequence
  Description of Artificial Sequence: Synthetic oligonucleotide
  Antisense strand to SEQ ID NO: 899694
gaacugcagagaugucucc

SEQ ID NO: 899696 - RNA, 19 nt, Artificial Sequence
  Description of Artificial Sequence: Synthetic oligonucleotide
  Sense strand starting at position 635 of SEQ ID NO: 588934
gagacaucucugcaguucu

SEQ ID NO: 899697 - RNA, 19 nt, Artificial Sequence
  Description of Artificial Sequence: Synthetic oligonucleotide
  Antisense strand to SEQ ID NO: 899696
agaacugcagagaugucuc

SEQ ID NO: 899698 - RNA, 19 nt, Artificial Sequence
  Description of Artificial Sequence: Synthetic oligonucleotide
  Sense strand starting at position 663 of SEQ ID NO: 588934
ggaagaaguacaugccuca

SEQ ID NO: 899699 - RNA, 19 nt, Artificial Sequence
  Description of Artificial Sequence: Synthetic oligonucleotide
  Antisense strand to SEQ ID NO: 899698
ugaggcauguacuucuucc

SEQ ID NO: 899700 - RNA, 19 nt, Artificial Sequence
  Description of Artificial Sequence: Synthetic oligonucleotide
  Sense strand starting at position 670 of SEQ ID NO: 588934
guacaugccucaucauaca

SEQ ID NO: 899701 - RNA, 19 nt, Artificial Sequence
  Description of Artificial Sequence: Synthetic oligonucleotide
  Antisense strand to SEQ ID NO: 899700
uguaugaugaggcauguac

SEQ ID NO: 899702 - RNA, 19 nt, Artificial Sequence
  Description of Artificial Sequence: Synthetic oligonucleotide
  Sense strand starting at position 765 of SEQ ID NO: 588934
gugaauaauuaacagaaca

SEQ ID NO: 899703 - RNA, 19 nt, Artificial Sequence
  Description of Artificial Sequence: Synthetic oligonucleotide
  Antisense strand to SEQ ID NO: 899702
uguucuguuaauuauucac

SEQ ID NO: 899704 - RNA, 19 nt, Artificial Sequence
  Description of Artificial Sequence: Synthetic oligonucleotide
  Sense strand starting at position 1017 of SEQ ID NO: 588934
cguugaauaugccugauag

SEQ ID NO: 899705 - RNA, 19 nt, Artificial Sequence
  Description of Artificial Sequence: Synthetic oligonucleotide
  Antisense strand to SEQ ID NO: 899704
cuaucaggcauauucaacg

SEQ ID NO: 899706 - RNA, 19 nt, Artificial Sequence
  Description of Artificial Sequence: Synthetic oligonucleotide
  Sense strand starting at position 1018 of SEQ ID NO: 588934
guugaauaugccugauaga

SEQ ID NO: 899707 - RNA, 19 nt, Artificial Sequence
  Description of Artificial Sequence: Synthetic oligonucleotide
  Antisense strand to SEQ ID NO: 899706
ucuaucaggcauauucaac

SEQ ID NO: 899708 - RNA, 19 nt, Artificial Sequence
  Description of Artificial Sequence: Synthetic oligonucleotide
  Sense strand starting at position 1473 of SEQ ID NO: 588934
aauaauugugggugacuca

SEQ ID NO: 899709 - RNA, 19 nt, Artificial Sequence
  Description of Artificial Sequence: Synthetic oligonucleotide
  Antisense strand to SEQ ID NO: 899708
ugagucacccacaauuauu

SEQ ID NO: 899710 - RNA, 19 nt, Artificial Sequence
  Description of Artificial Sequence: Synthetic oligonucleotide
  Sense strand starting at position 1515 of SEQ ID NO: 588934
uuaugauggucuccugaga

SEQ ID NO: 899711 - RNA, 19 nt, Artificial Sequence
  Description of Artificial Sequence: Synthetic oligonucleotide
  Antisense strand to SEQ ID NO: 899710
ucucaggagaccaucauaa

SEQ ID NO: 899712 - RNA, 19 nt, Artificial Sequence
  Description of Artificial Sequence: Synthetic oligonucleotide
  Sense strand starting at position 1585 of SEQ ID NO: 588934
agcaaaguggcauagguua

SEQ ID NO: 899713 - RNA, 19 nt, Artificial Sequence
  Description of Artificial Sequence: Synthetic oligonucleotide
  Antisense strand to SEQ ID NO: 899712
uaaccuaugccacuuugcu

SEQ ID NO: 899714 - RNA, 19 nt, Artificial Sequence
  Description of Artificial Sequence: Synthetic oligonucleotide
  Sense strand starting at position 1620 of SEQ ID NO: 588934
augcuuuagcugcaucaua

SEQ ID NO: 899715 - RNA, 19 nt, Artificial Sequence
  Description of Artificial Sequence: Synthetic oligonucleotide
  Antisense strand to SEQ ID NO: 899714
uaugaugcagcuaaagcau

SEQ ID NO: 899716 - RNA, 19 nt, Artificial Sequence
  Description of Artificial Sequence: Synthetic oligonucleotide
  Sense strand starting at position 1690 of SEQ ID NO: 588934
acaugugcucaguggaaga

SEQ ID NO: 899717 - RNA, 19 nt, Artificial Sequence
  Description of Artificial Sequence: Synthetic oligonucleotide
  Antisense strand to SEQ ID NO: 899716
ucuuccacugagcacaugu

SEQ ID NO: 899718 - RNA, 19 nt, Artificial Sequence
  Description of Artificial Sequence: Synthetic oligonucleotide
  Sense strand starting at position 1692 of SEQ ID NO: 588934
augugcucaguggaagaau

SEQ ID NO: 899719 - RNA, 19 nt, Artificial Sequence
  Description of Artificial Sequence: Synthetic oligonucleotide
  Antisense strand to SEQ ID NO: 899718
auucuuccacugagcacau

SEQ ID NO: 899720 - RNA, 19 nt, Artificial Sequence
  Description of Artificial Sequence: Synthetic oligonucleotide
  Sense strand starting at position 1707 of SEQ ID NO: 588934
gaauguuagcggcagagga

SEQ ID NO: 899721 - RNA, 19 nt, Artificial Sequence
  Description of Artificial Sequence: Synthetic oligonucleotide
  Antisense strand to SEQ ID NO: 899720
uccucugccgcuaacauuc

SEQ ID NO: 899722 - RNA, 19 nt, Artificial Sequence
  Description of Artificial Sequence: Synthetic oligonucleotide
  Sense strand starting at position 1733 of SEQ ID NO: 588934
cgcagaugcaggcaugaaa

SEQ ID NO: 899723 - RNA, 19 nt, Artificial Sequence
  Description of Artificial Sequence: Synthetic oligonucleotide
  Antisense strand to SEQ ID NO: 899722
uuucaugccugcaucugcg

SEQ ID NO: 899724 - RNA, 19 nt, Artificial Sequence
  Description of Artificial Sequence: Synthetic oligonucleotide
  Sense strand starting at position 1796 of SEQ ID NO: 588934
agguuaggguuucuaaaua

SEQ ID NO: 899725 - RNA, 19 nt, Artificial Sequence
  Description of Artificial Sequence: Synthetic oligonucleotide
  Antisense strand to SEQ ID NO: 899724
uauuuagaaacccuaaccu

SEQ ID NO: 899726 - RNA, 19 nt, Artificial Sequence
  Description of Artificial Sequence: Synthetic oligonucleotide
  Sense strand starting at position 1804 of SEQ ID NO: 588934
guuucuaaauaugcuugau

SEQ ID NO: 899727 - RNA, 19 nt, Artificial Sequence
  Description of Artificial Sequence: Synthetic oligonucleotide
  Antisense strand to SEQ ID NO: 899726
aucaagcauauuuagaaac

SEQ ID NO: 899728 - RNA, 19 nt, Artificial Sequence
  Description of Artificial Sequence: Synthetic oligonucleotide
  Sense strand starting at position 2010 of SEQ ID NO: 588934
cuggacgaugucuguaauu

SEQ ID NO: 899729 - RNA, 19 nt, Artificial Sequence
  Description of Artificial Sequence: Synthetic oligonucleotide
  Antisense strand to SEQ ID NO: 899728
aauuacagacaucguccag

SEQ ID NO: 899730 - RNA, 19 nt, Artificial Sequence
  Description of Artificial Sequence: Synthetic oligonucleotide
  Sense strand starting at position 2012 of SEQ ID NO: 588934
ggacgaugucuguaauuag

SEQ ID NO: 899731 - RNA, 19 nt, Artificial Sequence
  Description of Artificial Sequence: Synthetic oligonucleotide
  Antisense strand to SEQ ID NO: 899730
cuaauuacagacaucgucc

SEQ ID NO: 899732 - RNA, 19 nt, Artificial Sequence
  Description of Artificial Sequence: Synthetic oligonucleotide
  Sense strand starting at position 2015 of SEQ ID NO: 588934
cgaugucuguaauuaggga

SEQ ID NO: 899733 - RNA, 19 nt, Artificial Sequence
  Description of Artificial Sequence: Synthetic oligonucleotide
  Antisense strand to SEQ ID NO: 899732
ucccuaauuacagacaucg

SEQ ID NO: 899734 - RNA, 19 nt, Artificial Sequence
  Description of Artificial Sequence: Synthetic oligonucleotide
  Sense strand starting at position 2135 of SEQ ID NO: 588934
gaaguaaugcucugagaca

SEQ ID NO: 899735 - RNA, 19 nt, Artificial Sequence
  Description of Artificial Sequence: Synthetic oligonucleotide
  Antisense strand to SEQ ID NO: 899734
ugucucagagcauuacuuc

SEQ ID NO: 899736 - RNA, 19 nt, Artificial Sequence
  Description of Artificial Sequence: Synthetic oligonucleotide
  Sense strand starting at position 2208 of SEQ ID NO: 588934
gccauuuagugcuuagcca

SEQ ID NO: 899737 - RNA, 19 nt, Artificial Sequence
  Description of Artificial Sequence: Synthetic oligonucleotide
  Antisense strand to SEQ ID NO: 899736
uggcuaagcacuaaauggc

SEQ ID NO: 899738 - RNA, 19 nt, Artificial Sequence
  Description of Artificial Sequence: Synthetic oligonucleotide
  Sense strand starting at position 2272 of SEQ ID NO: 588934
ggucuugaauugcuggaau

SEQ ID NO: 899739 - RNA, 19 nt, Artificial Sequence
  Description of Artificial Sequence: Synthetic oligonucleotide
  Antisense strand to SEQ ID NO: 899738
auuccagcaauucaagacc

SEQ ID NO: 899740 - RNA, 19 nt, Artificial Sequence
  Description of Artificial Sequence: Synthetic oligonucleotide
  Sense strand starting at position 2456 of SEQ ID NO: 588934
ucaagcagagauggucuua

SEQ ID NO: 899741 - RNA, 19 nt, Artificial Sequence
  Description of Artificial Sequence: Synthetic oligonucleotide
  Antisense strand to SEQ ID NO: 899740
uaagaccaucucugcuuga

SEQ ID NO: 899742 - RNA, 19 nt, Artificial Sequence
  Description of Artificial Sequence: Synthetic oligonucleotide
  Sense strand starting at position 2755 of SEQ ID NO: 588934
cgugaaacaucccuggaaa

SEQ ID NO: 899743 - RNA, 19 nt, Artificial Sequence
  Description of Artificial Sequence: Synthetic oligonucleotide
  Antisense strand to SEQ ID NO: 899742
uuuccagggauguuucacg

SEQ ID NO: 899744 - RNA, 19 nt, Artificial Sequence
  Description of Artificial Sequence: Synthetic oligonucleotide
  Sense strand starting at position 2756 of SEQ ID NO: 588934
gugaaacaucccuggaaac

SEQ ID NO: 899745 - RNA, 19 nt, Artificial Sequence
  Description of Artificial Sequence: Synthetic oligonucleotide
  Antisense strand to SEQ ID NO: 899744
guuuccagggauguuucac

SEQ ID NO: 899746 - RNA, 19 nt, Artificial Sequence
  Description of Artificial Sequence: Synthetic oligonucleotide
  Sense strand starting at position 2817 of SEQ ID NO: 588934
aggagucauguugaugagu

SEQ ID NO: 899747 - RNA, 19 nt, Artificial Sequence
  Description of Artificial Sequence: Synthetic oligonucleotide
  Antisense strand to SEQ ID NO: 899746
acucaucaacaugacuccu

SEQ ID NO: 899748 - RNA, 19 nt, Artificial Sequence
  Description of Artificial Sequence: Synthetic oligonucleotide
  Sense strand starting at position 2820 of SEQ ID NO: 588934
agucauguugaugaguuua

SEQ ID NO: 899749 - RNA, 19 nt, Artificial Sequence
  Description of Artificial Sequence: Synthetic oligonucleotide
  Antisense strand to SEQ ID NO: 899748
uaaacucaucaacaugacu

SEQ ID NO: 899750 - RNA, 19 nt, Artificial Sequence
  Description of Artificial Sequence: Synthetic oligonucleotide
  Sense strand starting at position 2822 of SEQ ID NO: 588934
ucauguugaugaguuuacu

SEQ ID NO: 899751 - RNA, 19 nt, Artificial Sequence
  Description of Artificial Sequence: Synthetic oligonucleotide
  Antisense strand to SEQ ID NO: 899750
aguaaacucaucaacauga

SEQ ID NO: 899752 - RNA, 19 nt, Artificial Sequence
  Description of Artificial Sequence: Synthetic oligonucleotide
  Sense strand starting at position 3011 of SEQ ID NO: 588934
ccagaauggccaugaugau

SEQ ID NO: 899753 - RNA, 19 nt, Artificial Sequence
  Description of Artificial Sequence: Synthetic oligonucleotide
  Antisense strand to SEQ ID NO: 899752
aucaucauggccauucugg

SEQ ID NO: 899754 - RNA, 19 nt, Artificial Sequence
  Description of Artificial Sequence: Synthetic oligonucleotide
  Sense strand starting at position 3053 of SEQ ID NO: 588934
acagcuauuccaugaguac

SEQ ID NO: 899755 - RNA, 19 nt, Artificial Sequence
  Description of Artificial Sequence: Synthetic oligonucleotide
  Antisense strand to SEQ ID NO: 899754
guacucauggaauagcugu

SEQ ID NO: 899756 - RNA, 19 nt, Artificial Sequence
  Description of Artificial Sequence: Synthetic oligonucleotide
  Sense strand starting at position 3057 of SEQ ID NO: 588934
cuauuccaugaguacuuga

SEQ ID NO: 899757 - RNA, 19 nt, Artificial Sequence
  Description of Artificial Sequence: Synthetic oligonucleotide
  Antisense strand to SEQ ID NO: 899756
ucaaguacucauggaauag

SEQ ID NO: 899758 - RNA, 19 nt, Artificial Sequence
  Description of Artificial Sequence: Synthetic oligonucleotide
  Sense strand starting at position 3064 of SEQ ID NO: 588934
augaguacuugacucaaag

SEQ ID NO: 899759 - RNA, 19 nt, Artificial Sequence
  Description of Artificial Sequence: Synthetic oligonucleotide
  Antisense strand to SEQ ID NO: 899758
cuuugagucaaguacucau

SEQ ID NO: 899760 - RNA, 19 nt, Artificial Sequence
  Description of Artificial Sequence: Synthetic oligonucleotide
  Sense strand starting at position 3098 of SEQ ID NO: 588934
gcacaacaucccuaauggu

SEQ ID NO: 899761 - RNA, 19 nt, Artificial Sequence
  Description of Artificial Sequence: Synthetic oligonucleotide
  Antisense strand to SEQ ID NO: 899760
accauuagggauguugugc

SEQ ID NO: 899762 - RNA, 19 nt, Artificial Sequence
  Description of Artificial Sequence: Synthetic oligonucleotide
  Sense strand starting at position 3170 of SEQ ID NO: 588934
ucaacuggcuugcugaaga

SEQ ID NO: 899763 - RNA, 19 nt, Artificial Sequence
  Description of Artificial Sequence: Synthetic oligonucleotide
  Antisense strand to SEQ ID NO: 899762
ucuucagcaagccaguuga

SEQ ID NO: 899764 - RNA, 19 nt, Artificial Sequence
  Description of Artificial Sequence: Synthetic oligonucleotide
  Sense strand starting at position 3777 of SEQ ID NO: 588934
acccuuugagcucaggaua

SEQ ID NO: 899765 - RNA, 19 nt, Artificial Sequence
  Description of Artificial Sequence: Synthetic oligonucleotide
  Antisense strand to SEQ ID NO: 899764
uauccugagcucaaagggu

SEQ ID NO: 899766 - RNA, 19 nt, Artificial Sequence
  Description of Artificial Sequence: Synthetic oligonucleotide
  Sense strand starting at position 3952 of SEQ ID NO: 588934
acuugaaauugaguagugu

SEQ ID NO: 899767 - RNA, 19 nt, Artificial Sequence
  Description of Artificial Sequence: Synthetic oligonucleotide
  Antisense strand to SEQ ID NO: 899766
acacuacucaauuucaagu

SEQ ID NO: 899768 - RNA, 19 nt, Artificial Sequence
  Description of Artificial Sequence: Synthetic oligonucleotide
  Sense strand starting at position 53 of SEQ ID NO: 588935
acaggauucucuccagacu

SEQ ID NO: 899769 - RNA, 19 nt, Artificial Sequence
  Description of Artificial Sequence: Synthetic oligonucleotide
  Antisense strand to SEQ ID NO: 899768
agucuggagagaauccugu

SEQ ID NO: 899770 - RNA, 19 nt, Artificial Sequence
  Description of Artificial Sequence: Synthetic oligonucleotide
  Sense strand starting at position 96 of SEQ ID NO: 588935
agggucaacauguauguuu

SEQ ID NO: 899771 - RNA, 19 nt, Artificial Sequence
  Description of Artificial Sequence: Synthetic oligonucleotide
  Antisense strand to SEQ ID NO: 899770
aaacauacauguugacccu

SEQ ID NO: 899772 - RNA, 19 nt, Artificial Sequence
  Description of Artificial Sequence: Synthetic oligonucleotide
  Sense strand starting at position 98 of SEQ ID NO: 588935
ggucaacauguauguuuac

SEQ ID NO: 899773 - RNA, 19 nt, Artificial Sequence
  Description of Artificial Sequence: Synthetic oligonucleotide
  Antisense strand to SEQ ID NO: 899772
guaaacauacauguugacc

SEQ ID NO: 899774 - RNA, 19 nt, Artificial Sequence
  Description of Artificial Sequence: Synthetic oligonucleotide
  Sense strand starting at position 120 of SEQ ID NO: 588935
ucuaaauucugagcaaugu

SEQ ID NO: 899775 - RNA, 19 nt, Artificial Sequence
  Description of Artificial Sequence: Synthetic oligonucleotide
  Antisense strand to SEQ ID NO: 899774
acauugcucagaauuuaga

SEQ ID NO: 899776 - RNA, 19 nt, Artificial Sequence
  Description of Artificial Sequence: Synthetic oligonucleotide
  Sense strand starting at position 243 of SEQ ID NO: 588935
ggcaaacaaugugcuaaau

SEQ ID NO: 899777 - RNA, 19 nt, Artificial Sequence
  Description of Artificial Sequence: Synthetic oligonucleotide
  Antisense strand to SEQ ID NO: 899776
auuuagcacauuguuugcc

SEQ ID NO: 899778 - RNA, 19 nt, Artificial Sequence
  Description of Artificial Sequence: Synthetic oligonucleotide
  Sense strand starting at position 253 of SEQ ID NO: 588935
gugcuaaauaagugaaguu

SEQ ID NO: 899779 - RNA, 19 nt, Artificial Sequence
  Description of Artificial Sequence: Synthetic oligonucleotide
  Antisense strand to SEQ ID NO: 899778
aacuucacuuauuuagcac

SEQ ID NO: 899780 - RNA, 19 nt, Artificial Sequence
  Description of Artificial Sequence: Synthetic oligonucleotide
  Sense strand starting at position 1034 of SEQ ID NO: 588935
gggauuaaaugguuccuuu

SEQ ID NO: 899781 - RNA, 19 nt, Artificial Sequence
  Description of Artificial Sequence: Synthetic oligonucleotide
  Antisense strand to SEQ ID NO: 899780
aaaggaaccauuuaauccc

SEQ ID NO: 899782 - RNA, 19 nt, Artificial Sequence
  Description of Artificial Sequence: Synthetic oligonucleotide
  Sense strand starting at position 1127 of SEQ ID NO: 588935
ugcuuugaacucuacuuga

SEQ ID NO: 899783 - RNA, 19 nt, Artificial Sequence
  Description of Artificial Sequence: Synthetic oligonucleotide
  Antisense strand to SEQ ID NO: 899782
ucaaguagaguucaaagca

SEQ ID NO: 899784 - RNA, 19 nt, Artificial Sequence
  Description of Artificial Sequence: Synthetic oligonucleotide
  Sense strand starting at position 1130 of SEQ ID NO: 588935
uuugaacucuacuugaguu

SEQ ID NO: 899785 - RNA, 19 nt, Artificial Sequence
  Description of Artificial Sequence: Synthetic oligonucleotide
  Antisense strand to SEQ ID NO: 899784
aacucaaguagaguucaaa

SEQ ID NO: 899786 - RNA, 19 nt, Artificial Sequence
  Description of Artificial Sequence: Synthetic oligonucleotide
  Sense strand starting at position 1137 of SEQ ID NO: 588935
ucuacuugaguucgacuga

SEQ ID NO: 899787 - RNA, 19 nt, Artificial Sequence
  Description of Artificial Sequence: Synthetic oligonucleotide
  Antisense strand to SEQ ID NO: 899786
ucagucgaacucaaguaga

SEQ ID NO: 899788 - RNA, 19 nt, Artificial Sequence
  Description of Artificial Sequence: Synthetic oligonucleotide
  Sense strand starting at position 1142 of SEQ ID NO: 588935
uugaguucgacugaaucuu

SEQ ID NO: 899789 - RNA, 19 nt, Artificial Sequence
  Description of Artificial Sequence: Synthetic oligonucleotide
  Antisense strand to SEQ ID NO: 899788
aagauucagucgaacucaa

SEQ ID NO: 899790 - RNA, 19 nt, Artificial Sequence
  Description of Artificial Sequence: Synthetic oligonucleotide
  Sense strand starting at position 1148 of SEQ ID NO: 588935
ucgacugaaucuuugcuaa

SEQ ID NO: 899791 - RNA, 19 nt, Artificial Sequence
  Description of Artificial Sequence: Synthetic oligonucleotide
  Antisense strand to SEQ ID NO: 899790
uuagcaaagauucagucga

SEQ ID NO: 899792 - RNA, 19 nt, Artificial Sequence
  Description of Artificial Sequence: Synthetic oligonucleotide
  Sense strand starting at position 1150 of SEQ ID NO: 588935
gacugaaucuuugcuaagu

SEQ ID NO: 899793 - RNA, 19 nt, Artificial Sequence
  Description of Artificial Sequence: Synthetic oligonucleotide
  Antisense strand to SEQ ID NO: 899792
acuuagcaaagauucaguc

SEQ ID NO: 899794 - RNA, 19 nt, Artificial Sequence
  Description of Artificial Sequence: Synthetic oligonucleotide
  Sense strand starting at position 1498 of SEQ ID NO: 588935
aaggguuguuguuugaaug

SEQ ID NO: 899795 - RNA, 19 nt, Artificial Sequence
  Description of Artificial Sequence: Synthetic oligonucleotide
  Antisense strand to SEQ ID NO: 899794
cauucaaacaacaacccuu

SEQ ID NO: 899796 - RNA, 19 nt, Artificial Sequence
  Description of Artificial Sequence: Synthetic oligonucleotide
  Sense strand starting at position 1546 of SEQ ID NO: 588935
uuugucuaagcucauaaga

SEQ ID NO: 899797 - RNA, 19 nt, Artificial Sequence
  Description of Artificial Sequence: Synthetic oligonucleotide
  Antisense strand to SEQ ID NO: 899796
ucuuaugagcuuagacaaa

SEQ ID NO: 899798 - RNA, 19 nt, Artificial Sequence
  Description of Artificial Sequence: Synthetic oligonucleotide
  Sense strand starting at position 1557 of SEQ ID NO: 588935
ucauaagacgucuggacau

SEQ ID NO: 899799 - RNA, 19 nt, Artificial Sequence
  Description of Artificial Sequence: Synthetic oligonucleotide
  Antisense strand to SEQ ID NO: 899798
auguccagacgucuuauga

SEQ ID NO: 899800 - RNA, 19 nt, Artificial Sequence
  Description of Artificial Sequence: Synthetic oligonucleotide
  Sense strand starting at position 1617 of SEQ ID NO: 588935
aguggauucguguaaaugg

SEQ ID NO: 899801 - RNA, 19 nt, Artificial Sequence
  Description of Artificial Sequence: Synthetic oligonucleotide
  Antisense strand to SEQ ID NO: 899800
ccauuuacacgaauccacu

SEQ ID NO: 899802 - RNA, 19 nt, Artificial Sequence
  Description of Artificial Sequence: Synthetic oligonucleotide
  Sense strand starting at position 1878 of SEQ ID NO: 588935
gcggaacccaccuguauuu

SEQ ID NO: 899803 - RNA, 19 nt, Artificial Sequence
  Description of Artificial Sequence: Synthetic oligonucleotide
  Antisense strand to SEQ ID NO: 899802
aaauacagguggguuccgc

SEQ ID NO: 899804 - RNA, 19 nt, Artificial Sequence
  Description of Artificial Sequence: Synthetic oligonucleotide
  Sense strand starting at position 2520 of SEQ ID NO: 588935
auggcauauucccuggagu

SEQ ID NO: 899805 - RNA, 19 nt, Artificial Sequence
  Description of Artificial Sequence: Synthetic oligonucleotide
  Antisense strand to SEQ ID NO: 899804
acuccagggaauaugccau

SEQ ID NO: 899806 - RNA, 19 nt, Artificial Sequence
  Description of Artificial Sequence: Synthetic oligonucleotide
  Sense strand starting at position 2521 of SEQ ID NO: 588935
uggcauauucccuggagug

SEQ ID NO: 899807 - RNA, 19 nt, Artificial Sequence
  Description of Artificial Sequence: Synthetic oligonucleotide
  Antisense strand to SEQ ID NO: 899806
cacuccagggaauaugcca

SEQ ID NO: 899808 - RNA, 19 nt, Artificial Sequence
  Description of Artificial Sequence: Synthetic oligonucleotide
  Sense strand starting at position 2523 of SEQ ID NO: 588935
gcauauucccuggagugua

SEQ ID NO: 899809 - RNA, 19 nt, Artificial Sequence
  Description of Artificial Sequence: Synthetic oligonucleotide
  Antisense strand to SEQ ID NO: 899808
uacacuccagggaauaugc

SEQ ID NO: 899810 - RNA, 19 nt, Artificial Sequence
  Description of Artificial Sequence: Synthetic oligonucleotide
  Sense strand starting at position 2535 of SEQ ID NO: 588935
gaguguaucuuggucacca

SEQ ID NO: 899811 - RNA, 19 nt, Artificial Sequence
  Description of Artificial Sequence: Synthetic oligonucleotide
  Antisense strand to SEQ ID NO: 899810
uggugaccaagauacacuc

SEQ ID NO: 899812 - RNA, 19 nt, Artificial Sequence
  Description of Artificial Sequence: Synthetic oligonucleotide
  Sense strand starting at position 2536 of SEQ ID NO: 588935
aguguaucuuggucaccaa

SEQ ID NO: 899813 - RNA, 19 nt, Artificial Sequence
  Description of Artificial Sequence: Synthetic oligonucleotide
  Antisense strand to SEQ ID NO: 899812
uuggugaccaagauacacu

SEQ ID NO: 899814 - RNA, 19 nt, Artificial Sequence
  Description of Artificial Sequence: Synthetic oligonucleotide
  Sense strand starting at position 2537 of SEQ ID NO: 588935
guguaucuuggucaccaaa

SEQ ID NO: 899815 - RNA, 19 nt, Artificial Sequence
  Description of Artificial Sequence: Synthetic oligonucleotide
  Antisense strand to SEQ ID NO: 899814
uuuggugaccaagauacac

SEQ ID NO: 899816 - RNA, 19 nt, Artificial Sequence
  Description of Artificial Sequence: Synthetic oligonucleotide
  Sense strand starting at position 2950 of SEQ ID NO: 588935
auauaaugugcuggauugu

SEQ ID NO: 899817 - RNA, 19 nt, Artificial Sequence
  Description of Artificial Sequence: Synthetic oligonucleotide
  Antisense strand to SEQ ID NO: 899816
acaauccagcacauuauau

SEQ ID NO: 899818 - RNA, 19 nt, Artificial Sequence
  Description of Artificial Sequence: Synthetic oligonucleotide
  Sense strand starting at position 2951 of SEQ ID NO: 588935
uauaaugugcuggauugua

SEQ ID NO: 899819 - RNA, 19 nt, Artificial Sequence
  Description of Artificial Sequence: Synthetic oligonucleotide
  Antisense strand to SEQ ID NO: 899818
uacaauccagcacauuaua

SEQ ID NO: 899820 - RNA, 19 nt, Artificial Sequence
  Description of Artificial Sequence: Synthetic oligonucleotide
  Sense strand starting at position 2965 of SEQ ID NO: 588935
uuguaauugccauggagaa

SEQ ID NO: 899821 - RNA, 19 nt, Artificial Sequence
  Description of Artificial Sequence: Synthetic oligonucleotide
  Antisense strand to SEQ ID NO: 899820
uucuccauggcaauuacaa

SEQ ID NO: 899822 - RNA, 19 nt, Artificial Sequence
  Description of Artificial Sequence: Synthetic oligonucleotide
  Sense strand starting at position 2966 of SEQ ID NO: 588935
uguaauugccauggagaaa

SEQ ID NO: 899823 - RNA, 19 nt, Artificial Sequence
  Description of Artificial Sequence: Synthetic oligonucleotide
  Antisense strand to SEQ ID NO: 899822
uuucuccauggcaauuaca

SEQ ID NO: 899824 - RNA, 19 nt, Artificial Sequence
  Description of Artificial Sequence: Synthetic oligonucleotide
  Sense strand starting at position 2994 of SEQ ID NO: 588935
ugggacuauuuacacuuau

SEQ ID NO: 899825 - RNA, 19 nt, Artificial Sequence
  Description of Artificial Sequence: Synthetic oligonucleotide
  Antisense strand to SEQ ID NO: 899824
auaaguguaaauaguccca

SEQ ID NO: 899826 - RNA, 19 nt, Artificial Sequence
  Description of Artificial Sequence: Synthetic oligonucleotide
  Sense strand starting at position 3034 of SEQ ID NO: 588935
cuuccaggguuauuggauu

SEQ ID NO: 899827 - RNA, 19 nt, Artificial Sequence
  Description of Artificial Sequence: Synthetic oligonucleotide
  Antisense strand to SEQ ID NO: 899826
aauccaauaacccuggaag

SEQ ID NO: 899828 - RNA, 19 nt, Artificial Sequence
  Description of Artificial Sequence: Synthetic oligonucleotide
  Sense strand starting at position 3486 of SEQ ID NO: 588935
cucagaucauacuuagguu

SEQ ID NO: 899829 - RNA, 19 nt, Artificial Sequence
  Description of Artificial Sequence: Synthetic oligonucleotide
  Antisense strand to SEQ ID NO: 899828
aaccuaaguaugaucugag

SEQ ID NO: 899830 - RNA, 19 nt, Artificial Sequence
  Description of Artificial Sequence: Synthetic oligonucleotide
  Sense strand starting at position 3538 of SEQ ID NO: 588935
ugguuauauuugcuuauca

SEQ ID NO: 899831 - RNA, 19 nt, Artificial Sequence
  Description of Artificial Sequence: Synthetic oligonucleotide
  Antisense strand to SEQ ID NO: 899830
ugauaagcaaauauaacca

SEQ ID NO: 899832 - RNA, 19 nt, Artificial Sequence
  Description of Artificial Sequence: Synthetic oligonucleotide
  Sense strand starting at position 3539 of SEQ ID NO: 588935
gguuauauuugcuuaucau

SEQ ID NO: 899833 - RNA, 19 nt, Artificial Sequence
  Description of Artificial Sequence: Synthetic oligonucleotide
  Antisense strand to SEQ ID NO: 899832
augauaagcaaauauaacc

SEQ ID NO: 899834 - RNA, 19 nt, Artificial Sequence
  Description of Artificial Sequence: Synthetic oligonucleotide
  Sense strand starting at position 3543 of SEQ ID NO: 588935
auauuugcuuaucauugga

SEQ ID NO: 899835 - RNA, 19 nt, Artificial Sequence
  Description of Artificial Sequence: Synthetic oligonucleotide
  Antisense strand to SEQ ID NO: 899834
uccaaugauaagcaaauau

SEQ ID NO: 899836 - RNA, 19 nt, Artificial Sequence
  Description of Artificial Sequence: Synthetic oligonucleotide
  Sense strand starting at position 3546 of SEQ ID NO: 588935
uuugcuuaucauuggacuu

SEQ ID NO: 899837 - RNA, 19 nt, Artificial Sequence
  Description of Artificial Sequence: Synthetic oligonucleotide
  Antisense strand to SEQ ID NO: 899836
aaguccaaugauaagcaaa

SEQ ID NO: 899838 - RNA, 19 nt, Artificial Sequence
  Description of Artificial Sequence: Synthetic oligonucleotide
  Sense strand starting at position 3591 of SEQ ID NO: 588935
uagccauuguuccugagau

SEQ ID NO: 899839 - RNA, 19 nt, Artificial Sequence
  Description of Artificial Sequence: Synthetic oligonucleotide
  Antisense strand to SEQ ID NO: 899838
aucucaggaacaauggcua

SEQ ID NO: 899840 - RNA, 19 nt, Artificial Sequence
  Description of Artificial Sequence: Synthetic oligonucleotide
  Sense strand starting at position 3593 of SEQ ID NO: 588935
gccauuguuccugagaugg

SEQ ID NO: 899841 - RNA, 19 nt, Artificial Sequence
  Description of Artificial Sequence: Synthetic oligonucleotide
  Antisense strand to SEQ ID NO: 899840
ccaucucaggaacaauggc

SEQ ID NO: 899842 - RNA, 19 nt, Artificial Sequence
  Description of Artificial Sequence: Synthetic oligonucleotide
  Sense strand starting at position 3640 of SEQ ID NO: 588935
cagaguugucagcauuauu

SEQ ID NO: 899843 - RNA, 19 nt, Artificial Sequence
  Description of Artificial Sequence: Synthetic oligonucleotide
  Antisense strand to SEQ ID NO: 899842
aauaaugcugacaacucug

SEQ ID NO: 899844 - RNA, 19 nt, Artificial Sequence
  Description of Artificial Sequence: Synthetic oligonucleotide
  Sense strand starting at position 3643 of SEQ ID NO: 588935
aguugucagcauuauugga

SEQ ID NO: 899845 - RNA, 19 nt, Artificial Sequence
  Description of Artificial Sequence: Synthetic oligonucleotide
  Antisense strand to SEQ ID NO: 899844
uccaauaaugcugacaacu

SEQ ID NO: 899846 - RNA, 19 nt, Artificial Sequence
  Description of Artificial Sequence: Synthetic oligonucleotide
  Sense strand starting at position 3645 of SEQ ID NO: 588935
uugucagcauuauuggaga

SEQ ID NO: 899847 - RNA, 19 nt, Artificial Sequence
  Description of Artificial Sequence: Synthetic oligonucleotide
  Antisense strand to SEQ ID NO: 899846
ucuccaauaaugcugacaa

SEQ ID NO: 899848 - RNA, 19 nt, Artificial Sequence
  Description of Artificial Sequence: Synthetic oligonucleotide
  Sense strand starting at position 170 of SEQ ID NO: 588936
ucacuucuggcugagacau

SEQ ID NO: 899849 - RNA, 19 nt, Artificial Sequence
  Description of Artificial Sequence: Synthetic oligonucleotide
  Antisense strand to SEQ ID NO: 899848
augucucagccagaaguga

SEQ ID NO: 899850 - RNA, 19 nt, Artificial Sequence
  Description of Artificial Sequence: Synthetic oligonucleotide
  Sense strand starting at position 198 of SEQ ID NO: 588936
ugguuccucccugaugaca

SEQ ID NO: 899851 - RNA, 19 nt, Artificial Sequence
  Description of Artificial Sequence: Synthetic oligonucleotide
  Antisense strand to SEQ ID NO: 899850
ugucaucagggaggaacca

SEQ ID NO: 899852 - RNA, 19 nt, Artificial Sequence
  Description of Artificial Sequence: Synthetic oligonucleotide
  Sense strand starting at position 250 of SEQ ID NO: 588936
agagaugauuccuucuuac

SEQ ID NO: 899853 - RNA, 19 nt, Artificial Sequence
  Description of Artificial Sequence: Synthetic oligonucleotide
  Antisense strand to SEQ ID NO: 899852
guaagaaggaaucaucucu

SEQ ID NO: 899854 - RNA, 19 nt, Artificial Sequence
  Description of Artificial Sequence: Synthetic oligonucleotide
  Sense strand starting at position 328 of SEQ ID NO: 588936
agguucucaucauugggau

SEQ ID NO: 899855 - RNA, 19 nt, Artificial Sequence
  Description of Artificial Sequence: Synthetic oligonucleotide
  Antisense strand to SEQ ID NO: 899854
aucccaaugaugagaaccu

SEQ ID NO: 899856 - RNA, 19 nt, Artificial Sequence
  Description of Artificial Sequence: Synthetic oligonucleotide
  Sense strand starting at position 329 of SEQ ID NO: 588936
gguucucaucauugggauc

SEQ ID NO: 899857 - RNA, 19 nt, Artificial Sequence
  Description of Artificial Sequence: Synthetic oligonucleotide
  Antisense strand to SEQ ID NO: 899856
gaucccaaugaugagaacc

SEQ ID NO: 899858 - RNA, 19 nt, Artificial Sequence
  Description of Artificial Sequence: Synthetic oligonucleotide
  Sense strand starting at position 502 of SEQ ID NO: 588936
ugaacauuguaagccauua

SEQ ID NO: 899859 - RNA, 19 nt, Artificial Sequence
  Description of Artificial Sequence: Synthetic oligonucleotide
  Antisense strand to SEQ ID NO: 899858
uaauggcuuacaauguuca

SEQ ID NO: 899860 - RNA, 19 nt, Artificial Sequence
  Description of Artificial Sequence: Synthetic oligonucleotide
  Sense strand starting at position 653 of SEQ ID NO: 588936
uuucgucagccagaagauc

SEQ ID NO: 899861 - RNA, 19 nt, Artificial Sequence
  Description of Artificial Sequence: Synthetic oligonucleotide
  Antisense strand to SEQ ID NO: 899860
gaucuucuggcugacgaaa

SEQ ID NO: 899862 - RNA, 19 nt, Artificial Sequence
  Description of Artificial Sequence: Synthetic oligonucleotide
  Sense strand starting at position 662 of SEQ ID NO: 588936
ccagaagaucagugccauu

SEQ ID NO: 899863 - RNA, 19 nt, Artificial Sequence
  Description of Artificial Sequence: Synthetic oligonucleotide
  Antisense strand to SEQ ID NO: 899862
aauggcacugaucuucugg

SEQ ID NO: 899864 - RNA, 19 nt, Artificial Sequence
  Description of Artificial Sequence: Synthetic oligonucleotide
  Sense strand starting at position 874 of SEQ ID NO: 588936
ucuccaguugauugggaaa

SEQ ID NO: 899865 - RNA, 19 nt, Artificial Sequence
  Description of Artificial Sequence: Synthetic oligonucleotide
  Antisense strand to SEQ ID NO: 899864
uuucccaaucaacuggaga

SEQ ID NO: 899866 - RNA, 19 nt, Artificial Sequence
  Description of Artificial Sequence: Synthetic oligonucleotide
  Sense strand starting at position 905 of SEQ ID NO: 588936
caggaaccaucaucgugau

SEQ ID NO: 899867 - RNA, 19 nt, Artificial Sequence
  Description of Artificial Sequence: Synthetic oligonucleotide
  Antisense strand to SEQ ID NO: 899866
aucacgaugaugguuccug

SEQ ID NO: 899868 - RNA, 19 nt, Artificial Sequence
  Description of Artificial Sequence: Synthetic oligonucleotide
  Sense strand starting at position 906 of SEQ ID NO: 588936
aggaaccaucaucgugauu

SEQ ID NO: 899869 - RNA, 19 nt, Artificial Sequence
  Description of Artificial Sequence: Synthetic oligonucleotide
  Antisense strand to SEQ ID NO: 899868
aaucacgaugaugguuccu

SEQ ID NO: 899870 - RNA, 19 nt, Artificial Sequence
  Description of Artificial Sequence: Synthetic oligonucleotide
  Sense strand starting at position 969 of SEQ ID NO: 588936
gucauaguuccacaaagac

SEQ ID NO: 899871 - RNA, 19 nt, Artificial Sequence
  Description of Artificial Sequence: Synthetic oligonucleotide
  Antisense strand to SEQ ID NO: 899870
gucuuuguggaacuaugac

SEQ ID NO: 899872 - RNA, 19 nt, Artificial Sequence
  Description of Artificial Sequence: Synthetic oligonucleotide
  Sense strand starting at position 993 of SEQ ID NO: 588936
gcugacuucugauucuacu

SEQ ID NO: 899873 - RNA, 19 nt, Artificial Sequence
  Description of Artificial Sequence: Synthetic oligonucleotide
  Antisense strand to SEQ ID NO: 899872
aguagaaucagaagucagc

SEQ ID NO: 899874 - RNA, 19 nt, Artificial Sequence
  Description of Artificial Sequence: Synthetic oligonucleotide
  Sense strand starting at position 1495 of SEQ ID NO: 588936
ucauaauccgagugguaaa

SEQ ID NO: 899875 - RNA, 19 nt, Artificial Sequence
  Description of Artificial Sequence: Synthetic oligonucleotide
  Antisense strand to SEQ ID NO: 899874
uuuaccacucggauuauga

SEQ ID NO: 899876 - RNA, 19 nt, Artificial Sequence
  Description of Artificial Sequence: Synthetic oligonucleotide
  Sense strand starting at position 1568 of SEQ ID NO: 588936
ccucauugaugucugaaua

SEQ ID NO: 899877 - RNA, 19 nt, Artificial Sequence
  Description of Artificial Sequence: Synthetic oligonucleotide
  Antisense strand to SEQ ID NO: 899876
uauucagacaucaaugagg

SEQ ID NO: 899878 - RNA, 19 nt, Artificial Sequence
  Description of Artificial Sequence: Synthetic oligonucleotide
  Sense strand starting at position 1569 of SEQ ID NO: 588936
cucauugaugucugaauag

SEQ ID NO: 899879 - RNA, 19 nt, Artificial Sequence
  Description of Artificial Sequence: Synthetic oligonucleotide
  Antisense strand to SEQ ID NO: 899878
cuauucagacaucaaugag

SEQ ID NO: 899880 - RNA, 19 nt, Artificial Sequence
  Description of Artificial Sequence: Synthetic oligonucleotide
  Sense strand starting at position 1578 of SEQ ID NO: 588936
gucugaauagucuacagca

SEQ ID NO: 899881 - RNA, 19 nt, Artificial Sequence
  Description of Artificial Sequence: Synthetic oligonucleotide
  Antisense strand to SEQ ID NO: 899880
ugcuguagacuauucagac

SEQ ID NO: 899882 - RNA, 19 nt, Artificial Sequence
  Description of Artificial Sequence: Synthetic oligonucleotide
  Sense strand starting at position 1788 of SEQ ID NO: 588936
aaggauacccgcuaaagua

SEQ ID NO: 899883 - RNA, 19 nt, Artificial Sequence
  Description of Artificial Sequence: Synthetic oligonucleotide
  Antisense strand to SEQ ID NO: 899882
uacuuuagcggguauccuu

SEQ ID NO: 899884 - RNA, 19 nt, Artificial Sequence
  Description of Artificial Sequence: Synthetic oligonucleotide
  Sense strand starting at position 1905 of SEQ ID NO: 588936
ucgcauaaaccggaaauaa

SEQ ID NO: 899885 - RNA, 19 nt, Artificial Sequence
  Description of Artificial Sequence: Synthetic oligonucleotide
  Antisense strand to SEQ ID NO: 899884
uuauuuccgguuuaugcga

SEQ ID NO: 899886 - RNA, 19 nt, Artificial Sequence
  Description of Artificial Sequence: Synthetic oligonucleotide
  Sense strand starting at position 1936 of SEQ ID NO: 588936
ccggaagugaucuacuuag

SEQ ID NO: 899887 - RNA, 19 nt, Artificial Sequence
  Description of Artificial Sequence: Synthetic oligonucleotide
  Antisense strand to SEQ ID NO: 899886
cuaaguagaucacuuccgg

SEQ ID NO: 899888 - RNA, 19 nt, Artificial Sequence
  Description of Artificial Sequence: Synthetic oligonucleotide
  Sense strand starting at position 2654 of SEQ ID NO: 588936
acaugaacugcauauguau

SEQ ID NO: 899889 - RNA, 19 nt, Artificial Sequence
  Description of Artificial Sequence: Synthetic oligonucleotide
  Antisense strand to SEQ ID NO: 899888
auacauaugcaguucaugu

SEQ ID NO: 899890 - RNA, 19 nt, Artificial Sequence
  Description of Artificial Sequence: Synthetic oligonucleotide
  Sense strand starting at position 2901 of SEQ ID NO: 588936
auguacucuuagccagaau

SEQ ID NO: 899891 - RNA, 19 nt, Artificial Sequence
  Description of Artificial Sequence: Synthetic oligonucleotide
  Antisense strand to SEQ ID NO: 899890
auucuggcuaagaguacau

SEQ ID NO: 899892 - RNA, 19 nt, Artificial Sequence
  Description of Artificial Sequence: Synthetic oligonucleotide
  Sense strand starting at position 3002 of SEQ ID NO: 588936
caguaugguuaugcuacaa

SEQ ID NO: 899893 - RNA, 19 nt, Artificial Sequence
  Description of Artificial Sequence: Synthetic oligonucleotide
  Antisense strand to SEQ ID NO: 899892
uuguagcauaaccauacug

SEQ ID NO: 899894 - RNA, 19 nt, Artificial Sequence
  Description of Artificial Sequence: Synthetic oligonucleotide
  Sense strand starting at position 3084 of SEQ ID NO: 588936
guauaugauuccuugagca

SEQ ID NO: 899895 - RNA, 19 nt, Artificial Sequence
  Description of Artificial Sequence: Synthetic oligonucleotide
  Antisense strand to SEQ ID NO: 899894
ugcucaaggaaucauauac

SEQ ID NO: 899896 - RNA, 19 nt, Artificial Sequence
  Description of Artificial Sequence: Synthetic oligonucleotide
  Sense strand starting at position 3086 of SEQ ID NO: 588936
auaugauuccuugagcaua

SEQ ID NO: 899897 - RNA, 19 nt, Artificial Sequence
  Description of Artificial Sequence: Synthetic oligonucleotide
  Antisense strand to SEQ ID NO: 899896
uaugcucaaggaaucauau

SEQ ID NO: 899898 - RNA, 19 nt, Artificial Sequence
  Description of Artificial Sequence: Synthetic oligonucleotide
  Sense strand starting at position 3088 of SEQ ID NO: 588936
augauuccuugagcauaug

SEQ ID NO: 899899 - RNA, 19 nt, Artificial Sequence
  Description of Artificial Sequence: Synthetic oligonucleotide
  Antisense strand to SEQ ID NO: 899898
cauaugcucaaggaaucau

SEQ ID NO: 899900 - RNA, 19 nt, Artificial Sequence
  Description of Artificial Sequence: Synthetic oligonucleotide
  Sense strand starting at position 3111 of SEQ ID NO: 588936
acacauucuccaggguaua

SEQ ID NO: 899901 - RNA, 19 nt, Artificial Sequence
  Description of Artificial Sequence: Synthetic oligonucleotide
  Antisense strand to SEQ ID NO: 899900
uauacccuggagaaugugu

SEQ ID NO: 899902 - RNA, 19 nt, Artificial Sequence
  Description of Artificial Sequence: Synthetic oligonucleotide
  Sense strand starting at position 3191 of SEQ ID NO: 588936
cuaaauuguucuccaaagu

SEQ ID NO: 899903 - RNA, 19 nt, Artificial Sequence
  Description of Artificial Sequence: Synthetic oligonucleotide
  Antisense strand to SEQ ID NO: 899902
acuuuggagaacaauuuag

SEQ ID NO: 899904 - RNA, 19 nt, Artificial Sequence
  Description of Artificial Sequence: Synthetic oligonucleotide
  Sense strand starting at position 3228 of SEQ ID NO: 588936
accuaacagcaguguauaa

SEQ ID NO: 899905 - RNA, 19 nt, Artificial Sequence
  Description of Artificial Sequence: Synthetic oligonucleotide
  Antisense strand to SEQ ID NO: 899904
uuauacacugcuguuaggu

SEQ ID NO: 899906 - RNA, 19 nt, Artificial Sequence
  Description of Artificial Sequence: Synthetic oligonucleotide
  Sense strand starting at position 3279 of SEQ ID NO: 588936
uuagcauugucauuuguua

SEQ ID NO: 899907 - RNA, 19 nt, Artificial Sequence
  Description of Artificial Sequence: Synthetic oligonucleotide
  Antisense strand to SEQ ID NO: 899906
uaacaaaugacaaugcuaa

SEQ ID NO: 899908 - RNA, 19 nt, Artificial Sequence
  Description of Artificial Sequence: Synthetic oligonucleotide
  Sense strand starting at position 3454 of SEQ ID NO: 588936
guaucuuuagguuaucugu

SEQ ID NO: 899909 - RNA, 19 nt, Artificial Sequence
  Description of Artificial Sequence: Synthetic oligonucleotide
  Antisense strand to SEQ ID NO: 899908
acagauaaccuaaagauac

SEQ ID NO: 899910 - RNA, 19 nt, Artificial Sequence
  Description of Artificial Sequence: Synthetic oligonucleotide
  Sense strand starting at position 3747 of SEQ ID NO: 588936
cugggacuagucuagucaa

SEQ ID NO: 899911 - RNA, 19 nt, Artificial Sequence
  Description of Artificial Sequence: Synthetic oligonucleotide
  Antisense strand to SEQ ID NO: 899910
uugacuagacuagucccag

SEQ ID NO: 899912 - RNA, 19 nt, Artificial Sequence
  Description of Artificial Sequence: Synthetic oligonucleotide
  Sense strand starting at position 3750 of SEQ ID NO: 588936
ggacuagucuagucaacug

SEQ ID NO: 899913 - RNA, 19 nt, Artificial Sequence
  Description of Artificial Sequence: Synthetic oligonucleotide
  Antisense strand to SEQ ID NO: 899912
caguugacuagacuagucc

SEQ ID NO: 899914 - RNA, 19 nt, Artificial Sequence
  Description of Artificial Sequence: Synthetic oligonucleotide
  Sense strand starting at position 3758 of SEQ ID NO: 588936
cuagucaacugucuuaaug

SEQ ID NO: 899915 - RNA, 19 nt, Artificial Sequence
  Description of Artificial Sequence: Synthetic oligonucleotide
  Antisense strand to SEQ ID NO: 899914
cauuaagacaguugacuag

SEQ ID NO: 899916 - RNA, 19 nt, Artificial Sequence
  Description of Artificial Sequence: Synthetic oligonucleotide
  Sense strand starting at position 3783 of SEQ ID NO: 588936
acaauuugauugcagauua

SEQ ID NO: 899917 - RNA, 19 nt, Artificial Sequence
  Description of Artificial Sequence: Synthetic oligonucleotide
  Antisense strand to SEQ ID NO: 899916
uaaucugcaaucaaauugu

SEQ ID NO: 899918 - RNA, 19 nt, Artificial Sequence
  Description of Artificial Sequence: Synthetic oligonucleotide
  Sense strand starting at position 3880 of SEQ ID NO: 588936
cuaucaauuguguaugcau

SEQ ID NO: 899919 - RNA, 19 nt, Artificial Sequence
  Description of Artificial Sequence: Synthetic oligonucleotide
  Antisense strand to SEQ ID NO: 899918
augcauacacaauugauag

SEQ ID NO: 899920 - RNA, 19 nt, Artificial Sequence
  Description of Artificial Sequence: Synthetic oligonucleotide
  Sense strand starting at position 3972 of SEQ ID NO: 588936
cuuggagauuacucuguag

SEQ ID NO: 899921 - RNA, 19 nt, Artificial Sequence
  Description of Artificial Sequence: Synthetic oligonucleotide
  Antisense strand to SEQ ID NO: 899920
cuacagaguaaucuccaag

SEQ ID NO: 899922 - RNA, 19 nt, Artificial Sequence
  Description of Artificial Sequence: Synthetic oligonucleotide
  Sense strand starting at position 3974 of SEQ ID NO: 588936
uggagauuacucuguagua

SEQ ID NO: 899923 - RNA, 19 nt, Artificial Sequence
  Description of Artificial Sequence: Synthetic oligonucleotide
  Antisense strand to SEQ ID NO: 899922
uacuacagaguaaucucca

SEQ ID NO: 899924 - RNA, 19 nt, Artificial Sequence
  Description of Artificial Sequence: Synthetic oligonucleotide
  Sense strand starting at position 3975 of SEQ ID NO: 588936
ggagauuacucuguaguag

SEQ ID NO: 899925 - RNA, 19 nt, Artificial Sequence
  Description of Artificial Sequence: Synthetic oligonucleotide
  Antisense strand to SEQ ID NO: 899924
cuacuacagaguaaucucc

SEQ ID NO: 899926 - RNA, 19 nt, Artificial Sequence
  Description of Artificial Sequence: Synthetic oligonucleotide
  Sense strand starting at position 3976 of SEQ ID NO: 588936
gagauuacucuguaguagu

SEQ ID NO: 899927 - RNA, 19 nt, Artificial Sequence
  Description of Artificial Sequence: Synthetic oligonucleotide
  Antisense strand to SEQ ID NO: 899926
acuacuacagaguaaucuc

SEQ ID NO: 899928 - RNA, 19 nt, Artificial Sequence
  Description of Artificial Sequence: Synthetic oligonucleotide
  Sense strand starting at position 1 of SEQ ID NO: 588937
uggauucugccagauccgu

SEQ ID NO: 899929 - RNA, 19 nt, Artificial Sequence
  Description of Artificial Sequence: Synthetic oligonucleotide
  Antisense strand to SEQ ID NO: 899928
acggaucuggcagaaucca

SEQ ID NO: 899930 - RNA, 19 nt, Artificial Sequence
  Description of Artificial Sequence: Synthetic oligonucleotide
  Sense strand starting at position 56 of SEQ ID NO: 588937
gccuaagacuaagcuugau

SEQ ID NO: 899931 - RNA, 19 nt, Artificial Sequence
  Description of Artificial Sequence: Synthetic oligonucleotide
  Antisense strand to SEQ ID NO: 899930
aucaagcuuagucuuaggc

SEQ ID NO: 899932 - RNA, 19 nt, Artificial Sequence
  Description of Artificial Sequence: Synthetic oligonucleotide
  Sense strand starting at position 235 of SEQ ID NO: 588937
guucauuagcgucugguau

SEQ ID NO: 899933 - RNA, 19 nt, Artificial Sequence
  Description of Artificial Sequence: Synthetic oligonucleotide
  Antisense strand to SEQ ID NO: 899932
auaccagacgcuaaugaac

SEQ ID NO: 899934 - RNA, 19 nt, Artificial Sequence
  Description of Artificial Sequence: Synthetic oligonucleotide
  Sense strand starting at position 299 of SEQ ID NO: 588937
ucuguuaaaugagucauua

SEQ ID NO: 899935 - RNA, 19 nt, Artificial Sequence
  Description of Artificial Sequence: Synthetic oligonucleotide
  Antisense strand to SEQ ID NO: 899934
uaaugacucauuuaacaga

SEQ ID NO: 899936 - RNA, 19 nt, Artificial Sequence
  Description of Artificial Sequence: Synthetic oligonucleotide
  Sense strand starting at position 375 of SEQ ID NO: 588937
aggaguucaggcugaguga

SEQ ID NO: 899937 - RNA, 19 nt, Artificial Sequence
  Description of Artificial Sequence: Synthetic oligonucleotide
  Antisense strand to SEQ ID NO: 899936
ucacucagccugaacuccu

SEQ ID NO: 899938 - RNA, 19 nt, Artificial Sequence
  Description of Artificial Sequence: Synthetic oligonucleotide
  Sense strand starting at position 376 of SEQ ID NO: 588937
ggaguucaggcugagugaa

SEQ ID NO: 899939 - RNA, 19 nt, Artificial Sequence
  Description of Artificial Sequence: Synthetic oligonucleotide
  Antisense strand to SEQ ID NO: 899938
uucacucagccugaacucc

SEQ ID NO: 899940 - RNA, 19 nt, Artificial Sequence
  Description of Artificial Sequence: Synthetic oligonucleotide
  Sense strand starting at position 412 of SEQ ID NO: 588937
augugaagugaaggcuuua

SEQ ID NO: 899941 - RNA, 19 nt, Artificial Sequence
  Description of Artificial Sequence: Synthetic oligonucleotide
  Antisense strand to SEQ ID NO: 899940
uaaagccuucacuucacau

SEQ ID NO: 899942 - RNA, 19 nt, Artificial Sequence
  Description of Artificial Sequence: Synthetic oligonucleotide
  Sense strand starting at position 417 of SEQ ID NO: 588937
aagugaaggcuuuagcuaa

SEQ ID NO: 899943 - RNA, 19 nt, Artificial Sequence
  Description of Artificial Sequence: Synthetic oligonucleotide
  Antisense strand to SEQ ID NO: 899942
uuagcuaaagccuucacuu

SEQ ID NO: 899944 - RNA, 19 nt, Artificial Sequence
  Description of Artificial Sequence: Synthetic oligonucleotide
  Sense strand starting at position 424 of SEQ ID NO: 588937
ggcuuuagcuaacuuauuu

SEQ ID NO: 899945 - RNA, 19 nt, Artificial Sequence
  Description of Artificial Sequence: Synthetic oligonucleotide
  Antisense strand to SEQ ID NO: 899944
aaauaaguuagcuaaagcc

SEQ ID NO: 899946 - RNA, 19 nt, Artificial Sequence
  Description of Artificial Sequence: Synthetic oligonucleotide
  Sense strand starting at position 575 of SEQ ID NO: 588937
cucacacuucuacagaguu

SEQ ID NO: 899947 - RNA, 19 nt, Artificial Sequence
  Description of Artificial Sequence: Synthetic oligonucleotide
  Antisense strand to SEQ ID NO: 899946
aacucuguagaagugugag

SEQ ID NO: 899948 - RNA, 19 nt, Artificial Sequence
  Description of Artificial Sequence: Synthetic oligonucleotide
  Sense strand starting at position 809 of SEQ ID NO: 588937
aucuguucugagggaagca

SEQ ID NO: 899949 - RNA, 19 nt, Artificial Sequence
  Description of Artificial Sequence: Synthetic oligonucleotide
  Antisense strand to SEQ ID NO: 899948
ugcuucccucagaacagau

SEQ ID NO: 899950 - RNA, 19 nt, Artificial Sequence
  Description of Artificial Sequence: Synthetic oligonucleotide
  Sense strand starting at position 810 of SEQ ID NO: 588937
ucuguucugagggaagcau

SEQ ID NO: 899951 - RNA, 19 nt, Artificial Sequence
  Description of Artificial Sequence: Synthetic oligonucleotide
  Antisense strand to SEQ ID NO: 899950
augcuucccucagaacaga

SEQ ID NO: 899952 - RNA, 19 nt, Artificial Sequence
  Description of Artificial Sequence: Synthetic oligonucleotide
  Sense strand starting at position 1238 of SEQ ID NO: 588937
auauguucugaaggaagca

SEQ ID NO: 899953 - RNA, 19 nt, Artificial Sequence
  Description of Artificial Sequence: Synthetic oligonucleotide
  Antisense strand to SEQ ID NO: 899952
ugcuuccuucagaacauau

SEQ ID NO: 899954 - RNA, 19 nt, Artificial Sequence
  Description of Artificial Sequence: Synthetic oligonucleotide
  Sense strand starting at position 2070 of SEQ ID NO: 588937
cgacucagagcuuacgaga

SEQ ID NO: 899955 - RNA, 19 nt, Artificial Sequence
  Description of Artificial Sequence: Synthetic oligonucleotide
  Antisense strand to SEQ ID NO: 899954
ucucguaagcucugagucg

SEQ ID NO: 899956 - RNA, 19 nt, Artificial Sequence
  Description of Artificial Sequence: Synthetic oligonucleotide
  Sense strand starting at position 2271 of SEQ ID NO: 588937
aagccuccaguugaaagau

SEQ ID NO: 899957 - RNA, 19 nt, Artificial Sequence
  Description of Artificial Sequence: Synthetic oligonucleotide
  Antisense strand to SEQ ID NO: 899956
aucuuucaacuggaggcuu

SEQ ID NO: 899958 - RNA, 19 nt, Artificial Sequence
  Description of Artificial Sequence: Synthetic oligonucleotide
  Sense strand starting at position 2283 of SEQ ID NO: 588937
gaaagauugcuuuguccca

SEQ ID NO: 899959 - RNA, 19 nt, Artificial Sequence
  Description of Artificial Sequence: Synthetic oligonucleotide
  Antisense strand to SEQ ID NO: 899958
ugggacaaagcaaucuuuc

SEQ ID NO: 899960 - RNA, 19 nt, Artificial Sequence
  Description of Artificial Sequence: Synthetic oligonucleotide
  Sense strand starting at position 2354 of SEQ ID NO: 588937
guacaauauugauugaguu

SEQ ID NO: 899961 - RNA, 19 nt, Artificial Sequence
  Description of Artificial Sequence: Synthetic oligonucleotide
  Antisense strand to SEQ ID NO: 899960
aacucaaucaauauuguac

SEQ ID NO: 899962 - RNA, 19 nt, Artificial Sequence
  Description of Artificial Sequence: Synthetic oligonucleotide
  Sense strand starting at position 2376 of SEQ ID NO: 588937
guauaaaugcaacauaugu

SEQ ID NO: 899963 - RNA, 19 nt, Artificial Sequence
  Description of Artificial Sequence: Synthetic oligonucleotide
  Antisense strand to SEQ ID NO: 899962
acauauguugcauuuauac

SEQ ID NO: 899964 - RNA, 19 nt, Artificial Sequence
  Description of Artificial Sequence: Synthetic oligonucleotide
  Sense strand starting at position 2387 of SEQ ID NO: 588937
acauauguuuggccaauag

SEQ ID NO: 899965 - RNA, 19 nt, Artificial Sequence
  Description of Artificial Sequence: Synthetic oligonucleotide
  Antisense strand to SEQ ID NO: 899964
cuauuggccaaacauaugu

SEQ ID NO: 899966 - RNA, 19 nt, Artificial Sequence
  Description of Artificial Sequence: Synthetic oligonucleotide
  Sense strand starting at position 2756 of SEQ ID NO: 588937
guauuaucagaaugaagua

SEQ ID NO: 899967 - RNA, 19 nt, Artificial Sequence
  Description of Artificial Sequence: Synthetic oligonucleotide
  Antisense strand to SEQ ID NO: 899966
uacuucauucugauaauac

SEQ ID NO: 899968 - RNA, 19 nt, Artificial Sequence
  Description of Artificial Sequence: Synthetic oligonucleotide
  Sense strand starting at position 2949 of SEQ ID NO: 588937
ucuugaaacccugguguau

SEQ ID NO: 899969 - RNA, 19 nt, Artificial Sequence
  Description of Artificial Sequence: Synthetic oligonucleotide
  Antisense strand to SEQ ID NO: 899968
auacaccaggguuucaaga

SEQ ID NO: 899970 - RNA, 19 nt, Artificial Sequence
  Description of Artificial Sequence: Synthetic oligonucleotide
  Sense strand starting at position 2955 of SEQ ID NO: 588937
aacccugguguaugaagaa

SEQ ID NO: 899971 - RNA, 19 nt, Artificial Sequence
  Description of Artificial Sequence: Synthetic oligonucleotide
  Antisense strand to SEQ ID NO: 899970
uucuucauacaccaggguu

SEQ ID NO: 899972 - RNA, 19 nt, Artificial Sequence
  Description of Artificial Sequence: Synthetic oligonucleotide
  Sense strand starting at position 3030 of SEQ ID NO: 588937
ggugauuuggcguggauuc

SEQ ID NO: 899973 - RNA, 19 nt, Artificial Sequence
  Description of Artificial Sequence: Synthetic oligonucleotide
  Antisense strand to SEQ ID NO: 899972
gaauccacgccaaaucacc

SEQ ID NO: 899974 - RNA, 19 nt, Artificial Sequence
  Description of Artificial Sequence: Synthetic oligonucleotide
  Sense strand starting at position 3031 of SEQ ID NO: 588937
gugauuuggcguggauucu

SEQ ID NO: 899975 - RNA, 19 nt, Artificial Sequence
  Description of Artificial Sequence: Synthetic oligonucleotide
  Antisense strand to SEQ ID NO: 899974
agaauccacgccaaaucac

SEQ ID NO: 899976 - RNA, 19 nt, Artificial Sequence
  Description of Artificial Sequence: Synthetic oligonucleotide
  Sense strand starting at position 3092 of SEQ ID NO: 588937
uuuccaagucuaggagagu

SEQ ID NO: 899977 - RNA, 19 nt, Artificial Sequence
  Description of Artificial Sequence: Synthetic oligonucleotide
  Antisense strand to SEQ ID NO: 899976
acucuccuagacuuggaaa

SEQ ID NO: 899978 - RNA, 19 nt, Artificial Sequence
  Description of Artificial Sequence: Synthetic oligonucleotide
  Sense strand starting at position 3098 of SEQ ID NO: 588937
agucuaggagagugguuua

SEQ ID NO: 899979 - RNA, 19 nt, Artificial Sequence
  Description of Artificial Sequence: Synthetic oligonucleotide
  Antisense strand to SEQ ID NO: 899978
uaaaccacucuccuagacu

SEQ ID NO: 899980 - RNA, 19 nt, Artificial Sequence
  Description of Artificial Sequence: Synthetic oligonucleotide
  Sense strand starting at position 3101 of SEQ ID NO: 588937
cuaggagagugguuuauca

SEQ ID NO: 899981 - RNA, 19 nt, Artificial Sequence
  Description of Artificial Sequence: Synthetic oligonucleotide
  Antisense strand to SEQ ID NO: 899980
ugauaaaccacucuccuag

SEQ ID NO: 899982 - RNA, 19 nt, Artificial Sequence
  Description of Artificial Sequence: Synthetic oligonucleotide
  Sense strand starting at position 3103 of SEQ ID NO: 588937
aggagagugguuuaucauc

SEQ ID NO: 899983 - RNA, 19 nt, Artificial Sequence
  Description of Artificial Sequence: Synthetic oligonucleotide
  Antisense strand to SEQ ID NO: 899982
gaugauaaaccacucuccu

SEQ ID NO: 899984 - RNA, 19 nt, Artificial Sequence
  Description of Artificial Sequence: Synthetic oligonucleotide
  Sense strand starting at position 3105 of SEQ ID NO: 588937
gagagugguuuaucaucac

SEQ ID NO: 899985 - RNA, 19 nt, Artificial Sequence
  Description of Artificial Sequence: Synthetic oligonucleotide
  Antisense strand to SEQ ID NO: 899984
gugaugauaaaccacucuc

SEQ ID NO: 899986 - RNA, 19 nt, Artificial Sequence
  Description of Artificial Sequence: Synthetic oligonucleotide
  Sense strand starting at position 3108 of SEQ ID NO: 588937
agugguuuaucaucacaua

SEQ ID NO: 899987 - RNA, 19 nt, Artificial Sequence
  Description of Artificial Sequence: Synthetic oligonucleotide
  Antisense strand to SEQ ID NO: 899986
uaugugaugauaaaccacu

SEQ ID NO: 899988 - RNA, 19 nt, Artificial Sequence
  Description of Artificial Sequence: Synthetic oligonucleotide
  Sense strand starting at position 3109 of SEQ ID NO: 588937
gugguuuaucaucacauac

SEQ ID NO: 899989 - RNA, 19 nt, Artificial Sequence
  Description of Artificial Sequence: Synthetic oligonucleotide
  Antisense strand to SEQ ID NO: 899988
guaugugaugauaaaccac

SEQ ID NO: 899990 - RNA, 19 nt, Artificial Sequence
  Description of Artificial Sequence: Synthetic oligonucleotide
  Sense strand starting at position 3132 of SEQ ID NO: 588937
gagcauuaugcaggcauuu

SEQ ID NO: 899991 - RNA, 19 nt, Artificial Sequence
  Description of Artificial Sequence: Synthetic oligonucleotide
  Antisense strand to SEQ ID NO: 899990
aaaugccugcauaaugcuc

SEQ ID NO: 899992 - RNA, 19 nt, Artificial Sequence
  Description of Artificial Sequence: Synthetic oligonucleotide
  Sense strand starting at position 3191 of SEQ ID NO: 588937
ggauuaacaugugcuaaua

SEQ ID NO: 899993 - RNA, 19 nt, Artificial Sequence
  Description of Artificial Sequence: Synthetic oligonucleotide
  Antisense strand to SEQ ID NO: 899992
uauuagcacauguuaaucc

SEQ ID NO: 899994 - RNA, 19 nt, Artificial Sequence
  Description of Artificial Sequence: Synthetic oligonucleotide
  Sense strand starting at position 3448 of SEQ ID NO: 588937
gugagaucuucccuuucca

SEQ ID NO: 899995 - RNA, 19 nt, Artificial Sequence
  Description of Artificial Sequence: Synthetic oligonucleotide
  Antisense strand to SEQ ID NO: 899994
uggaaagggaagaucucac

SEQ ID NO: 899996 - RNA, 19 nt, Artificial Sequence
  Description of Artificial Sequence: Synthetic oligonucleotide
  Sense strand starting at position 3589 of SEQ ID NO: 588937
cugugugacgagcaaucua

SEQ ID NO: 899997 - RNA, 19 nt, Artificial Sequence
  Description of Artificial Sequence: Synthetic oligonucleotide
  Antisense strand to SEQ ID NO: 899996
uagauugcucgucacacag

SEQ ID NO: 899998 - RNA, 19 nt, Artificial Sequence
  Description of Artificial Sequence: Synthetic oligonucleotide
  Sense strand starting at position 3597 of SEQ ID NO: 588937
cgagcaaucuacuuaaccu

SEQ ID NO: 899999 - RNA, 19 nt, Artificial Sequence
  Description of Artificial Sequence: Synthetic oligonucleotide
  Antisense strand to SEQ ID NO: 899998
agguuaaguagauugcucg

SEQ ID NO: 900000 - RNA, 19 nt, Artificial Sequence
  Description of Artificial Sequence: Synthetic oligonucleotide
  Sense strand starting at position 3652 of SEQ ID NO: 588937
acaggaguacugcaucauu

SEQ ID NO: 900001 - RNA, 19 nt, Artificial Sequence
  Description of Artificial Sequence: Synthetic oligonucleotide
  Antisense strand to SEQ ID NO: 900000
aaugaugcaguacuccugu

SEQ ID NO: 900002 - RNA, 19 nt, Artificial Sequence
  Description of Artificial Sequence: Synthetic oligonucleotide
  Sense strand starting at position 3655 of SEQ ID NO: 588937
ggaguacugcaucauugug

SEQ ID NO: 900003 - RNA, 19 nt, Artificial Sequence
  Description of Artificial Sequence: Synthetic oligonucleotide
  Antisense strand to SEQ ID NO: 900002
cacaaugaugcaguacucc

SEQ ID NO: 900004 - RNA, 19 nt, Artificial Sequence
  Description of Artificial Sequence: Synthetic oligonucleotide
  Sense strand starting at position 3713 of SEQ ID NO: 588937
gugucuagugcauauuaaa

SEQ ID NO: 900005 - RNA, 19 nt, Artificial Sequence
  Description of Artificial Sequence: Synthetic oligonucleotide
  Antisense strand to SEQ ID NO: 900004
uuuaauaugcacuagacac

SEQ ID NO: 900006 - RNA, 19 nt, Artificial Sequence
  Description of Artificial Sequence: Synthetic oligonucleotide
  Sense strand starting at position 3747 of SEQ ID NO: 588937
uaaugauuggcgggacuca

SEQ ID NO: 900007 - RNA, 19 nt, Artificial Sequence
  Description of Artificial Sequence: Synthetic oligonucleotide
  Antisense strand to SEQ ID NO: 900006
ugagucccgccaaucauua

SEQ ID NO: 900008 - RNA, 19 nt, Artificial Sequence
  Description of Artificial Sequence: Synthetic oligonucleotide
  Sense strand starting at position 170 of SEQ ID NO: 588938
gaaguucuugcuggcaaag

SEQ ID NO: 900009 - RNA, 19 nt, Artificial Sequence
  Description of Artificial Sequence: Synthetic oligonucleotide
  Antisense strand to SEQ ID NO: 900008
cuuugccagcaagaacuuc

SEQ ID NO: 900010 - RNA, 19 nt, Artificial Sequence
  Description of Artificial Sequence: Synthetic oligonucleotide
  Sense strand starting at position 219 of SEQ ID NO: 588938
ugcagaacacguugggaua

SEQ ID NO: 900011 - RNA, 19 nt, Artificial Sequence
  Description of Artificial Sequence: Synthetic oligonucleotide
  Antisense strand to SEQ ID NO: 900010
uaucccaacguguucugca

SEQ ID NO: 900012 - RNA, 19 nt, Artificial Sequence
  Description of Artificial Sequence: Synthetic oligonucleotide
  Sense strand starting at position 220 of SEQ ID NO: 588938
gcagaacacguugggauau

SEQ ID NO: 900013 - RNA, 19 nt, Artificial Sequence
  Description of Artificial Sequence: Synthetic oligonucleotide
  Antisense strand to SEQ ID NO: 900012
auaucccaacguguucugc

SEQ ID NO: 900014 - RNA, 19 nt, Artificial Sequence
  Description of Artificial Sequence: Synthetic oligonucleotide
  Sense strand starting at position 222 of SEQ ID NO: 588938
agaacacguugggauauuu

SEQ ID NO: 900015 - RNA, 19 nt, Artificial Sequence
  Description of Artificial Sequence: Synthetic oligonucleotide
  Antisense strand to SEQ ID NO: 900014
aaauaucccaacguguucu

SEQ ID NO: 900016 - RNA, 19 nt, Artificial Sequence
  Description of Artificial Sequence: Synthetic oligonucleotide
  Sense strand starting at position 258 of SEQ ID NO: 588938
gagaguuaucuuugugcuc

SEQ ID NO: 900017 - RNA, 19 nt, Artificial Sequence
  Description of Artificial Sequence: Synthetic oligonucleotide
  Antisense strand to SEQ ID NO: 900016
gagcacaaagauaacucuc

SEQ ID NO: 900018 - RNA, 19 nt, Artificial Sequence
  Description of Artificial Sequence: Synthetic oligonucleotide
  Sense strand starting at position 259 of SEQ ID NO: 588938
agaguuaucuuugugcuca

SEQ ID NO: 900019 - RNA, 19 nt, Artificial Sequence
  Description of Artificial Sequence: Synthetic oligonucleotide
  Antisense strand to SEQ ID NO: 900018
ugagcacaaagauaacucu

SEQ ID NO: 900020 - RNA, 19 nt, Artificial Sequence
  Description of Artificial Sequence: Synthetic oligonucleotide
  Sense strand starting at position 261 of SEQ ID NO: 588938
aguuaucuuugugcucauu

SEQ ID NO: 900021 - RNA, 19 nt, Artificial Sequence
  Description of Artificial Sequence: Synthetic oligonucleotide
  Antisense strand to SEQ ID NO: 900020
aaugagcacaaagauaacu

SEQ ID NO: 900022 - RNA, 19 nt, Artificial Sequence
  Description of Artificial Sequence: Synthetic oligonucleotide
  Sense strand starting at position 300 of SEQ ID NO: 588938
aggaucagcuccuuaaagu

SEQ ID NO: 900023 - RNA, 19 nt, Artificial Sequence
  Description of Artificial Sequence: Synthetic oligonucleotide
  Antisense strand to SEQ ID NO: 900022
acuuuaaggagcugauccu

SEQ ID NO: 900024 - RNA, 19 nt, Artificial Sequence
  Description of Artificial Sequence: Synthetic oligonucleotide
  Sense strand starting at position 301 of SEQ ID NO: 588938
ggaucagcuccuuaaaguc

SEQ ID NO: 900025 - RNA, 19 nt, Artificial Sequence
  Description of Artificial Sequence: Synthetic oligonucleotide
  Antisense strand to SEQ ID NO: 900024
gacuuuaaggagcugaucc

SEQ ID NO: 900026 - RNA, 19 nt, Artificial Sequence
  Description of Artificial Sequence: Synthetic oligonucleotide
  Sense strand starting at position 399 of SEQ ID NO: 588938
ggaacaacccugcaguuaa

SEQ ID NO: 900027 - RNA, 19 nt, Artificial Sequence
  Description of Artificial Sequence: Synthetic oligonucleotide
  Antisense strand to SEQ ID NO: 900026
uuaacugcaggguuguucc

SEQ ID NO: 900028 - RNA, 19 nt, Artificial Sequence
  Description of Artificial Sequence: Synthetic oligonucleotide
  Sense strand starting at position 660 of SEQ ID NO: 588938
ccaagagucuguguguaau

SEQ ID NO: 900029 - RNA, 19 nt, Artificial Sequence
  Description of Artificial Sequence: Synthetic oligonucleotide
  Antisense strand to SEQ ID NO: 900028
auuacacacagacucuugg

SEQ ID NO: 900030 - RNA, 19 nt, Artificial Sequence
  Description of Artificial Sequence: Synthetic oligonucleotide
  Sense strand starting at position 666 of SEQ ID NO: 588938
gucuguguguaauuuccuu

SEQ ID NO: 900031 - RNA, 19 nt, Artificial Sequence
  Description of Artificial Sequence: Synthetic oligonucleotide
  Antisense strand to SEQ ID NO: 900030
aaggaaauuacacacagac

SEQ ID NO: 900032 - RNA, 19 nt, Artificial Sequence
  Description of Artificial Sequence: Synthetic oligonucleotide
  Sense strand starting at position 670 of SEQ ID NO: 588938
guguguaauuuccuuccaa

SEQ ID NO: 900033 - RNA, 19 nt, Artificial Sequence
  Description of Artificial Sequence: Synthetic oligonucleotide
  Antisense strand to SEQ ID NO: 900032
uuggaaggaaauuacacac

SEQ ID NO: 900034 - RNA, 19 nt, Artificial Sequence
  Description of Artificial Sequence: Synthetic oligonucleotide
  Sense strand starting at position 895 of SEQ ID NO: 588938
gcaaaugaagcaugcugau

SEQ ID NO: 900035 - RNA, 19 nt, Artificial Sequence
  Description of Artificial Sequence: Synthetic oligonucleotide
  Antisense strand to SEQ ID NO: 900034
aucagcaugcuucauuugc

SEQ ID NO: 900036 - RNA, 19 nt, Artificial Sequence
  Description of Artificial Sequence: Synthetic oligonucleotide
  Sense strand starting at position 909 of SEQ ID NO: 588938
cugauaucggcucagugag

SEQ ID NO: 900037 - RNA, 19 nt, Artificial Sequence
  Description of Artificial Sequence: Synthetic oligonucleotide
  Antisense strand to SEQ ID NO: 900036
cucacugagccgauaucag

SEQ ID NO: 900038 - RNA, 19 nt, Artificial Sequence
  Description of Artificial Sequence: Synthetic oligonucleotide
  Sense strand starting at position 1010 of SEQ ID NO: 588938
agucaagguccucaccaaa

SEQ ID NO: 900039 - RNA, 19 nt, Artificial Sequence
  Description of Artificial Sequence: Synthetic oligonucleotide
  Antisense strand to SEQ ID NO: 900038
uuuggugaggaccuugacu

SEQ ID NO: 900040 - RNA, 19 nt, Artificial Sequence
  Description of Artificial Sequence: Synthetic oligonucleotide
  Sense strand starting at position 1098 of SEQ ID NO: 588938
gaagaaacuugagagauau

SEQ ID NO: 900041 - RNA, 19 nt, Artificial Sequence
  Description of Artificial Sequence: Synthetic oligonucleotide
  Antisense strand to SEQ ID NO: 900040
auaucucucaaguuucuuc

SEQ ID NO: 900042 - RNA, 19 nt, Artificial Sequence
  Description of Artificial Sequence: Synthetic oligonucleotide
  Sense strand starting at position 1110 of SEQ ID NO: 588938
gagauauucuugucuagaa

SEQ ID NO: 900043 - RNA, 19 nt, Artificial Sequence
  Description of Artificial Sequence: Synthetic oligonucleotide
  Antisense strand to SEQ ID NO: 900042
uucuagacaagaauaucuc

SEQ ID NO: 900044 - RNA, 19 nt, Artificial Sequence
  Description of Artificial Sequence: Synthetic oligonucleotide
  Sense strand starting at position 1111 of SEQ ID NO: 588938
agauauucuugucuagaag

SEQ ID NO: 900045 - RNA, 19 nt, Artificial Sequence
  Description of Artificial Sequence: Synthetic oligonucleotide
  Antisense strand to SEQ ID NO: 900044
cuucuagacaagaauaucu

SEQ ID NO: 900046 - RNA, 19 nt, Artificial Sequence
  Description of Artificial Sequence: Synthetic oligonucleotide
  Sense strand starting at position 1112 of SEQ ID NO: 588938
gauauucuugucuagaagu

SEQ ID NO: 900047 - RNA, 19 nt, Artificial Sequence
  Description of Artificial Sequence: Synthetic oligonucleotide
  Antisense strand to SEQ ID NO: 900046
acuucuagacaagaauauc

SEQ ID NO: 900048 - RNA, 19 nt, Artificial Sequence
  Description of Artificial Sequence: Synthetic oligonucleotide
  Sense strand starting at position 1122 of SEQ ID NO: 588938
ucuagaaguucccaaauga

SEQ ID NO: 900049 - RNA, 19 nt, Artificial Sequence
  Description of Artificial Sequence: Synthetic oligonucleotide
  Antisense strand to SEQ ID NO: 900048
ucauuugggaacuucuaga

SEQ ID NO: 900050 - RNA, 19 nt, Artificial Sequence
  Description of Artificial Sequence: Synthetic oligonucleotide
  Sense strand starting at position 1169 of SEQ ID NO: 588938
uucuaauacuuagugagcu

SEQ ID NO: 900051 - RNA, 19 nt, Artificial Sequence
  Description of Artificial Sequence: Synthetic oligonucleotide
  Antisense strand to SEQ ID NO: 900050
agcucacuaaguauuagaa

SEQ ID NO: 900052 - RNA, 19 nt, Artificial Sequence
  Description of Artificial Sequence: Synthetic oligonucleotide
  Sense strand starting at position 1173 of SEQ ID NO: 588938
aauacuuagugagcugaca

SEQ ID NO: 900053 - RNA, 19 nt, Artificial Sequence
  Description of Artificial Sequence: Synthetic oligonucleotide
  Antisense strand to SEQ ID NO: 900052
ugucagcucacuaaguauu

SEQ ID NO: 900054 - RNA, 19 nt, Artificial Sequence
  Description of Artificial Sequence: Synthetic oligonucleotide
  Sense strand starting at position 1447 of SEQ ID NO: 588938
gaaugcaaguucucuagca

SEQ ID NO: 900055 - RNA, 19 nt, Artificial Sequence
  Description of Artificial Sequence: Synthetic oligonucleotide
  Antisense strand to SEQ ID NO: 900054
ugcuagagaacuugcauuc

SEQ ID NO: 900056 - RNA, 19 nt, Artificial Sequence
  Description of Artificial Sequence: Synthetic oligonucleotide
  Sense strand starting at position 1449 of SEQ ID NO: 588938
augcaaguucucuagcaau

SEQ ID NO: 900057 - RNA, 19 nt, Artificial Sequence
  Description of Artificial Sequence: Synthetic oligonucleotide
  Antisense strand to SEQ ID NO: 900056
auugcuagagaacuugcau

SEQ ID NO: 900058 - RNA, 19 nt, Artificial Sequence
  Description of Artificial Sequence: Synthetic oligonucleotide
  Sense strand starting at position 2231 of SEQ ID NO: 588938
gggccucagugucuacuua

SEQ ID NO: 900059 - RNA, 19 nt, Artificial Sequence
  Description of Artificial Sequence: Synthetic oligonucleotide
  Antisense strand to SEQ ID NO: 900058
uaaguagacacugaggccc

SEQ ID NO: 900060 - RNA, 19 nt, Artificial Sequence
  Description of Artificial Sequence: Synthetic oligonucleotide
  Sense strand starting at position 2239 of SEQ ID NO: 588938
gugucuacuuacgcaauau

SEQ ID NO: 900061 - RNA, 19 nt, Artificial Sequence
  Description of Artificial Sequence: Synthetic oligonucleotide
  Antisense strand to SEQ ID NO: 900060
auauugcguaaguagacac

SEQ ID NO: 900062 - RNA, 19 nt, Artificial Sequence
  Description of Artificial Sequence: Synthetic oligonucleotide
  Sense strand starting at position 2311 of SEQ ID NO: 588938
augauuguuacaggagucu

SEQ ID NO: 900063 - RNA, 19 nt, Artificial Sequence
  Description of Artificial Sequence: Synthetic oligonucleotide
  Antisense strand to SEQ ID NO: 900062
agacuccuguaacaaucau

SEQ ID NO: 900064 - RNA, 19 nt, Artificial Sequence
  Description of Artificial Sequence: Synthetic oligonucleotide
  Sense strand starting at position 2365 of SEQ ID NO: 588938
uuaucuuggucucugcaga

SEQ ID NO: 900065 - RNA, 19 nt, Artificial Sequence
  Description of Artificial Sequence: Synthetic oligonucleotide
  Antisense strand to SEQ ID NO: 900064
ucugcagagaccaagauaa

SEQ ID NO: 900066 - RNA, 19 nt, Artificial Sequence
  Description of Artificial Sequence: Synthetic oligonucleotide
  Sense strand starting at position 2478 of SEQ ID NO: 588938
aaauguaaguuaggaagaa

SEQ ID NO: 900067 - RNA, 19 nt, Artificial Sequence
  Description of Artificial Sequence: Synthetic oligonucleotide
  Antisense strand to SEQ ID NO: 900066
uucuuccuaacuuacauuu

SEQ ID NO: 900068 - RNA, 19 nt, Artificial Sequence
  Description of Artificial Sequence: Synthetic oligonucleotide
  Sense strand starting at position 2479 of SEQ ID NO: 588938
aauguaaguuaggaagaaa

SEQ ID NO: 900069 - RNA, 19 nt, Artificial Sequence
  Description of Artificial Sequence: Synthetic oligonucleotide
  Antisense strand to SEQ ID NO: 900068
uuucuuccuaacuuacauu

SEQ ID NO: 900070 - RNA, 19 nt, Artificial Sequence
  Description of Artificial Sequence: Synthetic oligonucleotide
  Sense strand starting at position 2549 of SEQ ID NO: 588938
ggcucaucccuguaaauuc

SEQ ID NO: 900071 - RNA, 19 nt, Artificial Sequence
  Description of Artificial Sequence: Synthetic oligonucleotide
  Antisense strand to SEQ ID NO: 900070
gaauuuacagggaugagcc

SEQ ID NO: 900072 - RNA, 19 nt, Artificial Sequence
  Description of Artificial Sequence: Synthetic oligonucleotide
  Sense strand starting at position 2699 of SEQ ID NO: 588938
aucccagcuccucgagauu

SEQ ID NO: 900073 - RNA, 19 nt, Artificial Sequence
  Description of Artificial Sequence: Synthetic oligonucleotide
  Antisense strand to SEQ ID NO: 900072
aaucucgaggagcugggau

SEQ ID NO: 900074 - RNA, 19 nt, Artificial Sequence
  Description of Artificial Sequence: Synthetic oligonucleotide
  Sense strand starting at position 2708 of SEQ ID NO: 588938
ccucgagauuaccuucuuu

SEQ ID NO: 900075 - RNA, 19 nt, Artificial Sequence
  Description of Artificial Sequence: Synthetic oligonucleotide
  Antisense strand to SEQ ID NO: 900074
aaagaagguaaucucgagg

SEQ ID NO: 900076 - RNA, 19 nt, Artificial Sequence
  Description of Artificial Sequence: Synthetic oligonucleotide
  Sense strand starting at position 3099 of SEQ ID NO: 588938
uuccgaaaugguuguauua

SEQ ID NO: 900077 - RNA, 19 nt, Artificial Sequence
  Description of Artificial Sequence: Synthetic oligonucleotide
  Antisense strand to SEQ ID NO: 900076
uaauacaaccauuucggaa

SEQ ID NO: 900078 - RNA, 19 nt, Artificial Sequence
  Description of Artificial Sequence: Synthetic oligonucleotide
  Sense strand starting at position 3536 of SEQ ID NO: 588938
guauaugagaguugcuguu

SEQ ID NO: 900079 - RNA, 19 nt, Artificial Sequence
  Description of Artificial Sequence: Synthetic oligonucleotide
  Antisense strand to SEQ ID NO: 900078
aacagcaacucucauauac

SEQ ID NO: 900080 - RNA, 19 nt, Artificial Sequence
  Description of Artificial Sequence: Synthetic oligonucleotide
  Sense strand starting at position 3538 of SEQ ID NO: 588938
auaugagaguugcuguugu

SEQ ID NO: 900081 - RNA, 19 nt, Artificial Sequence
  Description of Artificial Sequence: Synthetic oligonucleotide
  Antisense strand to SEQ ID NO: 900080
acaacagcaacucucauau

SEQ ID NO: 900082 - RNA, 19 nt, Artificial Sequence
  Description of Artificial Sequence: Synthetic oligonucleotide
  Sense strand starting at position 3625 of SEQ ID NO: 588938
gguaucuccugcuuuaaca

SEQ ID NO: 900083 - RNA, 19 nt, Artificial Sequence
  Description of Artificial Sequence: Synthetic oligonucleotide
  Antisense strand to SEQ ID NO: 900082
uguuaaagcaggagauacc

SEQ ID NO: 900084 - RNA, 19 nt, Artificial Sequence
  Description of Artificial Sequence: Synthetic oligonucleotide
  Sense strand starting at position 3684 of SEQ ID NO: 588938
cacguuugcuaugcauaua

SEQ ID NO: 900085 - RNA, 19 nt, Artificial Sequence
  Description of Artificial Sequence: Synthetic oligonucleotide
  Antisense strand to SEQ ID NO: 900084
uauaugcauagcaaacgug

SEQ ID NO: 900086 - RNA, 19 nt, Artificial Sequence
  Description of Artificial Sequence: Synthetic oligonucleotide
  Sense strand starting at position 3687 of SEQ ID NO: 588938
guuugcuaugcauauauac

SEQ ID NO: 900087 - RNA, 19 nt, Artificial Sequence
  Description of Artificial Sequence: Synthetic oligonucleotide
  Antisense strand to SEQ ID NO: 900086
guauauaugcauagcaaac

SEQ ID NO: 900088 - RNA, 19 nt, Artificial Sequence
  Description of Artificial Sequence: Synthetic oligonucleotide
  Sense strand starting at position 57 of SEQ ID NO: 588939
ugcacagacuuaucacaug

SEQ ID NO: 900089 - RNA, 19 nt, Artificial Sequence
  Description of Artificial Sequence: Synthetic oligonucleotide
  Antisense strand to SEQ ID NO: 900088
caugugauaagucugugca

SEQ ID NO: 900090 - RNA, 19 nt, Artificial Sequence
  Description of Artificial Sequence: Synthetic oligonucleotide
  Sense strand starting at position 206 of SEQ ID NO: 588939
ggaauacuauuauaaagac

SEQ ID NO: 900091 - RNA, 19 nt, Artificial Sequence
  Description of Artificial Sequence: Synthetic oligonucleotide
  Antisense strand to SEQ ID NO: 900090
gucuuuauaauaguauucc

SEQ ID NO: 900092 - RNA, 19 nt, Artificial Sequence
  Description of Artificial Sequence: Synthetic oligonucleotide
  Sense strand starting at position 249 of SEQ ID NO: 588939
gcagucaaccuguggaaga

SEQ ID NO: 900093 - RNA, 19 nt, Artificial Sequence
  Description of Artificial Sequence: Synthetic oligonucleotide
  Antisense strand to SEQ ID NO: 900092
ucuuccacagguugacugc

SEQ ID NO: 900094 - RNA, 19 nt, Artificial Sequence
  Description of Artificial Sequence: Synthetic oligonucleotide
  Sense strand starting at position 473 of SEQ ID NO: 588939
aggcuaucuccuggcacau

SEQ ID NO: 900095 - RNA, 19 nt, Artificial Sequence
  Description of Artificial Sequence: Synthetic oligonucleotide
  Antisense strand to SEQ ID NO: 900094
augugccaggagauagccu

SEQ ID NO: 900096 - RNA, 19 nt, Artificial Sequence
  Description of Artificial Sequence: Synthetic oligonucleotide
  Sense strand starting at position 485 of SEQ ID NO: 588939
ggcacauucuucucugaug

SEQ ID NO: 900097 - RNA, 19 nt, Artificial Sequence
  Description of Artificial Sequence: Synthetic oligonucleotide
  Antisense strand to SEQ ID NO: 900096
caucagagaagaaugugcc

SEQ ID NO: 900098 - RNA, 19 nt, Artificial Sequence
  Description of Artificial Sequence: Synthetic oligonucleotide
  Sense strand starting at position 494 of SEQ ID NO: 588939
uucucugaugcccauagaa

SEQ ID NO: 900099 - RNA, 19 nt, Artificial Sequence
  Description of Artificial Sequence: Synthetic oligonucleotide
  Antisense strand to SEQ ID NO: 900098
uucuaugggcaucagagaa

SEQ ID NO: 900100 - RNA, 19 nt, Artificial Sequence
  Description of Artificial Sequence: Synthetic oligonucleotide
  Sense strand starting at position 496 of SEQ ID NO: 588939
cucugaugcccauagaaca

SEQ ID NO: 900101 - RNA, 19 nt, Artificial Sequence
  Description of Artificial Sequence: Synthetic oligonucleotide
  Antisense strand to SEQ ID NO: 900100
uguucuaugggcaucagag

SEQ ID NO: 900102 - RNA, 19 nt, Artificial Sequence
  Description of Artificial Sequence: Synthetic oligonucleotide
  Sense strand starting at position 512 of SEQ ID NO: 588939
acacuuagcccagaucugu

SEQ ID NO: 900103 - RNA, 19 nt, Artificial Sequence
  Description of Artificial Sequence: Synthetic oligonucleotide
  Antisense strand to SEQ ID NO: 900102
acagaucugggcuaagugu

SEQ ID NO: 900104 - RNA, 19 nt, Artificial Sequence
  Description of Artificial Sequence: Synthetic oligonucleotide
  Sense strand starting at position 653 of SEQ ID NO: 588939
ggcuguauucuaggugaug

SEQ ID NO: 900105 - RNA, 19 nt, Artificial Sequence
  Description of Artificial Sequence: Synthetic oligonucleotide
  Antisense strand to SEQ ID NO: 900104
caucaccuagaauacagcc

SEQ ID NO: 900106 - RNA, 19 nt, Artificial Sequence
  Description of Artificial Sequence: Synthetic oligonucleotide
  Sense strand starting at position 655 of SEQ ID NO: 588939
cuguauucuaggugaugca

SEQ ID NO: 900107 - RNA, 19 nt, Artificial Sequence
  Description of Artificial Sequence: Synthetic oligonucleotide
  Antisense strand to SEQ ID NO: 900106
ugcaucaccuagaauacag

SEQ ID NO: 900108 - RNA, 19 nt, Artificial Sequence
  Description of Artificial Sequence: Synthetic oligonucleotide
  Sense strand starting at position 656 of SEQ ID NO: 588939
uguauucuaggugaugcaa

SEQ ID NO: 900109 - RNA, 19 nt, Artificial Sequence
  Description of Artificial Sequence: Synthetic oligonucleotide
  Antisense strand to SEQ ID NO: 900108
uugcaucaccuagaauaca

SEQ ID NO: 900110 - RNA, 19 nt, Artificial Sequence
  Description of Artificial Sequence: Synthetic oligonucleotide
  Sense strand starting at position 704 of SEQ ID NO: 588939
ugugucaaaugcuuacaaa

SEQ ID NO: 900111 - RNA, 19 nt, Artificial Sequence
  Description of Artificial Sequence: Synthetic oligonucleotide
  Antisense strand to SEQ ID NO: 900110
uuuguaagcauuugacaca

SEQ ID NO: 900112 - RNA, 19 nt, Artificial Sequence
  Description of Artificial Sequence: Synthetic oligonucleotide
  Sense strand starting at position 705 of SEQ ID NO: 588939
gugucaaaugcuuacaaac

SEQ ID NO: 900113 - RNA, 19 nt, Artificial Sequence
  Description of Artificial Sequence: Synthetic oligonucleotide
  Antisense strand to SEQ ID NO: 900112
guuuguaagcauuugacac

SEQ ID NO: 900114 - RNA, 19 nt, Artificial Sequence
  Description of Artificial Sequence: Synthetic oligonucleotide
  Sense strand starting at position 728 of SEQ ID NO: 588939
uagguucugagagguuaag

SEQ ID NO: 900115 - RNA, 19 nt, Artificial Sequence
  Description of Artificial Sequence: Synthetic oligonucleotide
  Antisense strand to SEQ ID NO: 900114
cuuaaccucucagaaccua

SEQ ID NO: 900116 - RNA, 19 nt, Artificial Sequence
  Description of Artificial Sequence: Synthetic oligonucleotide
  Sense strand starting at position 815 of SEQ ID NO: 588939
caaagaauguggccuuucu

SEQ ID NO: 900117 - RNA, 19 nt, Artificial Sequence
  Description of Artificial Sequence: Synthetic oligonucleotide
  Antisense strand to SEQ ID NO: 900116
agaaaggccacauucuuug

SEQ ID NO: 900118 - RNA, 19 nt, Artificial Sequence
  Description of Artificial Sequence: Synthetic oligonucleotide
  Sense strand starting at position 901 of SEQ ID NO: 588939
guuuaagcaugccuagaug

SEQ ID NO: 900119 - RNA, 19 nt, Artificial Sequence
  Description of Artificial Sequence: Synthetic oligonucleotide
  Antisense strand to SEQ ID NO: 900118
caucuaggcaugcuuaaac

SEQ ID NO: 900120 - RNA, 19 nt, Artificial Sequence
  Description of Artificial Sequence: Synthetic oligonucleotide
  Sense strand starting at position 907 of SEQ ID NO: 588939
gcaugccuagaugaacaau

SEQ ID NO: 900121 - RNA, 19 nt, Artificial Sequence
  Description of Artificial Sequence: Synthetic oligonucleotide
  Antisense strand to SEQ ID NO: 900120
auuguucaucuaggcaugc

SEQ ID NO: 900122 - RNA, 19 nt, Artificial Sequence
  Description of Artificial Sequence: Synthetic oligonucleotide
  Sense strand starting at position 923 of SEQ ID NO: 588939
aaucuaggcugaucaguga

SEQ ID NO: 900123 - RNA, 19 nt, Artificial Sequence
  Description of Artificial Sequence: Synthetic oligonucleotide
  Antisense strand to SEQ ID NO: 900122
ucacugaucagccuagauu

SEQ ID NO: 900124 - RNA, 19 nt, Artificial Sequence
  Description of Artificial Sequence: Synthetic oligonucleotide
  Sense strand starting at position 937 of SEQ ID NO: 588939
agugaaaccuaaguguuua

SEQ ID NO: 900125 - RNA, 19 nt, Artificial Sequence
  Description of Artificial Sequence: Synthetic oligonucleotide
  Antisense strand to SEQ ID NO: 900124
uaaacacuuagguuucacu

SEQ ID NO: 900126 - RNA, 19 nt, Artificial Sequence
  Description of Artificial Sequence: Synthetic oligonucleotide
  Sense strand starting at position 1027 of SEQ ID NO: 588939
gaauccuggccuugagaga

SEQ ID NO: 900127 - RNA, 19 nt, Artificial Sequence
  Description of Artificial Sequence: Synthetic oligonucleotide
  Antisense strand to SEQ ID NO: 900126
ucucucaaggccaggauuc

SEQ ID NO: 900128 - RNA, 19 nt, Artificial Sequence
  Description of Artificial Sequence: Synthetic oligonucleotide
  Sense strand starting at position 1234 of SEQ ID NO: 588939
ucaguuucuugauccguaa

SEQ ID NO: 900129 - RNA, 19 nt, Artificial Sequence
  Description of Artificial Sequence: Synthetic oligonucleotide
  Antisense strand to SEQ ID NO: 900128
uuacggaucaagaaacuga

SEQ ID NO: 900130 - RNA, 19 nt, Artificial Sequence
  Description of Artificial Sequence: Synthetic oligonucleotide
  Sense strand starting at position 1301 of SEQ ID NO: 588939
gggaaugcacuuugcaaag

SEQ ID NO: 900131 - RNA, 19 nt, Artificial Sequence
  Description of Artificial Sequence: Synthetic oligonucleotide
  Antisense strand to SEQ ID NO: 900130
cuuugcaaagugcauuccc

SEQ ID NO: 900132 - RNA, 19 nt, Artificial Sequence
  Description of Artificial Sequence: Synthetic oligonucleotide
  Sense strand starting at position 1427 of SEQ ID NO: 588939
ggagaaagucguugcagga

SEQ ID NO: 900133 - RNA, 19 nt, Artificial Sequence
  Description of Artificial Sequence: Synthetic oligonucleotide
  Antisense strand to SEQ ID NO: 900132
uccugcaacgacuuucucc

SEQ ID NO: 900134 - RNA, 19 nt, Artificial Sequence
  Description of Artificial Sequence: Synthetic oligonucleotide
  Sense strand starting at position 1431 of SEQ ID NO: 588939
aaagucguugcaggaauuu

SEQ ID NO: 900135 - RNA, 19 nt, Artificial Sequence
  Description of Artificial Sequence: Synthetic oligonucleotide
  Antisense strand to SEQ ID NO: 900134
aaauuccugcaacgacuuu

SEQ ID NO: 900136 - RNA, 19 nt, Artificial Sequence
  Description of Artificial Sequence: Synthetic oligonucleotide
  Sense strand starting at position 1476 of SEQ ID NO: 588939
agucuugauuucgaagauc

SEQ ID NO: 900137 - RNA, 19 nt, Artificial Sequence
  Description of Artificial Sequence: Synthetic oligonucleotide
  Antisense strand to SEQ ID NO: 900136
gaucuucgaaaucaagacu

SEQ ID NO: 900138 - RNA, 19 nt, Artificial Sequence
  Description of Artificial Sequence: Synthetic oligonucleotide
  Sense strand starting at position 1594 of SEQ ID NO: 588939
cauuuccuuucgucguaga

SEQ ID NO: 900139 - RNA, 19 nt, Artificial Sequence
  Description of Artificial Sequence: Synthetic oligonucleotide
  Antisense strand to SEQ ID NO: 900138
ucuacgacgaaaggaaaug

SEQ ID NO: 900140 - RNA, 19 nt, Artificial Sequence
  Description of Artificial Sequence: Synthetic oligonucleotide
  Sense strand starting at position 1595 of SEQ ID NO: 588939
auuuccuuucgucguagaa

SEQ ID NO: 900141 - RNA, 19 nt, Artificial Sequence
  Description of Artificial Sequence: Synthetic oligonucleotide
  Antisense strand to SEQ ID NO: 900140
uucuacgacgaaaggaaau

SEQ ID NO: 900142 - RNA, 19 nt, Artificial Sequence
  Description of Artificial Sequence: Synthetic oligonucleotide
  Sense strand starting at position 1652 of SEQ ID NO: 588939
cgccgaacuuacuuaaaua

SEQ ID NO: 900143 - RNA, 19 nt, Artificial Sequence
  Description of Artificial Sequence: Synthetic oligonucleotide
  Antisense strand to SEQ ID NO: 900142
uauuuaaguaaguucggcg

SEQ ID NO: 900144 - RNA, 19 nt, Artificial Sequence
  Description of Artificial Sequence: Synthetic oligonucleotide
  Sense strand starting at position 2170 of SEQ ID NO: 588939
guggcacugaguuagguua

SEQ ID NO: 900145 - RNA, 19 nt, Artificial Sequence
  Description of Artificial Sequence: Synthetic oligonucleotide
  Antisense strand to SEQ ID NO: 900144
uaaccuaacucagugccac

SEQ ID NO: 900146 - RNA, 19 nt, Artificial Sequence
  Description of Artificial Sequence: Synthetic oligonucleotide
  Sense strand starting at position 2216 of SEQ ID NO: 588939
cuacacuucccugguaguu

SEQ ID NO: 900147 - RNA, 19 nt, Artificial Sequence
  Description of Artificial Sequence: Synthetic oligonucleotide
  Antisense strand to SEQ ID NO: 900146
aacuaccagggaaguguag

SEQ ID NO: 900148 - RNA, 19 nt, Artificial Sequence
  Description of Artificial Sequence: Synthetic oligonucleotide
  Sense strand starting at position 2233 of SEQ ID NO: 588939
uucgcauagucaccuagaa

SEQ ID NO: 900149 - RNA, 19 nt, Artificial Sequence
  Description of Artificial Sequence: Synthetic oligonucleotide
  Antisense strand to SEQ ID NO: 900148
uucuaggugacuaugcgaa

SEQ ID NO: 900150 - RNA, 19 nt, Artificial Sequence
  Description of Artificial Sequence: Synthetic oligonucleotide
  Sense strand starting at position 2235 of SEQ ID NO: 588939
cgcauagucaccuagaaag

SEQ ID NO: 900151 - RNA, 19 nt, Artificial Sequence
  Description of Artificial Sequence: Synthetic oligonucleotide
  Antisense strand to SEQ ID NO: 900150
cuuucuaggugacuaugcg

SEQ ID NO: 900152 - RNA, 19 nt, Artificial Sequence
  Description of Artificial Sequence: Synthetic oligonucleotide
  Sense strand starting at position 2249 of SEQ ID NO: 588939
gaaagauagugcuuucuug

SEQ ID NO: 900153 - RNA, 19 nt, Artificial Sequence
  Description of Artificial Sequence: Synthetic oligonucleotide
  Antisense strand to SEQ ID NO: 900152
caagaaagcacuaucuuuc

SEQ ID NO: 900154 - RNA, 19 nt, Artificial Sequence
  Description of Artificial Sequence: Synthetic oligonucleotide
  Sense strand starting at position 2331 of SEQ ID NO: 588939
cggccauuggcugaaagga

SEQ ID NO: 900155 - RNA, 19 nt, Artificial Sequence
  Description of Artificial Sequence: Synthetic oligonucleotide
  Antisense strand to SEQ ID NO: 900154
uccuuucagccaauggccg

SEQ ID NO: 900156 - RNA, 19 nt, Artificial Sequence
  Description of Artificial Sequence: Synthetic oligonucleotide
  Sense strand starting at position 3043 of SEQ ID NO: 588939
gcccaauugcguccagcuu

SEQ ID NO: 900157 - RNA, 19 nt, Artificial Sequence
  Description of Artificial Sequence: Synthetic oligonucleotide
  Antisense strand to SEQ ID NO: 900156
aagcuggacgcaauugggc

SEQ ID NO: 900158 - RNA, 19 nt, Artificial Sequence
  Description of Artificial Sequence: Synthetic oligonucleotide
  Sense strand starting at position 3157 of SEQ ID NO: 588939
augcacacucagugauauu

SEQ ID NO: 900159 - RNA, 19 nt, Artificial Sequence
  Description of Artificial Sequence: Synthetic oligonucleotide
  Antisense strand to SEQ ID NO: 900158
aauaucacugagugugcau

SEQ ID NO: 900160 - RNA, 19 nt, Artificial Sequence
  Description of Artificial Sequence: Synthetic oligonucleotide
  Sense strand starting at position 3212 of SEQ ID NO: 588939
agagucuauuugcauaauu

SEQ ID NO: 900161 - RNA, 19 nt, Artificial Sequence
  Description of Artificial Sequence: Synthetic oligonucleotide
  Antisense strand to SEQ ID NO: 900160
aauuaugcaaauagacucu

SEQ ID NO: 900162 - RNA, 19 nt, Artificial Sequence
  Description of Artificial Sequence: Synthetic oligonucleotide
  Sense strand starting at position 3322 of SEQ ID NO: 588939
caacuuuacggugaagcua

SEQ ID NO: 900163 - RNA, 19 nt, Artificial Sequence
  Description of Artificial Sequence: Synthetic oligonucleotide
  Antisense strand to SEQ ID NO: 900162
uagcuucaccguaaaguug

SEQ ID NO: 900164 - RNA, 19 nt, Artificial Sequence
  Description of Artificial Sequence: Synthetic oligonucleotide
  Sense strand starting at position 3585 of SEQ ID NO: 588939
ccugucuacccuuagaguu

SEQ ID NO: 900165 - RNA, 19 nt, Artificial Sequence
  Description of Artificial Sequence: Synthetic oligonucleotide
  Antisense strand to SEQ ID NO: 900164
aacucuaaggguagacagg

SEQ ID NO: 900166 - RNA, 19 nt, Artificial Sequence
  Description of Artificial Sequence: Synthetic oligonucleotide
  Sense strand starting at position 3621 of SEQ ID NO: 588939
aaauaauaugugugaagcu

SEQ ID NO: 900167 - RNA, 19 nt, Artificial Sequence
  Description of Artificial Sequence: Synthetic oligonucleotide
  Antisense strand to SEQ ID NO: 900166
agcuucacacauauuauuu

SEQ ID NO: 900168 - RNA, 19 nt, Artificial Sequence
  Description of Artificial Sequence: Synthetic oligonucleotide
  Sense strand starting at position 630 of SEQ ID NO: 588940
acagcagucuucuuggaac

SEQ ID NO: 900169 - RNA, 19 nt, Artificial Sequence
  Description of Artificial Sequence: Synthetic oligonucleotide
  Antisense strand to SEQ ID NO: 900168
guuccaagaagacugcugu

SEQ ID NO: 900170 - RNA, 19 nt, Artificial Sequence
  Description of Artificial Sequence: Synthetic oligonucleotide
  Sense strand starting at position 698 of SEQ ID NO: 588940
cccaguuuccuuggaguaa

SEQ ID NO: 900171 - RNA, 19 nt, Artificial Sequence
  Description of Artificial Sequence: Synthetic oligonucleotide
  Antisense strand to SEQ ID NO: 900170
uuacuccaaggaaacuggg

SEQ ID NO: 900172 - RNA, 19 nt, Artificial Sequence
  Description of Artificial Sequence: Synthetic oligonucleotide
  Sense strand starting at position 702 of SEQ ID NO: 588940
guuuccuuggaguaaauuc

SEQ ID NO: 900173 - RNA, 19 nt, Artificial Sequence
  Description of Artificial Sequence: Synthetic oligonucleotide
  Antisense strand to SEQ ID NO: 900172
gaauuuacuccaaggaaac

SEQ ID NO: 900174 - RNA, 19 nt, Artificial Sequence
  Description of Artificial Sequence: Synthetic oligonucleotide
  Sense strand starting at position 829 of SEQ ID NO: 588940
acugcuugccuggauaaca

SEQ ID NO: 900175 - RNA, 19 nt, Artificial Sequence
  Description of Artificial Sequence: Synthetic oligonucleotide
  Antisense strand to SEQ ID NO: 900174
uguuauccaggcaagcagu

SEQ ID NO: 900176 - RNA, 19 nt, Artificial Sequence
  Description of Artificial Sequence: Synthetic oligonucleotide
  Sense strand starting at position 1256 of SEQ ID NO: 588940
aguacaucuugauuggguu

SEQ ID NO: 900177 - RNA, 19 nt, Artificial Sequence
  Description of Artificial Sequence: Synthetic oligonucleotide
  Antisense strand to SEQ ID NO: 900176
aacccaaucaagauguacu

SEQ ID NO: 900178 - RNA, 19 nt, Artificial Sequence
  Description of Artificial Sequence: Synthetic oligonucleotide
  Sense strand starting at position 1257 of SEQ ID NO: 588940
guacaucuugauuggguua

SEQ ID NO: 900179 - RNA, 19 nt, Artificial Sequence
  Description of Artificial Sequence: Synthetic oligonucleotide
  Antisense strand to SEQ ID NO: 900178
uaacccaaucaagauguac

SEQ ID NO: 900180 - RNA, 19 nt, Artificial Sequence
  Description of Artificial Sequence: Synthetic oligonucleotide
  Sense strand starting at position 1270 of SEQ ID NO: 588940
ggguuacacucccucacua

SEQ ID NO: 900181 - RNA, 19 nt, Artificial Sequence
  Description of Artificial Sequence: Synthetic oligonucleotide
  Antisense strand to SEQ ID NO: 900180
uagugagggaguguaaccc

SEQ ID NO: 900182 - RNA, 19 nt, Artificial Sequence
  Description of Artificial Sequence: Synthetic oligonucleotide
  Sense strand starting at position 1316 of SEQ ID NO: 588940
cagccuuauuggucuugau

SEQ ID NO: 900183 - RNA, 19 nt, Artificial Sequence
  Description of Artificial Sequence: Synthetic oligonucleotide
  Antisense strand to SEQ ID NO: 900182
aucaagaccaauaaggcug

SEQ ID NO: 900184 - RNA, 19 nt, Artificial Sequence
  Description of Artificial Sequence: Synthetic oligonucleotide
  Sense strand starting at position 1522 of SEQ ID NO: 588940
gauggagacggcuggaaua

SEQ ID NO: 900185 - RNA, 19 nt, Artificial Sequence
  Description of Artificial Sequence: Synthetic oligonucleotide
  Antisense strand to SEQ ID NO: 900184
uauuccagccgucuccauc

SEQ ID NO: 900186 - RNA, 19 nt, Artificial Sequence
  Description of Artificial Sequence: Synthetic oligonucleotide
  Sense strand starting at position 1600 of SEQ ID NO: 588940
aucuuugugaccuggugga

SEQ ID NO: 900187 - RNA, 19 nt, Artificial Sequence
  Description of Artificial Sequence: Synthetic oligonucleotide
  Antisense strand to SEQ ID NO: 900186
uccaccaggucacaaagau

SEQ ID NO: 900188 - RNA, 19 nt, Artificial Sequence
  Description of Artificial Sequence: Synthetic oligonucleotide
  Sense strand starting at position 1616 of SEQ ID NO: 588940
ggaucucggaguugaggaa

SEQ ID NO: 900189 - RNA, 19 nt, Artificial Sequence
  Description of Artificial Sequence: Synthetic oligonucleotide
  Antisense strand to SEQ ID NO: 900188
uuccucaacuccgagaucc

SEQ ID NO: 900190 - RNA, 19 nt, Artificial Sequence
  Description of Artificial Sequence: Synthetic oligonucleotide
  Sense strand starting at position 1687 of SEQ ID NO: 588940
auguuaucaguuggacaua

SEQ ID NO: 900191 - RNA, 19 nt, Artificial Sequence
  Description of Artificial Sequence: Synthetic oligonucleotide
  Antisense strand to SEQ ID NO: 900190
uauguccaacugauaacau

SEQ ID NO: 900192 - RNA, 19 nt, Artificial Sequence
  Description of Artificial Sequence: Synthetic oligonucleotide
  Sense strand starting at position 1832 of SEQ ID NO: 588940
uucucuauucuugauguca

SEQ ID NO: 900193 - RNA, 19 nt, Artificial Sequence
  Description of Artificial Sequence: Synthetic oligonucleotide
  Antisense strand to SEQ ID NO: 900192
ugacaucaagaauagagaa

SEQ ID NO: 900194 - RNA, 19 nt, Artificial Sequence
  Description of Artificial Sequence: Synthetic oligonucleotide
  Sense strand starting at position 1840 of SEQ ID NO: 588940
ucuugaugucagcaugaug

SEQ ID NO: 900195 - RNA, 19 nt, Artificial Sequence
  Description of Artificial Sequence: Synthetic oligonucleotide
  Antisense strand to SEQ ID NO: 900194
caucaugcugacaucaaga

SEQ ID NO: 900196 - RNA, 19 nt, Artificial Sequence
  Description of Artificial Sequence: Synthetic oligonucleotide
  Sense strand starting at position 1847 of SEQ ID NO: 588940
gucagcaugaugugguaaa

SEQ ID NO: 900197 - RNA, 19 nt, Artificial Sequence
  Description of Artificial Sequence: Synthetic oligonucleotide
  Antisense strand to SEQ ID NO: 900196
uuuaccacaucaugcugac

SEQ ID NO: 900198 - RNA, 19 nt, Artificial Sequence
  Description of Artificial Sequence: Synthetic oligonucleotide
  Sense strand starting at position 1869 of SEQ ID NO: 588940
accaguaggucugaauuua

SEQ ID NO: 900199 - RNA, 19 nt, Artificial Sequence
  Description of Artificial Sequence: Synthetic oligonucleotide
  Antisense strand to SEQ ID NO: 900198
uaaauucagaccuacuggu

SEQ ID NO: 900200 - RNA, 19 nt, Artificial Sequence
  Description of Artificial Sequence: Synthetic oligonucleotide
  Sense strand starting at position 2010 of SEQ ID NO: 588940
gugagauaaugugugacaa

SEQ ID NO: 900201 - RNA, 19 nt, Artificial Sequence
  Description of Artificial Sequence: Synthetic oligonucleotide
  Antisense strand to SEQ ID NO: 900200
uugucacacauuaucucac

SEQ ID NO: 900202 - RNA, 19 nt, Artificial Sequence
  Description of Artificial Sequence: Synthetic oligonucleotide
  Sense strand starting at position 2011 of SEQ ID NO: 588940
ugagauaaugugugacaac

SEQ ID NO: 900203 - RNA, 19 nt, Artificial Sequence
  Description of Artificial Sequence: Synthetic oligonucleotide
  Antisense strand to SEQ ID NO: 900202
guugucacacauuaucuca

SEQ ID NO: 900204 - RNA, 19 nt, Artificial Sequence
  Description of Artificial Sequence: Synthetic oligonucleotide
  Sense strand starting at position 2054 of SEQ ID NO: 588940
gcaagugcucaaguagugu

SEQ ID NO: 900205 - RNA, 19 nt, Artificial Sequence
  Description of Artificial Sequence: Synthetic oligonucleotide
  Antisense strand to SEQ ID NO: 900204
acacuacuugagcacuugc

SEQ ID NO: 900206 - RNA, 19 nt, Artificial Sequence
  Description of Artificial Sequence: Synthetic oligonucleotide
  Sense strand starting at position 2060 of SEQ ID NO: 588940
gcucaaguaguguuuguuu

SEQ ID NO: 900207 - RNA, 19 nt, Artificial Sequence
  Description of Artificial Sequence: Synthetic oligonucleotide
  Antisense strand to SEQ ID NO: 900206
aaacaaacacuacuugagc

SEQ ID NO: 900208 - RNA, 19 nt, Artificial Sequence
  Description of Artificial Sequence: Synthetic oligonucleotide
  Sense strand starting at position 2188 of SEQ ID NO: 588940
uuaaccucuggugaugauu

SEQ ID NO: 900209 - RNA, 19 nt, Artificial Sequence
  Description of Artificial Sequence: Synthetic oligonucleotide
  Antisense strand to SEQ ID NO: 900208
aaucaucaccagagguuaa

SEQ ID NO: 900210 - RNA, 19 nt, Artificial Sequence
  Description of Artificial Sequence: Synthetic oligonucleotide
  Sense strand starting at position 2191 of SEQ ID NO: 588940
accucuggugaugauucua

SEQ ID NO: 900211 - RNA, 19 nt, Artificial Sequence
  Description of Artificial Sequence: Synthetic oligonucleotide
  Antisense strand to SEQ ID NO: 900210
uagaaucaucaccagaggu

SEQ ID NO: 900212 - RNA, 19 nt, Artificial Sequence
  Description of Artificial Sequence: Synthetic oligonucleotide
  Sense strand starting at position 2202 of SEQ ID NO: 588940
ugauucuauugggugaauu

SEQ ID NO: 900213 - RNA, 19 nt, Artificial Sequence
  Description of Artificial Sequence: Synthetic oligonucleotide
  Antisense strand to SEQ ID NO: 900212
aauucacccaauagaauca

SEQ ID NO: 900214 - RNA, 19 nt, Artificial Sequence
  Description of Artificial Sequence: Synthetic oligonucleotide
  Sense strand starting at position 2212 of SEQ ID NO: 588940
gggugaauuuaccagaacu

SEQ ID NO: 900215 - RNA, 19 nt, Artificial Sequence
  Description of Artificial Sequence: Synthetic oligonucleotide
  Antisense strand to SEQ ID NO: 900214
aguucugguaaauucaccc

SEQ ID NO: 900216 - RNA, 19 nt, Artificial Sequence
  Description of Artificial Sequence: Synthetic oligonucleotide
  Sense strand starting at position 2272 of SEQ ID NO: 588940
ggguguuugcaguugguuu

SEQ ID NO: 900217 - RNA, 19 nt, Artificial Sequence
  Description of Artificial Sequence: Synthetic oligonucleotide
  Antisense strand to SEQ ID NO: 900216
aaaccaacugcaaacaccc

SEQ ID NO: 900218 - RNA, 19 nt, Artificial Sequence
  Description of Artificial Sequence: Synthetic oligonucleotide
  Sense strand starting at position 2310 of SEQ ID NO: 588940
ugauaaacaucucugaguu

SEQ ID NO: 900219 - RNA, 19 nt, Artificial Sequence
  Description of Artificial Sequence: Synthetic oligonucleotide
  Antisense strand to SEQ ID NO: 900218
aacucagagauguuuauca

SEQ ID NO: 900220 - RNA, 19 nt, Artificial Sequence
  Description of Artificial Sequence: Synthetic oligonucleotide
  Sense strand starting at position 2467 of SEQ ID NO: 588940
ucaauucugcugggaugga

SEQ ID NO: 900221 - RNA, 19 nt, Artificial Sequence
  Description of Artificial Sequence: Synthetic oligonucleotide
  Antisense strand to SEQ ID NO: 900220
uccaucccagcagaauuga

SEQ ID NO: 900222 - RNA, 19 nt, Artificial Sequence
  Description of Artificial Sequence: Synthetic oligonucleotide
  Sense strand starting at position 2532 of SEQ ID NO: 588940
cucacaauuccaggguauu

SEQ ID NO: 900223 - RNA, 19 nt, Artificial Sequence
  Description of Artificial Sequence: Synthetic oligonucleotide
  Antisense strand to SEQ ID NO: 900222
aauacccuggaauugugag

SEQ ID NO: 900224 - RNA, 19 nt, Artificial Sequence
  Description of Artificial Sequence: Synthetic oligonucleotide
  Sense strand starting at position 2572 of SEQ ID NO: 588940
uuucucucccauugaugua

SEQ ID NO: 900225 - RNA, 19 nt, Artificial Sequence
  Description of Artificial Sequence: Synthetic oligonucleotide
  Antisense strand to SEQ ID NO: 900224
uacaucaaugggagagaaa

SEQ ID NO: 900226 - RNA, 19 nt, Artificial Sequence
  Description of Artificial Sequence: Synthetic oligonucleotide
  Sense strand starting at position 2623 of SEQ ID NO: 588940
caaggaugacuccgacaug

SEQ ID NO: 900227 - RNA, 19 nt, Artificial Sequence
  Description of Artificial Sequence: Synthetic oligonucleotide
  Antisense strand to SEQ ID NO: 900226
caugucggagucauccuug

SEQ ID NO: 900228 - RNA, 19 nt, Artificial Sequence
  Description of Artificial Sequence: Synthetic oligonucleotide
  Sense strand starting at position 2634 of SEQ ID NO: 588940
ccgacauggccagguugau

SEQ ID NO: 900229 - RNA, 19 nt, Artificial Sequence
  Description of Artificial Sequence: Synthetic oligonucleotide
  Antisense strand to SEQ ID NO: 900228
aucaaccuggccaugucgg

SEQ ID NO: 900230 - RNA, 19 nt, Artificial Sequence
  Description of Artificial Sequence: Synthetic oligonucleotide
  Sense strand starting at position 2643 of SEQ ID NO: 588940
ccagguugauuuggaaaug

SEQ ID NO: 900231 - RNA, 19 nt, Artificial Sequence
  Description of Artificial Sequence: Synthetic oligonucleotide
  Antisense strand to SEQ ID NO: 900230
cauuuccaaaucaaccugg

SEQ ID NO: 900232 - RNA, 19 nt, Artificial Sequence
  Description of Artificial Sequence: Synthetic oligonucleotide
  Sense strand starting at position 2713 of SEQ ID NO: 588940
ccagauugauuuggaaaug

SEQ ID NO: 900233 - RNA, 19 nt, Artificial Sequence
  Description of Artificial Sequence: Synthetic oligonucleotide
  Antisense strand to SEQ ID NO: 900232
cauuuccaaaucaaucugg

SEQ ID NO: 900234 - RNA, 19 nt, Artificial Sequence
  Description of Artificial Sequence: Synthetic oligonucleotide
  Sense strand starting at position 3180 of SEQ ID NO: 588940
ccaagaugaucuccaaggu

SEQ ID NO: 900235 - RNA, 19 nt, Artificial Sequence
  Description of Artificial Sequence: Synthetic oligonucleotide
  Antisense strand to SEQ ID NO: 900234
accuuggagaucaucuugg

SEQ ID NO: 900236 - RNA, 19 nt, Artificial Sequence
  Description of Artificial Sequence: Synthetic oligonucleotide
  Sense strand starting at position 3303 of SEQ ID NO: 588940
cccuguugacuuuaucaca

SEQ ID NO: 900237 - RNA, 19 nt, Artificial Sequence
  Description of Artificial Sequence: Synthetic oligonucleotide
  Antisense strand to SEQ ID NO: 900236
ugugauaaagucaacaggg

SEQ ID NO: 900238 - RNA, 19 nt, Artificial Sequence
  Description of Artificial Sequence: Synthetic oligonucleotide
  Sense strand starting at position 3661 of SEQ ID NO: 588940
accagucucccaugagcau

SEQ ID NO: 900239 - RNA, 19 nt, Artificial Sequence
  Description of Artificial Sequence: Synthetic oligonucleotide
  Antisense strand to SEQ ID NO: 900238
augcucaugggagacuggu

SEQ ID NO: 900240 - RNA, 19 nt, Artificial Sequence
  Description of Artificial Sequence: Synthetic oligonucleotide
  Sense strand starting at position 3721 of SEQ ID NO: 588940
acacuuuacugucuggaga

SEQ ID NO: 900241 - RNA, 19 nt, Artificial Sequence
  Description of Artificial Sequence: Synthetic oligonucleotide
  Antisense strand to SEQ ID NO: 900240
ucuccagacaguaaagugu

SEQ ID NO: 900242 - RNA, 19 nt, Artificial Sequence
  Description of Artificial Sequence: Synthetic oligonucleotide
  Sense strand starting at position 3722 of SEQ ID NO: 588940
cacuuuacugucuggagau

SEQ ID NO: 900243 - RNA, 19 nt, Artificial Sequence
  Description of Artificial Sequence: Synthetic oligonucleotide
  Antisense strand to SEQ ID NO: 900242
aucuccagacaguaaagug

SEQ ID NO: 900244 - RNA, 19 nt, Artificial Sequence
  Description of Artificial Sequence: Synthetic oligonucleotide
  Sense strand starting at position 3724 of SEQ ID NO: 588940
cuuuacugucuggagauau

SEQ ID NO: 900245 - RNA, 19 nt, Artificial Sequence
  Description of Artificial Sequence: Synthetic oligonucleotide
  Antisense strand to SEQ ID NO: 900244
auaucuccagacaguaaag

SEQ ID NO: 900246 - RNA, 19 nt, Artificial Sequence
  Description of Artificial Sequence: Synthetic oligonucleotide
  Sense strand starting at position 3928 of SEQ ID NO: 588940
caguauaaggcagauguga

SEQ ID NO: 900247 - RNA, 19 nt, Artificial Sequence
  Description of Artificial Sequence: Synthetic oligonucleotide
  Antisense strand to SEQ ID NO: 900246
ucacaucugccuuauacug

SEQ ID NO: 900248 - RNA, 19 nt, Artificial Sequence
  Description of Artificial Sequence: Synthetic oligonucleotide
  Sense strand starting at position 44 of SEQ ID NO: 588941
aguauccagcuagauuaua

SEQ ID NO: 900249 - RNA, 19 nt, Artificial Sequence
  Description of Artificial Sequence: Synthetic oligonucleotide
  Antisense strand to SEQ ID NO: 900248
uauaaucuagcuggauacu

SEQ ID NO: 900250 - RNA, 19 nt, Artificial Sequence
  Description of Artificial Sequence: Synthetic oligonucleotide
  Sense strand starting at position 85 of SEQ ID NO: 588941
ggguucugcaaggaguuua

SEQ ID NO: 900251 - RNA, 19 nt, Artificial Sequence
  Description of Artificial Sequence: Synthetic oligonucleotide
  Antisense strand to SEQ ID NO: 900250
uaaacuccuugcagaaccc

SEQ ID NO: 900252 - RNA, 19 nt, Artificial Sequence
  Description of Artificial Sequence: Synthetic oligonucleotide
  Sense strand starting at position 307 of SEQ ID NO: 588941
aggagaugugagugcuaau

SEQ ID NO: 900253 - RNA, 19 nt, Artificial Sequence
  Description of Artificial Sequence: Synthetic oligonucleotide
  Antisense strand to SEQ ID NO: 900252
auuagcacucacaucuccu

SEQ ID NO: 900254 - RNA, 19 nt, Artificial Sequence
  Description of Artificial Sequence: Synthetic oligonucleotide
  Sense strand starting at position 374 of SEQ ID NO: 588941
cguaacugaugcucaauga

SEQ ID NO: 900255 - RNA, 19 nt, Artificial Sequence
  Description of Artificial Sequence: Synthetic oligonucleotide
  Antisense strand to SEQ ID NO: 900254
ucauugagcaucaguuacg

SEQ ID NO: 900256 - RNA, 19 nt, Artificial Sequence
  Description of Artificial Sequence: Synthetic oligonucleotide
  Sense strand starting at position 375 of SEQ ID NO: 588941
guaacugaugcucaaugaa

SEQ ID NO: 900257 - RNA, 19 nt, Artificial Sequence
  Description of Artificial Sequence: Synthetic oligonucleotide
  Antisense strand to SEQ ID NO: 900256
uucauugagcaucaguuac

SEQ ID NO: 900258 - RNA, 19 nt, Artificial Sequence
  Description of Artificial Sequence: Synthetic oligonucleotide
  Sense strand starting at position 378 of SEQ ID NO: 588941
acugaugcucaaugaaugu

SEQ ID NO: 900259 - RNA, 19 nt, Artificial Sequence
  Description of Artificial Sequence: Synthetic oligonucleotide
  Antisense strand to SEQ ID NO: 900258
acauucauugagcaucagu

SEQ ID NO: 900260 - RNA, 19 nt, Artificial Sequence
  Description of Artificial Sequence: Synthetic oligonucleotide
  Sense strand starting at position 387 of SEQ ID NO: 588941
caaugaaugucagcugaga

SEQ ID NO: 900261 - RNA, 19 nt, Artificial Sequence
  Description of Artificial Sequence: Synthetic oligonucleotide
  Antisense strand to SEQ ID NO: 900260
ucucagcugacauucauug

SEQ ID NO: 900262 - RNA, 19 nt, Artificial Sequence
  Description of Artificial Sequence: Synthetic oligonucleotide
  Sense strand starting at position 534 of SEQ ID NO: 588941
agugaauacugcuuggcaa

SEQ ID NO: 900263 - RNA, 19 nt, Artificial Sequence
  Description of Artificial Sequence: Synthetic oligonucleotide
  Antisense strand to SEQ ID NO: 900262
uugccaagcaguauucacu

SEQ ID NO: 900264 - RNA, 19 nt, Artificial Sequence
  Description of Artificial Sequence: Synthetic oligonucleotide
  Sense strand starting at position 536 of SEQ ID NO: 588941
ugaauacugcuuggcaauu

SEQ ID NO: 900265 - RNA, 19 nt, Artificial Sequence
  Description of Artificial Sequence: Synthetic oligonucleotide
  Antisense strand to SEQ ID NO: 900264
aauugccaagcaguauuca

SEQ ID NO: 900266 - RNA, 19 nt, Artificial Sequence
  Description of Artificial Sequence: Synthetic oligonucleotide
  Sense strand starting at position 566 of SEQ ID NO: 588941
aaggauauacagugguuau

SEQ ID NO: 900267 - RNA, 19 nt, Artificial Sequence
  Description of Artificial Sequence: Synthetic oligonucleotide
  Antisense strand to SEQ ID NO: 900266
auaaccacuguauauccuu

SEQ ID NO: 900268 - RNA, 19 nt, Artificial Sequence
  Description of Artificial Sequence: Synthetic oligonucleotide
  Sense strand starting at position 567 of SEQ ID NO: 588941
aggauauacagugguuauc

SEQ ID NO: 900269 - RNA, 19 nt, Artificial Sequence
  Description of Artificial Sequence: Synthetic oligonucleotide
  Antisense strand to SEQ ID NO: 900268
gauaaccacuguauauccu

SEQ ID NO: 900270 - RNA, 19 nt, Artificial Sequence
  Description of Artificial Sequence: Synthetic oligonucleotide
  Sense strand starting at position 569 of SEQ ID NO: 588941
gauauacagugguuaucuu

SEQ ID NO: 900271 - RNA, 19 nt, Artificial Sequence
  Description of Artificial Sequence: Synthetic oligonucleotide
  Antisense strand to SEQ ID NO: 900270
aagauaaccacuguauauc

SEQ ID NO: 900272 - RNA, 19 nt, Artificial Sequence
  Description of Artificial Sequence: Synthetic oligonucleotide
  Sense strand starting at position 573 of SEQ ID NO: 588941
uacagugguuaucuuggaa

SEQ ID NO: 900273 - RNA, 19 nt, Artificial Sequence
  Description of Artificial Sequence: Synthetic oligonucleotide
  Antisense strand to SEQ ID NO: 900272
uuccaagauaaccacugua

SEQ ID NO: 900274 - RNA, 19 nt, Artificial Sequence
  Description of Artificial Sequence: Synthetic oligonucleotide
  Sense strand starting at position 706 of SEQ ID NO: 588941
aauccaggucugcaaaguu

SEQ ID NO: 900275 - RNA, 19 nt, Artificial Sequence
  Description of Artificial Sequence: Synthetic oligonucleotide
  Antisense strand to SEQ ID NO: 900274
aacuuugcagaccuggauu

SEQ ID NO: 900276 - RNA, 19 nt, Artificial Sequence
  Description of Artificial Sequence: Synthetic oligonucleotide
  Sense strand starting at position 821 of SEQ ID NO: 588941
uugccuaucucucuagaga

SEQ ID NO: 900277 - RNA, 19 nt, Artificial Sequence
  Description of Artificial Sequence: Synthetic oligonucleotide
  Antisense strand to SEQ ID NO: 900276
ucucuagagagauaggcaa

SEQ ID NO: 900278 - RNA, 19 nt, Artificial Sequence
  Description of Artificial Sequence: Synthetic oligonucleotide
  Sense strand starting at position 822 of SEQ ID NO: 588941
ugccuaucucucuagagag

SEQ ID NO: 900279 - RNA, 19 nt, Artificial Sequence
  Description of Artificial Sequence: Synthetic oligonucleotide
  Antisense strand to SEQ ID NO: 900278
cucucuagagagauaggca

SEQ ID NO: 900280 - RNA, 19 nt, Artificial Sequence
  Description of Artificial Sequence: Synthetic oligonucleotide
  Sense strand starting at position 902 of SEQ ID NO: 588941
guuaaugaacuagaucugu

SEQ ID NO: 900281 - RNA, 19 nt, Artificial Sequence
  Description of Artificial Sequence: Synthetic oligonucleotide
  Antisense strand to SEQ ID NO: 900280
acagaucuaguucauuaac

SEQ ID NO: 900282 - RNA, 19 nt, Artificial Sequence
  Description of Artificial Sequence: Synthetic oligonucleotide
  Sense strand starting at position 906 of SEQ ID NO: 588941
augaacuagaucugugguu

SEQ ID NO: 900283 - RNA, 19 nt, Artificial Sequence
  Description of Artificial Sequence: Synthetic oligonucleotide
  Antisense strand to SEQ ID NO: 900282
aaccacagaucuaguucau

SEQ ID NO: 900284 - RNA, 19 nt, Artificial Sequence
  Description of Artificial Sequence: Synthetic oligonucleotide
  Sense strand starting at position 960 of SEQ ID NO: 588941
gaauucuucugggccagga

SEQ ID NO: 900285 - RNA, 19 nt, Artificial Sequence
  Description of Artificial Sequence: Synthetic oligonucleotide
  Antisense strand to SEQ ID NO: 900284
uccuggcccagaagaauuc

SEQ ID NO: 900286 - RNA, 19 nt, Artificial Sequence
  Description of Artificial Sequence: Synthetic oligonucleotide
  Sense strand starting at position 1016 of SEQ ID NO: 588941
gaaauuauuugagaauggu

SEQ ID NO: 900287 - RNA, 19 nt, Artificial Sequence
  Description of Artificial Sequence: Synthetic oligonucleotide
  Antisense strand to SEQ ID NO: 900286
accauucucaaauaauuuc

SEQ ID NO: 900288 - RNA, 19 nt, Artificial Sequence
  Description of Artificial Sequence: Synthetic oligonucleotide
  Sense strand starting at position 1022 of SEQ ID NO: 588941
auuugagaaugguaccuuu

SEQ ID NO: 900289 - RNA, 19 nt, Artificial Sequence
  Description of Artificial Sequence: Synthetic oligonucleotide
  Antisense strand to SEQ ID NO: 900288
aaagguaccauucucaaau

SEQ ID NO: 900290 - RNA, 19 nt, Artificial Sequence
  Description of Artificial Sequence: Synthetic oligonucleotide
  Sense strand starting at position 1030 of SEQ ID NO: 588941
augguaccuuuagcuauua

SEQ ID NO: 900291 - RNA, 19 nt, Artificial Sequence
  Description of Artificial Sequence: Synthetic oligonucleotide
  Antisense strand to SEQ ID NO: 900290
uaauagcuaaagguaccau

SEQ ID NO: 900292 - RNA, 19 nt, Artificial Sequence
  Description of Artificial Sequence: Synthetic oligonucleotide
  Sense strand starting at position 1031 of SEQ ID NO: 588941
ugguaccuuuagcuauuaa

SEQ ID NO: 900293 - RNA, 19 nt, Artificial Sequence
  Description of Artificial Sequence: Synthetic oligonucleotide
  Antisense strand to SEQ ID NO: 900292
uuaauagcuaaagguacca

SEQ ID NO: 900294 - RNA, 19 nt, Artificial Sequence
  Description of Artificial Sequence: Synthetic oligonucleotide
  Sense strand starting at position 1150 of SEQ ID NO: 588941
gcuacugaaaguugagaga

SEQ ID NO: 900295 - RNA, 19 nt, Artificial Sequence
  Description of Artificial Sequence: Synthetic oligonucleotide
  Antisense strand to SEQ ID NO: 900294
ucucucaacuuucaguagc

SEQ ID NO: 900296 - RNA, 19 nt, Artificial Sequence
  Description of Artificial Sequence: Synthetic oligonucleotide
  Sense strand starting at position 1165 of SEQ ID NO: 588941
gagacaacuuacucacgga

SEQ ID NO: 900297 - RNA, 19 nt, Artificial Sequence
  Description of Artificial Sequence: Synthetic oligonucleotide
  Antisense strand to SEQ ID NO: 900296
uccgugaguaaguugucuc

SEQ ID NO: 900298 - RNA, 19 nt, Artificial Sequence
  Description of Artificial Sequence: Synthetic oligonucleotide
  Sense strand starting at position 1719 of SEQ ID NO: 588941
ccgaaaucucguccgacgu

SEQ ID NO: 900299 - RNA, 19 nt, Artificial Sequence
  Description of Artificial Sequence: Synthetic oligonucleotide
  Antisense strand to SEQ ID NO: 900298
acgucggacgagauuucgg

SEQ ID NO: 900300 - RNA, 19 nt, Artificial Sequence
  Description of Artificial Sequence: Synthetic oligonucleotide
  Sense strand starting at position 2500 of SEQ ID NO: 588941
aaauuaaagcucugugagc

SEQ ID NO: 900301 - RNA, 19 nt, Artificial Sequence
  Description of Artificial Sequence: Synthetic oligonucleotide
  Antisense strand to SEQ ID NO: 900300
gcucacagagcuuuaauuu

SEQ ID NO: 900302 - RNA, 19 nt, Artificial Sequence
  Description of Artificial Sequence: Synthetic oligonucleotide
  Sense strand starting at position 2501 of SEQ ID NO: 588941
aauuaaagcucugugagca

SEQ ID NO: 900303 - RNA, 19 nt, Artificial Sequence
  Description of Artificial Sequence: Synthetic oligonucleotide
  Antisense strand to SEQ ID NO: 900302
ugcucacagagcuuuaauu

SEQ ID NO: 900304 - RNA, 19 nt, Artificial Sequence
  Description of Artificial Sequence: Synthetic oligonucleotide
  Sense strand starting at position 2560 of SEQ ID NO: 588941
uaggauagugccuagcaca

SEQ ID NO: 900305 - RNA, 19 nt, Artificial Sequence
  Description of Artificial Sequence: Synthetic oligonucleotide
  Antisense strand to SEQ ID NO: 900304
ugugcuaggcacuauccua

SEQ ID NO: 900306 - RNA, 19 nt, Artificial Sequence
  Description of Artificial Sequence: Synthetic oligonucleotide
  Sense strand starting at position 2574 of SEQ ID NO: 588941
gcacacgaucagcaauaaa

SEQ ID NO: 900307 - RNA, 19 nt, Artificial Sequence
  Description of Artificial Sequence: Synthetic oligonucleotide
  Antisense strand to SEQ ID NO: 900306
uuuauugcugaucgugugc

SEQ ID NO: 900308 - RNA, 19 nt, Artificial Sequence
  Description of Artificial Sequence: Synthetic oligonucleotide
  Sense strand starting at position 2795 of SEQ ID NO: 588941
gacugccauguauaagaca

SEQ ID NO: 900309 - RNA, 19 nt, Artificial Sequence
  Description of Artificial Sequence: Synthetic oligonucleotide
  Antisense strand to SEQ ID NO: 900308
ugucuuauacauggcaguc

SEQ ID NO: 900310 - RNA, 19 nt, Artificial Sequence
  Description of Artificial Sequence: Synthetic oligonucleotide
  Sense strand starting at position 3098 of SEQ ID NO: 588941
gugagaccaucacugcaau

SEQ ID NO: 900311 - RNA, 19 nt, Artificial Sequence
  Description of Artificial Sequence: Synthetic oligonucleotide
  Antisense strand to SEQ ID NO: 900310
auugcagugauggucucac

SEQ ID NO: 900312 - RNA, 19 nt, Artificial Sequence
  Description of Artificial Sequence: Synthetic oligonucleotide
  Sense strand starting at position 3278 of SEQ ID NO: 588941
uauggaaucguauguacua

SEQ ID NO: 900313 - RNA, 19 nt, Artificial Sequence
  Description of Artificial Sequence: Synthetic oligonucleotide
  Antisense strand to SEQ ID NO: 900312
uaguacauacgauuccaua

SEQ ID NO: 900314 - RNA, 19 nt, Artificial Sequence
  Description of Artificial Sequence: Synthetic oligonucleotide
  Sense strand starting at position 3279 of SEQ ID NO: 588941
auggaaucguauguacuau

SEQ ID NO: 900315 - RNA, 19 nt, Artificial Sequence
  Description of Artificial Sequence: Synthetic oligonucleotide
  Antisense strand to SEQ ID NO: 900314
auaguacauacgauuccau

SEQ ID NO: 900316 - RNA, 19 nt, Artificial Sequence
  Description of Artificial Sequence: Synthetic oligonucleotide
  Sense strand starting at position 3542 of SEQ ID NO: 588941
auacaaacauccgucagaa

SEQ ID NO: 900317 - RNA, 19 nt, Artificial Sequence
  Description of Artificial Sequence: Synthetic oligonucleotide
  Antisense strand to SEQ ID NO: 900316
uucugacggauguuuguau

SEQ ID NO: 900318 - RNA, 19 nt, Artificial Sequence
  Description of Artificial Sequence: Synthetic oligonucleotide
  Sense strand starting at position 3814 of SEQ ID NO: 588941
uagaucuggucccugacua

SEQ ID NO: 900319 - RNA, 19 nt, Artificial Sequence
  Description of Artificial Sequence: Synthetic oligonucleotide
  Antisense strand to SEQ ID NO: 900318
uagucagggaccagaucua

SEQ ID NO: 900320 - RNA, 19 nt, Artificial Sequence
  Description of Artificial Sequence: Synthetic oligonucleotide
  Sense strand starting at position 3815 of SEQ ID NO: 588941
agaucuggucccugacuaa

SEQ ID NO: 900321 - RNA, 19 nt, Artificial Sequence
  Description of Artificial Sequence: Synthetic oligonucleotide
  Antisense strand to SEQ ID NO: 900320
uuagucagggaccagaucu

SEQ ID NO: 900322 - RNA, 19 nt, Artificial Sequence
  Description of Artificial Sequence: Synthetic oligonucleotide
  Sense strand starting at position 3826 of SEQ ID NO: 588941
cugacuaaguuugccuaaa

SEQ ID NO: 900323 - RNA, 19 nt, Artificial Sequence
  Description of Artificial Sequence: Synthetic oligonucleotide
  Antisense strand to SEQ ID NO: 900322
uuuaggcaaacuuagucag

SEQ ID NO: 900324 - RNA, 19 nt, Artificial Sequence
  Description of Artificial Sequence: Synthetic oligonucleotide
  Sense strand starting at position 3827 of SEQ ID NO: 588941
ugacuaaguuugccuaaau

SEQ ID NO: 900325 - RNA, 19 nt, Artificial Sequence
  Description of Artificial Sequence: Synthetic oligonucleotide
  Antisense strand to SEQ ID NO: 900324
auuuaggcaaacuuaguca

SEQ ID NO: 900326 - RNA, 19 nt, Artificial Sequence
  Description of Artificial Sequence: Synthetic oligonucleotide
  Sense strand starting at position 3828 of SEQ ID NO: 588941
gacuaaguuugccuaaaug

SEQ ID NO: 900327 - RNA, 19 nt, Artificial Sequence
  Description of Artificial Sequence: Synthetic oligonucleotide
  Antisense strand to SEQ ID NO: 900326
cauuuaggcaaacuuaguc

SEQ ID NO: 900328 - RNA, 19 nt, Artificial Sequence
  Description of Artificial Sequence: Synthetic oligonucleotide
  Sense strand starting at position 36 of SEQ ID NO: 588942
ugcaaagugcuauaacaca

SEQ ID NO: 900329 - RNA, 19 nt, Artificial Sequence
  Description of Artificial Sequence: Synthetic oligonucleotide
  Antisense strand to SEQ ID NO: 900328
uguguuauagcacuuugca

SEQ ID NO: 900330 - RNA, 19 nt, Artificial Sequence
  Description of Artificial Sequence: Synthetic oligonucleotide
  Sense strand starting at position 151 of SEQ ID NO: 588942
acuauaaucccugguauag

SEQ ID NO: 900331 - RNA, 19 nt, Artificial Sequence
  Description of Artificial Sequence: Synthetic oligonucleotide
  Antisense strand to SEQ ID NO: 900330
cuauaccagggauuauagu

SEQ ID NO: 900332 - RNA, 19 nt, Artificial Sequence
  Description of Artificial Sequence: Synthetic oligonucleotide
  Sense strand starting at position 167 of SEQ ID NO: 588942
uagaguaaguuccagauuu

SEQ ID NO: 900333 - RNA, 19 nt, Artificial Sequence
  Description of Artificial Sequence: Synthetic oligonucleotide
  Antisense strand to SEQ ID NO: 900332
aaaucuggaacuuacucua

SEQ ID NO: 900334 - RNA, 19 nt, Artificial Sequence
  Description of Artificial Sequence: Synthetic oligonucleotide
  Sense strand starting at position 380 of SEQ ID NO: 588942
aaauauugguuguugagag

SEQ ID NO: 900335 - RNA, 19 nt, Artificial Sequence
  Description of Artificial Sequence: Synthetic oligonucleotide
  Antisense strand to SEQ ID NO: 900334
cucucaacaaccaauauuu

SEQ ID NO: 900336 - RNA, 19 nt, Artificial Sequence
  Description of Artificial Sequence: Synthetic oligonucleotide
  Sense strand starting at position 488 of SEQ ID NO: 588942
gcagauacuuauguauacu

SEQ ID NO: 900337 - RNA, 19 nt, Artificial Sequence
  Description of Artificial Sequence: Synthetic oligonucleotide
  Antisense strand to SEQ ID NO: 900336
aguauacauaaguaucugc

SEQ ID NO: 900338 - RNA, 19 nt, Artificial Sequence
  Description of Artificial Sequence: Synthetic oligonucleotide
  Sense strand starting at position 491 of SEQ ID NO: 588942
gauacuuauguauacucga

SEQ ID NO: 900339 - RNA, 19 nt, Artificial Sequence
  Description of Artificial Sequence: Synthetic oligonucleotide
  Antisense strand to SEQ ID NO: 900338
ucgaguauacauaaguauc

SEQ ID NO: 900340 - RNA, 19 nt, Artificial Sequence
  Description of Artificial Sequence: Synthetic oligonucleotide
  Sense strand starting at position 494 of SEQ ID NO: 588942
acuuauguauacucgaauc

SEQ ID NO: 900341 - RNA, 19 nt, Artificial Sequence
  Description of Artificial Sequence: Synthetic oligonucleotide
  Antisense strand to SEQ ID NO: 900340
gauucgaguauacauaagu

SEQ ID NO: 900342 - RNA, 19 nt, Artificial Sequence
  Description of Artificial Sequence: Synthetic oligonucleotide
  Sense strand starting at position 496 of SEQ ID NO: 588942
uuauguauacucgaaucaa

SEQ ID NO: 900343 - RNA, 19 nt, Artificial Sequence
  Description of Artificial Sequence: Synthetic oligonucleotide
  Antisense strand to SEQ ID NO: 900342
uugauucgaguauacauaa

SEQ ID NO: 900344 - RNA, 19 nt, Artificial Sequence
  Description of Artificial Sequence: Synthetic oligonucleotide
  Sense strand starting at position 528 of SEQ ID NO: 588942
gcccuauauccaugaaguu

SEQ ID NO: 900345 - RNA, 19 nt, Artificial Sequence
  Description of Artificial Sequence: Synthetic oligonucleotide
  Antisense strand to SEQ ID NO: 900344
aacuucauggauauagggc

SEQ ID NO: 900346 - RNA, 19 nt, Artificial Sequence
  Description of Artificial Sequence: Synthetic oligonucleotide
  Sense strand starting at position 537 of SEQ ID NO: 588942
ccaugaaguuuagugaauu

SEQ ID NO: 900347 - RNA, 19 nt, Artificial Sequence
  Description of Artificial Sequence: Synthetic oligonucleotide
  Antisense strand to SEQ ID NO: 900346
aauucacuaaacuucaugg

SEQ ID NO: 900348 - RNA, 19 nt, Artificial Sequence
  Description of Artificial Sequence: Synthetic oligonucleotide
  Sense strand starting at position 649 of SEQ ID NO: 588942
guauuugugauauguaguu

SEQ ID NO: 900349 - RNA, 19 nt, Artificial Sequence
  Description of Artificial Sequence: Synthetic oligonucleotide
  Antisense strand to SEQ ID NO: 900348
aacuacauaucacaaauac

SEQ ID NO: 900350 - RNA, 19 nt, Artificial Sequence
  Description of Artificial Sequence: Synthetic oligonucleotide
  Sense strand starting at position 735 of SEQ ID NO: 588942
uggaguaucuaagcaauaa

SEQ ID NO: 900351 - RNA, 19 nt, Artificial Sequence
  Description of Artificial Sequence: Synthetic oligonucleotide
  Antisense strand to SEQ ID NO: 900350
uuauugcuuagauacucca

SEQ ID NO: 900352 - RNA, 19 nt, Artificial Sequence
  Description of Artificial Sequence: Synthetic oligonucleotide
  Sense strand starting at position 810 of SEQ ID NO: 588942
auacucuccuguguuaaag

SEQ ID NO: 900353 - RNA, 19 nt, Artificial Sequence
  Description of Artificial Sequence: Synthetic oligonucleotide
  Antisense strand to SEQ ID NO: 900352
cuuuaacacaggagaguau

SEQ ID NO: 900354 - RNA, 19 nt, Artificial Sequence
  Description of Artificial Sequence: Synthetic oligonucleotide
  Sense strand starting at position 831 of SEQ ID NO: 588942
uuugguaacugccuaaauu

SEQ ID NO: 900355 - RNA, 19 nt, Artificial Sequence
  Description of Artificial Sequence: Synthetic oligonucleotide
  Antisense strand to SEQ ID NO: 900354
aauuuaggcaguuaccaaa

SEQ ID NO: 900356 - RNA, 19 nt, Artificial Sequence
  Description of Artificial Sequence: Synthetic oligonucleotide
  Sense strand starting at position 1245 of SEQ ID NO: 588942
uuuaaucgguccucaaaga

SEQ ID NO: 900357 - RNA, 19 nt, Artificial Sequence
  Description of Artificial Sequence: Synthetic oligonucleotide
  Antisense strand to SEQ ID NO: 900356
ucuuugaggaccgauuaaa

SEQ ID NO: 900358 - RNA, 19 nt, Artificial Sequence
  Description of Artificial Sequence: Synthetic oligonucleotide
  Sense strand starting at position 2148 of SEQ ID NO: 588942
caugguuugaauugggaga

SEQ ID NO: 900359 - RNA, 19 nt, Artificial Sequence
  Description of Artificial Sequence: Synthetic oligonucleotide
  Antisense strand to SEQ ID NO: 900358
ucucccaauucaaaccaug

SEQ ID NO: 900360 - RNA, 19 nt, Artificial Sequence
  Description of Artificial Sequence: Synthetic oligonucleotide
  Sense strand starting at position 2164 of SEQ ID NO: 588942
agaagaagguuuccgugau

SEQ ID NO: 900361 - RNA, 19 nt, Artificial Sequence
  Description of Artificial Sequence: Synthetic oligonucleotide
  Antisense strand to SEQ ID NO: 900360
aucacggaaaccuucuucu

SEQ ID NO: 900362 - RNA, 19 nt, Artificial Sequence
  Description of Artificial Sequence: Synthetic oligonucleotide
  Sense strand starting at position 2168 of SEQ ID NO: 588942
gaagguuuccgugaugaga

SEQ ID NO: 900363 - RNA, 19 nt, Artificial Sequence
  Description of Artificial Sequence: Synthetic oligonucleotide
  Antisense strand to SEQ ID NO: 900362
ucucaucacggaaaccuuc

SEQ ID NO: 900364 - RNA, 19 nt, Artificial Sequence
  Description of Artificial Sequence: Synthetic oligonucleotide
  Sense strand starting at position 2228 of SEQ ID NO: 588942
gaggucaaugcucaaugua

SEQ ID NO: 900365 - RNA, 19 nt, Artificial Sequence
  Description of Artificial Sequence: Synthetic oligonucleotide
  Antisense strand to SEQ ID NO: 900364
uacauugagcauugaccuc

SEQ ID NO: 900366 - RNA, 19 nt, Artificial Sequence
  Description of Artificial Sequence: Synthetic oligonucleotide
  Sense strand starting at position 2310 of SEQ ID NO: 588942
uggccauuagcccaaagau

SEQ ID NO: 900367 - RNA, 19 nt, Artificial Sequence
  Description of Artificial Sequence: Synthetic oligonucleotide
  Antisense strand to SEQ ID NO: 900366
aucuuugggcuaauggcca

SEQ ID NO: 900368 - RNA, 19 nt, Artificial Sequence
  Description of Artificial Sequence: Synthetic oligonucleotide
  Sense strand starting at position 2390 of SEQ ID NO: 588942
ucuugaagaaguuggcaua

SEQ ID NO: 900369 - RNA, 19 nt, Artificial Sequence
  Description of Artificial Sequence: Synthetic oligonucleotide
  Antisense strand to SEQ ID NO: 900368
uaugccaacuucuucaaga

SEQ ID NO: 900370 - RNA, 19 nt, Artificial Sequence
  Description of Artificial Sequence: Synthetic oligonucleotide
  Sense strand starting at position 2433 of SEQ ID NO: 588942
uuugguagucauugagcaa

SEQ ID NO: 900371 - RNA, 19 nt, Artificial Sequence
  Description of Artificial Sequence: Synthetic oligonucleotide
  Antisense strand to SEQ ID NO: 900370
uugcucaaugacuaccaaa

SEQ ID NO: 900372 - RNA, 19 nt, Artificial Sequence
  Description of Artificial Sequence: Synthetic oligonucleotide
  Sense strand starting at position 2437 of SEQ ID NO: 588942
guagucauugagcaauggu

SEQ ID NO: 900373 - RNA, 19 nt, Artificial Sequence
  Description of Artificial Sequence: Synthetic oligonucleotide
  Antisense strand to SEQ ID NO: 900372
accauugcucaaugacuac

SEQ ID NO: 900374 - RNA, 19 nt, Artificial Sequence
  Description of Artificial Sequence: Synthetic oligonucleotide
  Sense strand starting at position 2682 of SEQ ID NO: 588942
acacuuugcucaucaucga

SEQ ID NO: 900375 - RNA, 19 nt, Artificial Sequence
  Description of Artificial Sequence: Synthetic oligonucleotide
  Antisense strand to SEQ ID NO: 900374
ucgaugaugagcaaagugu

SEQ ID NO: 900376 - RNA, 19 nt, Artificial Sequence
  Description of Artificial Sequence: Synthetic oligonucleotide
  Sense strand starting at position 2764 of SEQ ID NO: 588942
gcagcuagucuugacuaau

SEQ ID NO: 900377 - RNA, 19 nt, Artificial Sequence
  Description of Artificial Sequence: Synthetic oligonucleotide
  Antisense strand to SEQ ID NO: 900376
auuagucaagacuagcugc

SEQ ID NO: 900378 - RNA, 19 nt, Artificial Sequence
  Description of Artificial Sequence: Synthetic oligonucleotide
  Sense strand starting at position 2797 of SEQ ID NO: 588942
uuaucacaucgaugaugau

SEQ ID NO: 900379 - RNA, 19 nt, Artificial Sequence
  Description of Artificial Sequence: Synthetic oligonucleotide
  Antisense strand to SEQ ID NO: 900378
aucaucaucgaugugauaa

SEQ ID NO: 900380 - RNA, 19 nt, Artificial Sequence
  Description of Artificial Sequence: Synthetic oligonucleotide
  Sense strand starting at position 2803 of SEQ ID NO: 588942
caucgaugaugaucuuaag

SEQ ID NO: 900381 - RNA, 19 nt, Artificial Sequence
  Description of Artificial Sequence: Synthetic oligonucleotide
  Antisense strand to SEQ ID NO: 900380
cuuaagaucaucaucgaug

SEQ ID NO: 900382 - RNA, 19 nt, Artificial Sequence
  Description of Artificial Sequence: Synthetic oligonucleotide
  Sense strand starting at position 2823 of SEQ ID NO: 588942
accaauuaauguuuccagu

SEQ ID NO: 900383 - RNA, 19 nt, Artificial Sequence
  Description of Artificial Sequence: Synthetic oligonucleotide
  Antisense strand to SEQ ID NO: 900382
acuggaaacauuaauuggu

SEQ ID NO: 900384 - RNA, 19 nt, Artificial Sequence
  Description of Artificial Sequence: Synthetic oligonucleotide
  Sense strand starting at position 2861 of SEQ ID NO: 588942
cagguucugucugcaaaca

SEQ ID NO: 900385 - RNA, 19 nt, Artificial Sequence
  Description of Artificial Sequence: Synthetic oligonucleotide
  Antisense strand to SEQ ID NO: 900384
uguuugcagacagaaccug

SEQ ID NO: 900386 - RNA, 19 nt, Artificial Sequence
  Description of Artificial Sequence: Synthetic oligonucleotide
  Sense strand starting at position 2905 of SEQ ID NO: 588942
ccacauguguagcugagaa

SEQ ID NO: 900387 - RNA, 19 nt, Artificial Sequence
  Description of Artificial Sequence: Synthetic oligonucleotide
  Antisense strand to SEQ ID NO: 900386
uucucagcuacacaugugg

SEQ ID NO: 900388 - RNA, 19 nt, Artificial Sequence
  Description of Artificial Sequence: Synthetic oligonucleotide
  Sense strand starting at position 2956 of SEQ ID NO: 588942
acagcugugaaauggcaaa

SEQ ID NO: 900389 - RNA, 19 nt, Artificial Sequence
  Description of Artificial Sequence: Synthetic oligonucleotide
  Antisense strand to SEQ ID NO: 900388
uuugccauuucacagcugu

SEQ ID NO: 900390 - RNA, 19 nt, Artificial Sequence
  Description of Artificial Sequence: Synthetic oligonucleotide
  Sense strand starting at position 3052 of SEQ ID NO: 588942
cuuugaagguucucauuaa

SEQ ID NO: 900391 - RNA, 19 nt, Artificial Sequence
  Description of Artificial Sequence: Synthetic oligonucleotide
  Antisense strand to SEQ ID NO: 900390
uuaaugagaaccuucaaag

SEQ ID NO: 900392 - RNA, 19 nt, Artificial Sequence
  Description of Artificial Sequence: Synthetic oligonucleotide
  Sense strand starting at position 3056 of SEQ ID NO: 588942
gaagguucucauuaaaugu

SEQ ID NO: 900393 - RNA, 19 nt, Artificial Sequence
  Description of Artificial Sequence: Synthetic oligonucleotide
  Antisense strand to SEQ ID NO: 900392
acauuuaaugagaaccuuc

SEQ ID NO: 900394 - RNA, 19 nt, Artificial Sequence
  Description of Artificial Sequence: Synthetic oligonucleotide
  Sense strand starting at position 3148 of SEQ ID NO: 588942
uuucuauuccuaugagaug

SEQ ID NO: 900395 - RNA, 19 nt, Artificial Sequence
  Description of Artificial Sequence: Synthetic oligonucleotide
  Antisense strand to SEQ ID NO: 900394
caucucauaggaauagaaa

SEQ ID NO: 900396 - RNA, 19 nt, Artificial Sequence
  Description of Artificial Sequence: Synthetic oligonucleotide
  Sense strand starting at position 3551 of SEQ ID NO: 588942
cugugaguagcagagguaa

SEQ ID NO: 900397 - RNA, 19 nt, Artificial Sequence
  Description of Artificial Sequence: Synthetic oligonucleotide
  Antisense strand to SEQ ID NO: 900396
uuaccucugcuacucacag

SEQ ID NO: 900398 - RNA, 19 nt, Artificial Sequence
  Description of Artificial Sequence: Synthetic oligonucleotide
  Sense strand starting at position 3553 of SEQ ID NO: 588942
gugaguagcagagguaaua

SEQ ID NO: 900399 - RNA, 19 nt, Artificial Sequence
  Description of Artificial Sequence: Synthetic oligonucleotide
  Antisense strand to SEQ ID NO: 900398
uauuaccucugcuacucac

SEQ ID NO: 900400 - RNA, 19 nt, Artificial Sequence
  Description of Artificial Sequence: Synthetic oligonucleotide
  Sense strand starting at position 3684 of SEQ ID NO: 588942
acagaaguauuugaaauga

SEQ ID NO: 900401 - RNA, 19 nt, Artificial Sequence
  Description of Artificial Sequence: Synthetic oligonucleotide
  Antisense strand to SEQ ID NO: 900400
ucauuucaaauacuucugu

SEQ ID NO: 900402 - RNA, 19 nt, Artificial Sequence
  Description of Artificial Sequence: Synthetic oligonucleotide
  Sense strand starting at position 3699 of SEQ ID NO: 588942
augaaacuuugacagauaa

SEQ ID NO: 900403 - RNA, 19 nt, Artificial Sequence
  Description of Artificial Sequence: Synthetic oligonucleotide
  Antisense strand to SEQ ID NO: 900402
uuaucugucaaaguuucau

SEQ ID NO: 900404 - RNA, 19 nt, Artificial Sequence
  Description of Artificial Sequence: Synthetic oligonucleotide
  Sense strand starting at position 3724 of SEQ ID NO: 588942
uuuggugacacugagaagu

SEQ ID NO: 900405 - RNA, 19 nt, Artificial Sequence
  Description of Artificial Sequence: Synthetic oligonucleotide
  Antisense strand to SEQ ID NO: 900404
acuucucagugucaccaaa

SEQ ID NO: 900406 - RNA, 19 nt, Artificial Sequence
  Description of Artificial Sequence: Synthetic oligonucleotide
  Sense strand starting at position 3826 of SEQ ID NO: 588942
gggccuccucaugagucaa

SEQ ID NO: 900407 - RNA, 19 nt, Artificial Sequence
  Description of Artificial Sequence: Synthetic oligonucleotide
  Antisense strand to SEQ ID NO: 900406
uugacucaugaggaggccc

SEQ ID NO: 900408 - RNA, 19 nt, Artificial Sequence
  Description of Artificial Sequence: Synthetic oligonucleotide
  Sense strand starting at position 8 of SEQ ID NO: 588943
cuggccucccaauguauaa

SEQ ID NO: 900409 - RNA, 19 nt, Artificial Sequence
  Description of Artificial Sequence: Synthetic oligonucleotide
  Antisense strand to SEQ ID NO: 900408
uuauacauugggaggccag

SEQ ID NO: 900410 - RNA, 19 nt, Artificial Sequence
  Description of Artificial Sequence: Synthetic oligonucleotide
  Sense strand starting at position 469 of SEQ ID NO: 588943
gggaauagaugucagacuu

SEQ ID NO: 900411 - RNA, 19 nt, Artificial Sequence
  Description of Artificial Sequence: Synthetic oligonucleotide
  Antisense strand to SEQ ID NO: 900410
aagucugacaucuauuccc

SEQ ID NO: 900412 - RNA, 19 nt, Artificial Sequence
  Description of Artificial Sequence: Synthetic oligonucleotide
  Sense strand starting at position 617 of SEQ ID NO: 588943
agccauuagccaugugcaa

SEQ ID NO: 900413 - RNA, 19 nt, Artificial Sequence
  Description of Artificial Sequence: Synthetic oligonucleotide
  Antisense strand to SEQ ID NO: 900412
uugcacauggcuaauggcu

SEQ ID NO: 900414 - RNA, 19 nt, Artificial Sequence
  Description of Artificial Sequence: Synthetic oligonucleotide
  Sense strand starting at position 840 of SEQ ID NO: 588943
uuauaugugguuugccuaa

SEQ ID NO: 900415 - RNA, 19 nt, Artificial Sequence
  Description of Artificial Sequence: Synthetic oligonucleotide
  Antisense strand to SEQ ID NO: 900414
uuaggcaaaccacauauaa

SEQ ID NO: 900416 - RNA, 19 nt, Artificial Sequence
  Description of Artificial Sequence: Synthetic oligonucleotide
  Sense strand starting at position 842 of SEQ ID NO: 588943
auaugugguuugccuaaag

SEQ ID NO: 900417 - RNA, 19 nt, Artificial Sequence
  Description of Artificial Sequence: Synthetic oligonucleotide
  Antisense strand to SEQ ID NO: 900416
cuuuaggcaaaccacauau

SEQ ID NO: 900418 - RNA, 19 nt, Artificial Sequence
  Description of Artificial Sequence: Synthetic oligonucleotide
  Sense strand starting at position 905 of SEQ ID NO: 588943
ucacuaguccuccguagau

SEQ ID NO: 900419 - RNA, 19 nt, Artificial Sequence
  Description of Artificial Sequence: Synthetic oligonucleotide
  Antisense strand to SEQ ID NO: 900418
aucuacggaggacuaguga

SEQ ID NO: 900420 - RNA, 19 nt, Artificial Sequence
  Description of Artificial Sequence: Synthetic oligonucleotide
  Sense strand starting at position 1121 of SEQ ID NO: 588943
gcgggaucuuucccuuucu

SEQ ID NO: 900421 - RNA, 19 nt, Artificial Sequence
  Description of Artificial Sequence: Synthetic oligonucleotide
  Antisense strand to SEQ ID NO: 900420
agaaagggaaagaucccgc

SEQ ID NO: 900422 - RNA, 19 nt, Artificial Sequence
  Description of Artificial Sequence: Synthetic oligonucleotide
  Sense strand starting at position 2172 of SEQ ID NO: 588943
ccggccugagcuugaauaa

SEQ ID NO: 900423 - RNA, 19 nt, Artificial Sequence
  Description of Artificial Sequence: Synthetic oligonucleotide
  Antisense strand to SEQ ID NO: 900422
uuauucaagcucaggccgg

SEQ ID NO: 900424 - RNA, 19 nt, Artificial Sequence
  Description of Artificial Sequence: Synthetic oligonucleotide
  Sense strand starting at position 2173 of SEQ ID NO: 588943
cggccugagcuugaauaac

SEQ ID NO: 900425 - RNA, 19 nt, Artificial Sequence
  Description of Artificial Sequence: Synthetic oligonucleotide
  Antisense strand to SEQ ID NO: 900424
guuauucaagcucaggccg

SEQ ID NO: 900426 - RNA, 19 nt, Artificial Sequence
  Description of Artificial Sequence: Synthetic oligonucleotide
  Sense strand starting at position 2197 of SEQ ID NO: 588943
ggaauuaagggcugauggu

SEQ ID NO: 900427 - RNA, 19 nt, Artificial Sequence
  Description of Artificial Sequence: Synthetic oligonucleotide
  Antisense strand to SEQ ID NO: 900426
accaucagcccuuaauucc

SEQ ID NO: 900428 - RNA, 19 nt, Artificial Sequence
  Description of Artificial Sequence: Synthetic oligonucleotide
  Sense strand starting at position 2569 of SEQ ID NO: 588943
gccgccucccaauaaagaa

SEQ ID NO: 900429 - RNA, 19 nt, Artificial Sequence
  Description of Artificial Sequence: Synthetic oligonucleotide
  Antisense strand to SEQ ID NO: 900428
uucuuuauugggaggcggc

SEQ ID NO: 900430 - RNA, 19 nt, Artificial Sequence
  Description of Artificial Sequence: Synthetic oligonucleotide
  Sense strand starting at position 3129 of SEQ ID NO: 588943
cggcgaaauagccaaucau

SEQ ID NO: 900431 - RNA, 19 nt, Artificial Sequence
  Description of Artificial Sequence: Synthetic oligonucleotide
  Antisense strand to SEQ ID NO: 900430
augauuggcuauuucgccg

SEQ ID NO: 900432 - RNA, 19 nt, Artificial Sequence
  Description of Artificial Sequence: Synthetic oligonucleotide
  Sense strand starting at position 3139 of SEQ ID NO: 588943
gccaaucaucgcuaggguu

SEQ ID NO: 900433 - RNA, 19 nt, Artificial Sequence
  Description of Artificial Sequence: Synthetic oligonucleotide
  Antisense strand to SEQ ID NO: 900432
aacccuagcgaugauuggc

SEQ ID NO: 900434 - RNA, 19 nt, Artificial Sequence
  Description of Artificial Sequence: Synthetic oligonucleotide
  Sense strand starting at position 3262 of SEQ ID NO: 588943
gaaagcugccgucucgagu

SEQ ID NO: 900435 - RNA, 19 nt, Artificial Sequence
  Description of Artificial Sequence: Synthetic oligonucleotide
  Antisense strand to SEQ ID NO: 900434
acucgagacggcagcuuuc

SEQ ID NO: 900436 - RNA, 19 nt, Artificial Sequence
  Description of Artificial Sequence: Synthetic oligonucleotide
  Sense strand starting at position 3292 of SEQ ID NO: 588943
cugagagcuccucgaggaa

SEQ ID NO: 900437 - RNA, 19 nt, Artificial Sequence
  Description of Artificial Sequence: Synthetic oligonucleotide
  Antisense strand to SEQ ID NO: 900436
uuccucgaggagcucucag

SEQ ID NO: 900438 - RNA, 19 nt, Artificial Sequence
  Description of Artificial Sequence: Synthetic oligonucleotide
  Sense strand starting at position 3315 of SEQ ID NO: 588943
ggcugaguccugcaggaau

SEQ ID NO: 900439 - RNA, 19 nt, Artificial Sequence
  Description of Artificial Sequence: Synthetic oligonucleotide
  Antisense strand to SEQ ID NO: 900438
auuccugcaggacucagcc

SEQ ID NO: 900440 - RNA, 19 nt, Artificial Sequence
  Description of Artificial Sequence: Synthetic oligonucleotide
  Sense strand starting at position 3334 of SEQ ID NO: 588943
ucucaaguacuguauugau

SEQ ID NO: 900441 - RNA, 19 nt, Artificial Sequence
  Description of Artificial Sequence: Synthetic oligonucleotide
  Antisense strand to SEQ ID NO: 900440
aucaauacaguacuugaga

SEQ ID NO: 900442 - RNA, 19 nt, Artificial Sequence
  Description of Artificial Sequence: Synthetic oligonucleotide
  Sense strand starting at position 3351 of SEQ ID NO: 588943
auauuucuguaguaagcuu

SEQ ID NO: 900443 - RNA, 19 nt, Artificial Sequence
  Description of Artificial Sequence: Synthetic oligonucleotide
  Antisense strand to SEQ ID NO: 900442
aagcuuacuacagaaauau

SEQ ID NO: 900444 - RNA, 19 nt, Artificial Sequence
  Description of Artificial Sequence: Synthetic oligonucleotide
  Sense strand starting at position 3407 of SEQ ID NO: 588943
ggguuaccgucuuccaaug

SEQ ID NO: 900445 - RNA, 19 nt, Artificial Sequence
  Description of Artificial Sequence: Synthetic oligonucleotide
  Antisense strand to SEQ ID NO: 900444
cauuggaagacgguaaccc

SEQ ID NO: 900446 - RNA, 19 nt, Artificial Sequence
  Description of Artificial Sequence: Synthetic oligonucleotide
  Sense strand starting at position 3431 of SEQ ID NO: 588943
ugguuacacguuuaugaga

SEQ ID NO: 900447 - RNA, 19 nt, Artificial Sequence
  Description of Artificial Sequence: Synthetic oligonucleotide
  Antisense strand to SEQ ID NO: 900446
ucucauaaacguguaacca

SEQ ID NO: 900448 - RNA, 19 nt, Artificial Sequence
  Description of Artificial Sequence: Synthetic oligonucleotide
  Sense strand starting at position 3442 of SEQ ID NO: 588943
uuaugagacuuggagccaa

SEQ ID NO: 900449 - RNA, 19 nt, Artificial Sequence
  Description of Artificial Sequence: Synthetic oligonucleotide
  Antisense strand to SEQ ID NO: 900448
uuggcuccaagucucauaa

SEQ ID NO: 900450 - RNA, 19 nt, Artificial Sequence
  Description of Artificial Sequence: Synthetic oligonucleotide
  Sense strand starting at position 3500 of SEQ ID NO: 588943
uaaagacggucauaaauga

SEQ ID NO: 900451 - RNA, 19 nt, Artificial Sequence
  Description of Artificial Sequence: Synthetic oligonucleotide
  Antisense strand to SEQ ID NO: 900450
ucauuuaugaccgucuuua

SEQ ID NO: 900452 - RNA, 19 nt, Artificial Sequence
  Description of Artificial Sequence: Synthetic oligonucleotide
  Sense strand starting at position 3507 of SEQ ID NO: 588943
ggucauaaaugauacauga

SEQ ID NO: 900453 - RNA, 19 nt, Artificial Sequence
  Description of Artificial Sequence: Synthetic oligonucleotide
  Antisense strand to SEQ ID NO: 900452
ucauguaucauuuaugacc

SEQ ID NO: 900454 - RNA, 19 nt, Artificial Sequence
  Description of Artificial Sequence: Synthetic oligonucleotide
  Sense strand starting at position 3517 of SEQ ID NO: 588943
gauacaugaugccuuagag

SEQ ID NO: 900455 - RNA, 19 nt, Artificial Sequence
  Description of Artificial Sequence: Synthetic oligonucleotide
  Antisense strand to SEQ ID NO: 900454
cucuaaggcaucauguauc

SEQ ID NO: 900456 - RNA, 19 nt, Artificial Sequence
  Description of Artificial Sequence: Synthetic oligonucleotide
  Sense strand starting at position 3573 of SEQ ID NO: 588943
aagggaagguauugcacaa

SEQ ID NO: 900457 - RNA, 19 nt, Artificial Sequence
  Description of Artificial Sequence: Synthetic oligonucleotide
  Antisense strand to SEQ ID NO: 900456
uugugcaauaccuucccuu

SEQ ID NO: 900458 - RNA, 19 nt, Artificial Sequence
  Description of Artificial Sequence: Synthetic oligonucleotide
  Sense strand starting at position 3577 of SEQ ID NO: 588943
gaagguauugcacaaguuu

SEQ ID NO: 900459 - RNA, 19 nt, Artificial Sequence
  Description of Artificial Sequence: Synthetic oligonucleotide
  Antisense strand to SEQ ID NO: 900458
aaacuugugcaauaccuuc

SEQ ID NO: 900460 - RNA, 19 nt, Artificial Sequence
  Description of Artificial Sequence: Synthetic oligonucleotide
  Sense strand starting at position 3586 of SEQ ID NO: 588943
gcacaaguuuggagcgaga

SEQ ID NO: 900461 - RNA, 19 nt, Artificial Sequence
  Description of Artificial Sequence: Synthetic oligonucleotide
  Antisense strand to SEQ ID NO: 900460
ucucgcuccaaacuugugc

SEQ ID NO: 900462 - RNA, 19 nt, Artificial Sequence
  Description of Artificial Sequence: Synthetic oligonucleotide
  Sense strand starting at position 3608 of SEQ ID NO: 588943
augggagacauucgcaauc

SEQ ID NO: 900463 - RNA, 19 nt, Artificial Sequence
  Description of Artificial Sequence: Synthetic oligonucleotide
  Antisense strand to SEQ ID NO: 900462
gauugcgaaugucucccau

SEQ ID NO: 900464 - RNA, 19 nt, Artificial Sequence
  Description of Artificial Sequence: Synthetic oligonucleotide
  Sense strand starting at position 3647 of SEQ ID NO: 588943
aggccaaccucacagaauu

SEQ ID NO: 900465 - RNA, 19 nt, Artificial Sequence
  Description of Artificial Sequence: Synthetic oligonucleotide
  Antisense strand to SEQ ID NO: 900464
aauucugugagguuggccu

SEQ ID NO: 900466 - RNA, 19 nt, Artificial Sequence
  Description of Artificial Sequence: Synthetic oligonucleotide
  Sense strand starting at position 3700 of SEQ ID NO: 588943
aggcguuuggucuucagca

SEQ ID NO: 900467 - RNA, 19 nt, Artificial Sequence
  Description of Artificial Sequence: Synthetic oligonucleotide
  Antisense strand to SEQ ID NO: 900466
ugcugaagaccaaacgccu

SEQ ID NO: 900468 - RNA, 19 nt, Artificial Sequence
  Description of Artificial Sequence: Synthetic oligonucleotide
  Sense strand starting at position 3702 of SEQ ID NO: 588943
gcguuuggucuucagcaca

SEQ ID NO: 900469 - RNA, 19 nt, Artificial Sequence
  Description of Artificial Sequence: Synthetic oligonucleotide
  Antisense strand to SEQ ID NO: 900468
ugugcugaagaccaaacgc

SEQ ID NO: 900470 - RNA, 19 nt, Artificial Sequence
  Description of Artificial Sequence: Synthetic oligonucleotide
  Sense strand starting at position 3780 of SEQ ID NO: 588943
guaugacaucuguaaacac

SEQ ID NO: 900471 - RNA, 19 nt, Artificial Sequence
  Description of Artificial Sequence: Synthetic oligonucleotide
  Antisense strand to SEQ ID NO: 900470
guguuuacagaugucauac

SEQ ID NO: 900472 - RNA, 19 nt, Artificial Sequence
  Description of Artificial Sequence: Synthetic oligonucleotide
  Sense strand starting at position 3790 of SEQ ID NO: 588943
uguaaacacuaggaauuua

SEQ ID NO: 900473 - RNA, 19 nt, Artificial Sequence
  Description of Artificial Sequence: Synthetic oligonucleotide
  Antisense strand to SEQ ID NO: 900472
uaaauuccuaguguuuaca

SEQ ID NO: 900474 - RNA, 19 nt, Artificial Sequence
  Description of Artificial Sequence: Synthetic oligonucleotide
  Sense strand starting at position 3862 of SEQ ID NO: 588943
cuuuaucacguuugagaau

SEQ ID NO: 900475 - RNA, 19 nt, Artificial Sequence
  Description of Artificial Sequence: Synthetic oligonucleotide
  Antisense strand to SEQ ID NO: 900474
auucucaaacgugauaaag

SEQ ID NO: 900476 - RNA, 19 nt, Artificial Sequence
  Description of Artificial Sequence: Synthetic oligonucleotide
  Sense strand starting at position 3869 of SEQ ID NO: 588943
acguuugagaauuacugua

SEQ ID NO: 900477 - RNA, 19 nt, Artificial Sequence
  Description of Artificial Sequence: Synthetic oligonucleotide
  Antisense strand to SEQ ID NO: 900476
uacaguaauucucaaacgu

SEQ ID NO: 900478 - RNA, 19 nt, Artificial Sequence
  Description of Artificial Sequence: Synthetic oligonucleotide
  Sense strand starting at position 3871 of SEQ ID NO: 588943
guuugagaauuacuguagu

SEQ ID NO: 900479 - RNA, 19 nt, Artificial Sequence
  Description of Artificial Sequence: Synthetic oligonucleotide
  Antisense strand to SEQ ID NO: 900478
acuacaguaauucucaaac

SEQ ID NO: 900480 - RNA, 19 nt, Artificial Sequence
  Description of Artificial Sequence: Synthetic oligonucleotide
  Sense strand starting at position 3874 of SEQ ID NO: 588943
ugagaauuacuguaguagu

SEQ ID NO: 900481 - RNA, 19 nt, Artificial Sequence
  Description of Artificial Sequence: Synthetic oligonucleotide
  Antisense strand to SEQ ID NO: 900480
acuacuacaguaauucuca

SEQ ID NO: 900482 - RNA, 19 nt, Artificial Sequence
  Description of Artificial Sequence: Synthetic oligonucleotide
  Sense strand starting at position 3885 of SEQ ID NO: 588943
guaguaguuggugauggua

SEQ ID NO: 900483 - RNA, 19 nt, Artificial Sequence
  Description of Artificial Sequence: Synthetic oligonucleotide
  Antisense strand to SEQ ID NO: 900482
uaccaucaccaacuacuac

SEQ ID NO: 900484 - RNA, 19 nt, Artificial Sequence
  Description of Artificial Sequence: Synthetic oligonucleotide
  Sense strand starting at position 3940 of SEQ ID NO: 588943
agaugauugcggugguugu

SEQ ID NO: 900485 - RNA, 19 nt, Artificial Sequence
  Description of Artificial Sequence: Synthetic oligonucleotide
  Antisense strand to SEQ ID NO: 900484
acaaccaccgcaaucaucu

SEQ ID NO: 900486 - RNA, 19 nt, Artificial Sequence
  Description of Artificial Sequence: Synthetic oligonucleotide
  Sense strand starting at position 3941 of SEQ ID NO: 588943
gaugauugcggugguugua

SEQ ID NO: 900487 - RNA, 19 nt, Artificial Sequence
  Description of Artificial Sequence: Synthetic oligonucleotide
  Antisense strand to SEQ ID NO: 900486
uacaaccaccgcaaucauc

SEQ ID NO: 900488 - RNA, 19 nt, Artificial Sequence
  Description of Artificial Sequence: Synthetic oligonucleotide
  Sense strand starting at position 91 of SEQ ID NO: 588944
gugacaaugcuacacauga

SEQ ID NO: 900489 - RNA, 19 nt, Artificial Sequence
  Description of Artificial Sequence: Synthetic oligonucleotide
  Antisense strand to SEQ ID NO: 900488
ucauguguagcauugucac

SEQ ID NO: 900490 - RNA, 19 nt, Artificial Sequence
  Description of Artificial Sequence: Synthetic oligonucleotide
  Sense strand starting at position 131 of SEQ ID NO: 588944
acgaaaguuuccuuuauua

SEQ ID NO: 900491 - RNA, 19 nt, Artificial Sequence
  Description of Artificial Sequence: Synthetic oligonucleotide
  Antisense strand to SEQ ID NO: 900490
uaauaaaggaaacuuucgu

SEQ ID NO: 900492 - RNA, 19 nt, Artificial Sequence
  Description of Artificial Sequence: Synthetic oligonucleotide
  Sense strand starting at position 208 of SEQ ID NO: 588944
gccaaucagcuaugacaau

SEQ ID NO: 900493 - RNA, 19 nt, Artificial Sequence
  Description of Artificial Sequence: Synthetic oligonucleotide
  Antisense strand to SEQ ID NO: 900492
auugucauagcugauuggc

SEQ ID NO: 900494 - RNA, 19 nt, Artificial Sequence
  Description of Artificial Sequence: Synthetic oligonucleotide
  Sense strand starting at position 239 of SEQ ID NO: 588944
acuuaauuacaggguuaua

SEQ ID NO: 900495 - RNA, 19 nt, Artificial Sequence
  Description of Artificial Sequence: Synthetic oligonucleotide
  Antisense strand to SEQ ID NO: 900494
uauaacccuguaauuaagu

SEQ ID NO: 900496 - RNA, 19 nt, Artificial Sequence
  Description of Artificial Sequence: Synthetic oligonucleotide
  Sense strand starting at position 254 of SEQ ID NO: 588944
uauauuagaucgccaugag

SEQ ID NO: 900497 - RNA, 19 nt, Artificial Sequence
  Description of Artificial Sequence: Synthetic oligonucleotide
  Antisense strand to SEQ ID NO: 900496
cucauggcgaucuaauaua

SEQ ID NO: 900498 - RNA, 19 nt, Artificial Sequence
  Description of Artificial Sequence: Synthetic oligonucleotide
  Sense strand starting at position 257 of SEQ ID NO: 588944
auuagaucgccaugaggua

SEQ ID NO: 900499 - RNA, 19 nt, Artificial Sequence
  Description of Artificial Sequence: Synthetic oligonucleotide
  Antisense strand to SEQ ID NO: 900498
uaccucauggcgaucuaau

SEQ ID NO: 900500 - RNA, 19 nt, Artificial Sequence
  Description of Artificial Sequence: Synthetic oligonucleotide
  Sense strand starting at position 423 of SEQ ID NO: 588944
ccugguacaugguuaaaua

SEQ ID NO: 900501 - RNA, 19 nt, Artificial Sequence
  Description of Artificial Sequence: Synthetic oligonucleotide
  Antisense strand to SEQ ID NO: 900500
uauuuaaccauguaccagg

SEQ ID NO: 900502 - RNA, 19 nt, Artificial Sequence
  Description of Artificial Sequence: Synthetic oligonucleotide
  Sense strand starting at position 435 of SEQ ID NO: 588944
uuaaauacguaugcucaaa

SEQ ID NO: 900503 - RNA, 19 nt, Artificial Sequence
  Description of Artificial Sequence: Synthetic oligonucleotide
  Antisense strand to SEQ ID NO: 900502
uuugagcauacguauuuaa

SEQ ID NO: 900504 - RNA, 19 nt, Artificial Sequence
  Description of Artificial Sequence: Synthetic oligonucleotide
  Sense strand starting at position 512 of SEQ ID NO: 588944
agaugcauuguguaccuca

SEQ ID NO: 900505 - RNA, 19 nt, Artificial Sequence
  Description of Artificial Sequence: Synthetic oligonucleotide
  Antisense strand to SEQ ID NO: 900504
ugagguacacaaugcaucu

SEQ ID NO: 900506 - RNA, 19 nt, Artificial Sequence
  Description of Artificial Sequence: Synthetic oligonucleotide
  Sense strand starting at position 517 of SEQ ID NO: 588944
cauuguguaccucaguaua

SEQ ID NO: 900507 - RNA, 19 nt, Artificial Sequence
  Description of Artificial Sequence: Synthetic oligonucleotide
  Antisense strand to SEQ ID NO: 900506
uauacugagguacacaaug

SEQ ID NO: 900508 - RNA, 19 nt, Artificial Sequence
  Description of Artificial Sequence: Synthetic oligonucleotide
  Sense strand starting at position 520 of SEQ ID NO: 588944
uguguaccucaguauacaa

SEQ ID NO: 900509 - RNA, 19 nt, Artificial Sequence
  Description of Artificial Sequence: Synthetic oligonucleotide
  Antisense strand to SEQ ID NO: 900508
uuguauacugagguacaca

SEQ ID NO: 900510 - RNA, 19 nt, Artificial Sequence
  Description of Artificial Sequence: Synthetic oligonucleotide
  Sense strand starting at position 531 of SEQ ID NO: 588944
guauacaaucugcacagaa

SEQ ID NO: 900511 - RNA, 19 nt, Artificial Sequence
  Description of Artificial Sequence: Synthetic oligonucleotide
  Antisense strand to SEQ ID NO: 900510
uucugugcagauuguauac

SEQ ID NO: 900512 - RNA, 19 nt, Artificial Sequence
  Description of Artificial Sequence: Synthetic oligonucleotide
  Sense strand starting at position 613 of SEQ ID NO: 588944
cgccuuuaucaagaaguug

SEQ ID NO: 900513 - RNA, 19 nt, Artificial Sequence
  Description of Artificial Sequence: Synthetic oligonucleotide
  Antisense strand to SEQ ID NO: 900512
caacuucuugauaaaggcg

SEQ ID NO: 900514 - RNA, 19 nt, Artificial Sequence
  Description of Artificial Sequence: Synthetic oligonucleotide
  Sense strand starting at position 776 of SEQ ID NO: 588944
cuaguuaccuuagucuuaa

SEQ ID NO: 900515 - RNA, 19 nt, Artificial Sequence
  Description of Artificial Sequence: Synthetic oligonucleotide
  Antisense strand to SEQ ID NO: 900514
uuaagacuaagguaacuag

SEQ ID NO: 900516 - RNA, 19 nt, Artificial Sequence
  Description of Artificial Sequence: Synthetic oligonucleotide
  Sense strand starting at position 965 of SEQ ID NO: 588944
gcugguacuagacacgaaa

SEQ ID NO: 900517 - RNA, 19 nt, Artificial Sequence
  Description of Artificial Sequence: Synthetic oligonucleotide
  Antisense strand to SEQ ID NO: 900516
uuucgugucuaguaccagc

SEQ ID NO: 900518 - RNA, 19 nt, Artificial Sequence
  Description of Artificial Sequence: Synthetic oligonucleotide
  Sense strand starting at position 984 of SEQ ID NO: 588944
guaaaugguacaggacauu

SEQ ID NO: 900519 - RNA, 19 nt, Artificial Sequence
  Description of Artificial Sequence: Synthetic oligonucleotide
  Antisense strand to SEQ ID NO: 900518
aauguccuguaccauuuac

SEQ ID NO: 900520 - RNA, 19 nt, Artificial Sequence
  Description of Artificial Sequence: Synthetic oligonucleotide
  Sense strand starting at position 1378 of SEQ ID NO: 588944
aucacuaguccuuagguuu

SEQ ID NO: 900521 - RNA, 19 nt, Artificial Sequence
  Description of Artificial Sequence: Synthetic oligonucleotide
  Antisense strand to SEQ ID NO: 900520
aaaccuaaggacuagugau

SEQ ID NO: 900522 - RNA, 19 nt, Artificial Sequence
  Description of Artificial Sequence: Synthetic oligonucleotide
  Sense strand starting at position 1808 of SEQ ID NO: 588944
uccguauucgguccugcau

SEQ ID NO: 900523 - RNA, 19 nt, Artificial Sequence
  Description of Artificial Sequence: Synthetic oligonucleotide
  Antisense strand to SEQ ID NO: 900522
augcaggaccgaauacgga

SEQ ID NO: 900524 - RNA, 19 nt, Artificial Sequence
  Description of Artificial Sequence: Synthetic oligonucleotide
  Sense strand starting at position 2546 of SEQ ID NO: 588944
gcauaaguccggcccguaa

SEQ ID NO: 900525 - RNA, 19 nt, Artificial Sequence
  Description of Artificial Sequence: Synthetic oligonucleotide
  Antisense strand to SEQ ID NO: 900524
uuacgggccggacuuaugc

SEQ ID NO: 900526 - RNA, 19 nt, Artificial Sequence
  Description of Artificial Sequence: Synthetic oligonucleotide
  Sense strand starting at position 2702 of SEQ ID NO: 588944
aaaguuuaggacugcagaa

SEQ ID NO: 900527 - RNA, 19 nt, Artificial Sequence
  Description of Artificial Sequence: Synthetic oligonucleotide
  Antisense strand to SEQ ID NO: 900526
uucugcaguccuaaacuuu

SEQ ID NO: 900528 - RNA, 19 nt, Artificial Sequence
  Description of Artificial Sequence: Synthetic oligonucleotide
  Sense strand starting at position 2735 of SEQ ID NO: 588944
ggacguuaaacugggcuaa

SEQ ID NO: 900529 - RNA, 19 nt, Artificial Sequence
  Description of Artificial Sequence: Synthetic oligonucleotide
  Antisense strand to SEQ ID NO: 900528
uuagcccaguuuaacgucc

SEQ ID NO: 900530 - RNA, 19 nt, Artificial Sequence
  Description of Artificial Sequence: Synthetic oligonucleotide
  Sense strand starting at position 2737 of SEQ ID NO: 588944
acguuaaacugggcuaaga

SEQ ID NO: 900531 - RNA, 19 nt, Artificial Sequence
  Description of Artificial Sequence: Synthetic oligonucleotide
  Antisense strand to SEQ ID NO: 900530
ucuuagcccaguuuaacgu

SEQ ID NO: 900532 - RNA, 19 nt, Artificial Sequence
  Description of Artificial Sequence: Synthetic oligonucleotide
  Sense strand starting at position 2798 of SEQ ID NO: 588944
guaucuagagccuggaagu

SEQ ID NO: 900533 - RNA, 19 nt, Artificial Sequence
  Description of Artificial Sequence: Synthetic oligonucleotide
  Antisense strand to SEQ ID NO: 900532
acuuccaggcucuagauac

SEQ ID NO: 900534 - RNA, 19 nt, Artificial Sequence
  Description of Artificial Sequence: Synthetic oligonucleotide
  Sense strand starting at position 2808 of SEQ ID NO: 588944
ccuggaagucuuggucaag

SEQ ID NO: 900535 - RNA, 19 nt, Artificial Sequence
  Description of Artificial Sequence: Synthetic oligonucleotide
  Antisense strand to SEQ ID NO: 900534
cuugaccaagacuuccagg

SEQ ID NO: 900536 - RNA, 19 nt, Artificial Sequence
  Description of Artificial Sequence: Synthetic oligonucleotide
  Sense strand starting at position 2820 of SEQ ID NO: 588944
ggucaaggauucucccuaa

SEQ ID NO: 900537 - RNA, 19 nt, Artificial Sequence
  Description of Artificial Sequence: Synthetic oligonucleotide
  Antisense strand to SEQ ID NO: 900536
uuagggagaauccuugacc

SEQ ID NO: 900538 - RNA, 19 nt, Artificial Sequence
  Description of Artificial Sequence: Synthetic oligonucleotide
  Sense strand starting at position 2895 of SEQ ID NO: 588944
uucugaaguuaaguaaaga

SEQ ID NO: 900539 - RNA, 19 nt, Artificial Sequence
  Description of Artificial Sequence: Synthetic oligonucleotide
  Antisense strand to SEQ ID NO: 900538
ucuuuacuuaacuucagaa

SEQ ID NO: 900540 - RNA, 19 nt, Artificial Sequence
  Description of Artificial Sequence: Synthetic oligonucleotide
  Sense strand starting at position 2982 of SEQ ID NO: 588944
gcaugauggcauggaagaa

SEQ ID NO: 900541 - RNA, 19 nt, Artificial Sequence
  Description of Artificial Sequence: Synthetic oligonucleotide
  Antisense strand to SEQ ID NO: 900540
uucuuccaugccaucaugc

SEQ ID NO: 900542 - RNA, 19 nt, Artificial Sequence
  Description of Artificial Sequence: Synthetic oligonucleotide
  Sense strand starting at position 3042 of SEQ ID NO: 588944
gucuacaccucaccagaua

SEQ ID NO: 900543 - RNA, 19 nt, Artificial Sequence
  Description of Artificial Sequence: Synthetic oligonucleotide
  Antisense strand to SEQ ID NO: 900542
uaucuggugagguguagac

SEQ ID NO: 900544 - RNA, 19 nt, Artificial Sequence
  Description of Artificial Sequence: Synthetic oligonucleotide
  Sense strand starting at position 3071 of SEQ ID NO: 588944
aguaaagcuagcgaagaua

SEQ ID NO: 900545 - RNA, 19 nt, Artificial Sequence
  Description of Artificial Sequence: Synthetic oligonucleotide
  Antisense strand to SEQ ID NO: 900544
uaucuucgcuagcuuuacu

SEQ ID NO: 900546 - RNA, 19 nt, Artificial Sequence
  Description of Artificial Sequence: Synthetic oligonucleotide
  Sense strand starting at position 3082 of SEQ ID NO: 588944
cgaagauauugacccucau

SEQ ID NO: 900547 - RNA, 19 nt, Artificial Sequence
  Description of Artificial Sequence: Synthetic oligonucleotide
  Antisense strand to SEQ ID NO: 900546
augagggucaauaucuucg

SEQ ID NO: 900548 - RNA, 19 nt, Artificial Sequence
  Description of Artificial Sequence: Synthetic oligonucleotide
  Sense strand starting at position 3097 of SEQ ID NO: 588944
ucauuauauugggugggaa

SEQ ID NO: 900549 - RNA, 19 nt, Artificial Sequence
  Description of Artificial Sequence: Synthetic oligonucleotide
  Antisense strand to SEQ ID NO: 900548
uucccacccaauauaauga

SEQ ID NO: 900550 - RNA, 19 nt, Artificial Sequence
  Description of Artificial Sequence: Synthetic oligonucleotide
  Sense strand starting at position 3099 of SEQ ID NO: 588944
auuauauugggugggaauu

SEQ ID NO: 900551 - RNA, 19 nt, Artificial Sequence
  Description of Artificial Sequence: Synthetic oligonucleotide
  Antisense strand to SEQ ID NO: 900550
aauucccacccaauauaau

SEQ ID NO: 900552 - RNA, 19 nt, Artificial Sequence
  Description of Artificial Sequence: Synthetic oligonucleotide
  Sense strand starting at position 3174 of SEQ ID NO: 588944
uguuccauaaucggagaua

SEQ ID NO: 900553 - RNA, 19 nt, Artificial Sequence
  Description of Artificial Sequence: Synthetic oligonucleotide
  Antisense strand to SEQ ID NO: 900552
uaucuccgauuauggaaca

SEQ ID NO: 900554 - RNA, 19 nt, Artificial Sequence
  Description of Artificial Sequence: Synthetic oligonucleotide
  Sense strand starting at position 3246 of SEQ ID NO: 588944
accacaaucugccuggaau

SEQ ID NO: 900555 - RNA, 19 nt, Artificial Sequence
  Description of Artificial Sequence: Synthetic oligonucleotide
  Antisense strand to SEQ ID NO: 900554
auuccaggcagauuguggu

SEQ ID NO: 900556 - RNA, 19 nt, Artificial Sequence
  Description of Artificial Sequence: Synthetic oligonucleotide
  Sense strand starting at position 3247 of SEQ ID NO: 588944
ccacaaucugccuggaauc

SEQ ID NO: 900557 - RNA, 19 nt, Artificial Sequence
  Description of Artificial Sequence: Synthetic oligonucleotide
  Antisense strand to SEQ ID NO: 900556
gauuccaggcagauugugg

SEQ ID NO: 900558 - RNA, 19 nt, Artificial Sequence
  Description of Artificial Sequence: Synthetic oligonucleotide
  Sense strand starting at position 3284 of SEQ ID NO: 588944
uugggagucauuggcauua

SEQ ID NO: 900559 - RNA, 19 nt, Artificial Sequence
  Description of Artificial Sequence: Synthetic oligonucleotide
  Antisense strand to SEQ ID NO: 900558
uaaugccaaugacucccaa

SEQ ID NO: 900560 - RNA, 19 nt, Artificial Sequence
  Description of Artificial Sequence: Synthetic oligonucleotide
  Sense strand starting at position 3367 of SEQ ID NO: 588944
cagacaagucccuggaacu

SEQ ID NO: 900561 - RNA, 19 nt, Artificial Sequence
  Description of Artificial Sequence: Synthetic oligonucleotide
  Antisense strand to SEQ ID NO: 900560
aguuccagggacuugucug

SEQ ID NO: 900562 - RNA, 19 nt, Artificial Sequence
  Description of Artificial Sequence: Synthetic oligonucleotide
  Sense strand starting at position 3550 of SEQ ID NO: 588944
agcagaaaccuuuggguuu

SEQ ID NO: 900563 - RNA, 19 nt, Artificial Sequence
  Description of Artificial Sequence: Synthetic oligonucleotide
  Antisense strand to SEQ ID NO: 900562
aaacccaaagguuucugcu

SEQ ID NO: 900564 - RNA, 19 nt, Artificial Sequence
  Description of Artificial Sequence: Synthetic oligonucleotide
  Sense strand starting at position 3682 of SEQ ID NO: 588944
guccaagccgcuucuugau

SEQ ID NO: 900565 - RNA, 19 nt, Artificial Sequence
  Description of Artificial Sequence: Synthetic oligonucleotide
  Antisense strand to SEQ ID NO: 900564
aucaagaagcggcuuggac

SEQ ID NO: 900566 - RNA, 19 nt, Artificial Sequence
  Description of Artificial Sequence: Synthetic oligonucleotide
  Sense strand starting at position 3806 of SEQ ID NO: 588944
guuagaucagaucacucuu

SEQ ID NO: 900567 - RNA, 19 nt, Artificial Sequence
  Description of Artificial Sequence: Synthetic oligonucleotide
  Antisense strand to SEQ ID NO: 900566
aagagugaucugaucuaac

SEQ ID NO: 900568 - RNA, 19 nt, Artificial Sequence
  Description of Artificial Sequence: Synthetic oligonucleotide
  Sense strand starting at position 17 of SEQ ID NO: 588945
ccugguacaugguuaaaua

SEQ ID NO: 900569 - RNA, 19 nt, Artificial Sequence
  Description of Artificial Sequence: Synthetic oligonucleotide
  Antisense strand to SEQ ID NO: 900568
uauuuaaccauguaccagg

SEQ ID NO: 900570 - RNA, 19 nt, Artificial Sequence
  Description of Artificial Sequence: Synthetic oligonucleotide
  Sense strand starting at position 29 of SEQ ID NO: 588945
uuaaauacguaugcucaaa

SEQ ID NO: 900571 - RNA, 19 nt, Artificial Sequence
  Description of Artificial Sequence: Synthetic oligonucleotide
  Antisense strand to SEQ ID NO: 900570
uuugagcauacguauuuaa

SEQ ID NO: 900572 - RNA, 19 nt, Artificial Sequence
  Description of Artificial Sequence: Synthetic oligonucleotide
  Sense strand starting at position 106 of SEQ ID NO: 588945
agaugcauuguguaccuca

SEQ ID NO: 900573 - RNA, 19 nt, Artificial Sequence
  Description of Artificial Sequence: Synthetic oligonucleotide
  Antisense strand to SEQ ID NO: 900572
ugagguacacaaugcaucu

SEQ ID NO: 900574 - RNA, 19 nt, Artificial Sequence
  Description of Artificial Sequence: Synthetic oligonucleotide
  Sense strand starting at position 111 of SEQ ID NO: 588945
cauuguguaccucaguaua

SEQ ID NO: 900575 - RNA, 19 nt, Artificial Sequence
  Description of Artificial Sequence: Synthetic oligonucleotide
  Antisense strand to SEQ ID NO: 900574
uauacugagguacacaaug

SEQ ID NO: 900576 - RNA, 19 nt, Artificial Sequence
  Description of Artificial Sequence: Synthetic oligonucleotide
  Sense strand starting at position 114 of SEQ ID NO: 588945
uguguaccucaguauacaa

SEQ ID NO: 900577 - RNA, 19 nt, Artificial Sequence
  Description of Artificial Sequence: Synthetic oligonucleotide
  Antisense strand to SEQ ID NO: 900576
uuguauacugagguacaca

SEQ ID NO: 900578 - RNA, 19 nt, Artificial Sequence
  Description of Artificial Sequence: Synthetic oligonucleotide
  Sense strand starting at position 125 of SEQ ID NO: 588945
guauacaaucugcacagaa

SEQ ID NO: 900579 - RNA, 19 nt, Artificial Sequence
  Description of Artificial Sequence: Synthetic oligonucleotide
  Antisense strand to SEQ ID NO: 900578
uucugugcagauuguauac

SEQ ID NO: 900580 - RNA, 19 nt, Artificial Sequence
  Description of Artificial Sequence: Synthetic oligonucleotide
  Sense strand starting at position 207 of SEQ ID NO: 588945
cgccuuuaucaagaaguug

SEQ ID NO: 900581 - RNA, 19 nt, Artificial Sequence
  Description of Artificial Sequence: Synthetic oligonucleotide
  Antisense strand to SEQ ID NO: 900580
caacuucuugauaaaggcg

SEQ ID NO: 900582 - RNA, 19 nt, Artificial Sequence
  Description of Artificial Sequence: Synthetic oligonucleotide
  Sense strand starting at position 370 of SEQ ID NO: 588945
cuaguuaccuuagucuuaa

SEQ ID NO: 900583 - RNA, 19 nt, Artificial Sequence
  Description of Artificial Sequence: Synthetic oligonucleotide
  Antisense strand to SEQ ID NO: 900582
uuaagacuaagguaacuag

SEQ ID NO: 900584 - RNA, 19 nt, Artificial Sequence
  Description of Artificial Sequence: Synthetic oligonucleotide
  Sense strand starting at position 550 of SEQ ID NO: 588945
uuauuacuagcugguacua

SEQ ID NO: 900585 - RNA, 19 nt, Artificial Sequence
  Description of Artificial Sequence: Synthetic oligonucleotide
  Antisense strand to SEQ ID NO: 900584
uaguaccagcuaguaauaa

SEQ ID NO: 900586 - RNA, 19 nt, Artificial Sequence
  Description of Artificial Sequence: Synthetic oligonucleotide
  Sense strand starting at position 559 of SEQ ID NO: 588945
gcugguacuagacacgaaa

SEQ ID NO: 900587 - RNA, 19 nt, Artificial Sequence
  Description of Artificial Sequence: Synthetic oligonucleotide
  Antisense strand to SEQ ID NO: 900586
uuucgugucuaguaccagc

SEQ ID NO: 900588 - RNA, 19 nt, Artificial Sequence
  Description of Artificial Sequence: Synthetic oligonucleotide
  Sense strand starting at position 578 of SEQ ID NO: 588945
guaaaugguacaggacauu

SEQ ID NO: 900589 - RNA, 19 nt, Artificial Sequence
  Description of Artificial Sequence: Synthetic oligonucleotide
  Antisense strand to SEQ ID NO: 900588
aauguccuguaccauuuac

SEQ ID NO: 900590 - RNA, 19 nt, Artificial Sequence
  Description of Artificial Sequence: Synthetic oligonucleotide
  Sense strand starting at position 725 of SEQ ID NO: 588945
aaugcuuucucuguuagga

SEQ ID NO: 900591 - RNA, 19 nt, Artificial Sequence
  Description of Artificial Sequence: Synthetic oligonucleotide
  Antisense strand to SEQ ID NO: 900590
uccuaacagagaaagcauu

SEQ ID NO: 900592 - RNA, 19 nt, Artificial Sequence
  Description of Artificial Sequence: Synthetic oligonucleotide
  Sense strand starting at position 972 of SEQ ID NO: 588945
aucacuaguccuuagguuu

SEQ ID NO: 900593 - RNA, 19 nt, Artificial Sequence
  Description of Artificial Sequence: Synthetic oligonucleotide
  Antisense strand to SEQ ID NO: 900592
aaaccuaaggacuagugau

SEQ ID NO: 900594 - RNA, 19 nt, Artificial Sequence
  Description of Artificial Sequence: Synthetic oligonucleotide
  Sense strand starting at position 1402 of SEQ ID NO: 588945
uccguauucgguccugcau

SEQ ID NO: 900595 - RNA, 19 nt, Artificial Sequence
  Description of Artificial Sequence: Synthetic oligonucleotide
  Antisense strand to SEQ ID NO: 900594
augcaggaccgaauacgga

SEQ ID NO: 900596 - RNA, 19 nt, Artificial Sequence
  Description of Artificial Sequence: Synthetic oligonucleotide
  Sense strand starting at position 2140 of SEQ ID NO: 588945
gcauaaguccggcccguaa

SEQ ID NO: 900597 - RNA, 19 nt, Artificial Sequence
  Description of Artificial Sequence: Synthetic oligonucleotide
  Antisense strand to SEQ ID NO: 900596
uuacgggccggacuuaugc

SEQ ID NO: 900598 - RNA, 19 nt, Artificial Sequence
  Description of Artificial Sequence: Synthetic oligonucleotide
  Sense strand starting at position 2180 of SEQ ID NO: 588945
gggaugugggccugguuau

SEQ ID NO: 900599 - RNA, 19 nt, Artificial Sequence
  Description of Artificial Sequence: Synthetic oligonucleotide
  Antisense strand to SEQ ID NO: 900598
auaaccaggcccacauccc

SEQ ID NO: 900600 - RNA, 19 nt, Artificial Sequence
  Description of Artificial Sequence: Synthetic oligonucleotide
  Sense strand starting at position 2181 of SEQ ID NO: 588945
ggaugugggccugguuaua

SEQ ID NO: 900601 - RNA, 19 nt, Artificial Sequence
  Description of Artificial Sequence: Synthetic oligonucleotide
  Antisense strand to SEQ ID NO: 900600
uauaaccaggcccacaucc

SEQ ID NO: 900602 - RNA, 19 nt, Artificial Sequence
  Description of Artificial Sequence: Synthetic oligonucleotide
  Sense strand starting at position 2296 of SEQ ID NO: 588945
aaaguuuaggacugcagaa

SEQ ID NO: 900603 - RNA, 19 nt, Artificial Sequence
  Description of Artificial Sequence: Synthetic oligonucleotide
  Antisense strand to SEQ ID NO: 900602
uucugcaguccuaaacuuu

SEQ ID NO: 900604 - RNA, 19 nt, Artificial Sequence
  Description of Artificial Sequence: Synthetic oligonucleotide
  Sense strand starting at position 2329 of SEQ ID NO: 588945
ggacguuaaacugggcuaa

SEQ ID NO: 900605 - RNA, 19 nt, Artificial Sequence
  Description of Artificial Sequence: Synthetic oligonucleotide
  Antisense strand to SEQ ID NO: 900604
uuagcccaguuuaacgucc

SEQ ID NO: 900606 - RNA, 19 nt, Artificial Sequence
  Description of Artificial Sequence: Synthetic oligonucleotide
  Sense strand starting at position 2331 of SEQ ID NO: 588945
acguuaaacugggcuaaga

SEQ ID NO: 900607 - RNA, 19 nt, Artificial Sequence
  Description of Artificial Sequence: Synthetic oligonucleotide
  Antisense strand to SEQ ID NO: 900606
ucuuagcccaguuuaacgu

SEQ ID NO: 900608 - RNA, 19 nt, Artificial Sequence
  Description of Artificial Sequence: Synthetic oligonucleotide
  Sense strand starting at position 2392 of SEQ ID NO: 588945
guaucuagagccuggaagu

SEQ ID NO: 900609 - RNA, 19 nt, Artificial Sequence
  Description of Artificial Sequence: Synthetic oligonucleotide
  Antisense strand to SEQ ID NO: 900608
acuuccaggcucuagauac

SEQ ID NO: 900610 - RNA, 19 nt, Artificial Sequence
  Description of Artificial Sequence: Synthetic oligonucleotide
  Sense strand starting at position 2402 of SEQ ID NO: 588945
ccuggaagucuuggucaag

SEQ ID NO: 900611 - RNA, 19 nt, Artificial Sequence
  Description of Artificial Sequence: Synthetic oligonucleotide
  Antisense strand to SEQ ID NO: 900610
cuugaccaagacuuccagg

SEQ ID NO: 900612 - RNA, 19 nt, Artificial Sequence
  Description of Artificial Sequence: Synthetic oligonucleotide
  Sense strand starting at position 2414 of SEQ ID NO: 588945
ggucaaggauucucccuaa

SEQ ID NO: 900613 - RNA, 19 nt, Artificial Sequence
  Description of Artificial Sequence: Synthetic oligonucleotide
  Antisense strand to SEQ ID NO: 900612
uuagggagaauccuugacc

SEQ ID NO: 900614 - RNA, 19 nt, Artificial Sequence
  Description of Artificial Sequence: Synthetic oligonucleotide
  Sense strand starting at position 2489 of SEQ ID NO: 588945
uucugaaguuaaguaaaga

SEQ ID NO: 900615 - RNA, 19 nt, Artificial Sequence
  Description of Artificial Sequence: Synthetic oligonucleotide
  Antisense strand to SEQ ID NO: 900614
ucuuuacuuaacuucagaa

SEQ ID NO: 900616 - RNA, 19 nt, Artificial Sequence
  Description of Artificial Sequence: Synthetic oligonucleotide
  Sense strand starting at position 2576 of SEQ ID NO: 588945
gcaugauggcauggaagaa

SEQ ID NO: 900617 - RNA, 19 nt, Artificial Sequence
  Description of Artificial Sequence: Synthetic oligonucleotide
  Antisense strand to SEQ ID NO: 900616
uucuuccaugccaucaugc

SEQ ID NO: 900618 - RNA, 19 nt, Artificial Sequence
  Description of Artificial Sequence: Synthetic oligonucleotide
  Sense strand starting at position 2636 of SEQ ID NO: 588945
gucuacaccucaccagaua

SEQ ID NO: 900619 - RNA, 19 nt, Artificial Sequence
  Description of Artificial Sequence: Synthetic oligonucleotide
  Antisense strand to SEQ ID NO: 900618
uaucuggugagguguagac

SEQ ID NO: 900620 - RNA, 19 nt, Artificial Sequence
  Description of Artificial Sequence: Synthetic oligonucleotide
  Sense strand starting at position 2665 of SEQ ID NO: 588945
aguaaagcuagcgaagaua

SEQ ID NO: 900621 - RNA, 19 nt, Artificial Sequence
  Description of Artificial Sequence: Synthetic oligonucleotide
  Antisense strand to SEQ ID NO: 900620
uaucuucgcuagcuuuacu

SEQ ID NO: 900622 - RNA, 19 nt, Artificial Sequence
  Description of Artificial Sequence: Synthetic oligonucleotide
  Sense strand starting at position 2676 of SEQ ID NO: 588945
cgaagauauugacccucau

SEQ ID NO: 900623 - RNA, 19 nt, Artificial Sequence
  Description of Artificial Sequence: Synthetic oligonucleotide
  Antisense strand to SEQ ID NO: 900622
augagggucaauaucuucg

SEQ ID NO: 900624 - RNA, 19 nt, Artificial Sequence
  Description of Artificial Sequence: Synthetic oligonucleotide
  Sense strand starting at position 2691 of SEQ ID NO: 588945
ucauuauauugggugggaa

SEQ ID NO: 900625 - RNA, 19 nt, Artificial Sequence
  Description of Artificial Sequence: Synthetic oligonucleotide
  Antisense strand to SEQ ID NO: 900624
uucccacccaauauaauga

SEQ ID NO: 900626 - RNA, 19 nt, Artificial Sequence
  Description of Artificial Sequence: Synthetic oligonucleotide
  Sense strand starting at position 2693 of SEQ ID NO: 588945
auuauauugggugggaauu

SEQ ID NO: 900627 - RNA, 19 nt, Artificial Sequence
  Description of Artificial Sequence: Synthetic oligonucleotide
  Antisense strand to SEQ ID NO: 900626
aauucccacccaauauaau

SEQ ID NO: 900628 - RNA, 19 nt, Artificial Sequence
  Description of Artificial Sequence: Synthetic oligonucleotide
  Sense strand starting at position 2768 of SEQ ID NO: 588945
uguuccauaaucggagaua

SEQ ID NO: 900629 - RNA, 19 nt, Artificial Sequence
  Description of Artificial Sequence: Synthetic oligonucleotide
  Antisense strand to SEQ ID NO: 900628
uaucuccgauuauggaaca

SEQ ID NO: 900630 - RNA, 19 nt, Artificial Sequence
  Description of Artificial Sequence: Synthetic oligonucleotide
  Sense strand starting at position 2840 of SEQ ID NO: 588945
accacaaucugccuggaau

SEQ ID NO: 900631 - RNA, 19 nt, Artificial Sequence
  Description of Artificial Sequence: Synthetic oligonucleotide
  Antisense strand to SEQ ID NO: 900630
auuccaggcagauuguggu

SEQ ID NO: 900632 - RNA, 19 nt, Artificial Sequence
  Description of Artificial Sequence: Synthetic oligonucleotide
  Sense strand starting at position 2841 of SEQ ID NO: 588945
ccacaaucugccuggaauc

SEQ ID NO: 900633 - RNA, 19 nt, Artificial Sequence
  Description of Artificial Sequence: Synthetic oligonucleotide
  Antisense strand to SEQ ID NO: 900632
gauuccaggcagauugugg

SEQ ID NO: 900634 - RNA, 19 nt, Artificial Sequence
  Description of Artificial Sequence: Synthetic oligonucleotide
  Sense strand starting at position 2878 of SEQ ID NO: 588945
uugggagucauuggcauua

SEQ ID NO: 900635 - RNA, 19 nt, Artificial Sequence
  Description of Artificial Sequence: Synthetic oligonucleotide
  Antisense strand to SEQ ID NO: 900634
uaaugccaaugacucccaa

SEQ ID NO: 900636 - RNA, 19 nt, Artificial Sequence
  Description of Artificial Sequence: Synthetic oligonucleotide
  Sense strand starting at position 2961 of SEQ ID NO: 588945
cagacaagucccuggaacu

SEQ ID NO: 900637 - RNA, 19 nt, Artificial Sequence
  Description of Artificial Sequence: Synthetic oligonucleotide
  Antisense strand to SEQ ID NO: 900636
aguuccagggacuugucug

SEQ ID NO: 900638 - RNA, 19 nt, Artificial Sequence
  Description of Artificial Sequence: Synthetic oligonucleotide
  Sense strand starting at position 3144 of SEQ ID NO: 588945
agcagaaaccuuuggguuu

SEQ ID NO: 900639 - RNA, 19 nt, Artificial Sequence
  Description of Artificial Sequence: Synthetic oligonucleotide
  Antisense strand to SEQ ID NO: 900638
aaacccaaagguuucugcu

SEQ ID NO: 900640 - RNA, 19 nt, Artificial Sequence
  Description of Artificial Sequence: Synthetic oligonucleotide
  Sense strand starting at position 3276 of SEQ ID NO: 588945
guccaagccgcuucuugau

SEQ ID NO: 900641 - RNA, 19 nt, Artificial Sequence
  Description of Artificial Sequence: Synthetic oligonucleotide
  Antisense strand to SEQ ID NO: 900640
aucaagaagcggcuuggac

SEQ ID NO: 900642 - RNA, 19 nt, Artificial Sequence
  Description of Artificial Sequence: Synthetic oligonucleotide
  Sense strand starting at position 3285 of SEQ ID NO: 588945
gcuucuugaucacugcaaa

SEQ ID NO: 900643 - RNA, 19 nt, Artificial Sequence
  Description of Artificial Sequence: Synthetic oligonucleotide
  Antisense strand to SEQ ID NO: 900642
uuugcagugaucaagaagc

SEQ ID NO: 900644 - RNA, 19 nt, Artificial Sequence
  Description of Artificial Sequence: Synthetic oligonucleotide
  Sense strand starting at position 3400 of SEQ ID NO: 588945
guuagaucagaucacucuu

SEQ ID NO: 900645 - RNA, 19 nt, Artificial Sequence
  Description of Artificial Sequence: Synthetic oligonucleotide
  Antisense strand to SEQ ID NO: 900644
aagagugaucugaucuaac

SEQ ID NO: 900646 - RNA, 19 nt, Artificial Sequence
  Description of Artificial Sequence: Synthetic oligonucleotide
  Sense strand starting at position 3619 of SEQ ID NO: 588945
ugaagucucagggagcuuu

SEQ ID NO: 900647 - RNA, 19 nt, Artificial Sequence
  Description of Artificial Sequence: Synthetic oligonucleotide
  Antisense strand to SEQ ID NO: 900646
aaagcucccugagacuuca

SEQ ID NO: 900648 - RNA, 19 nt, Artificial Sequence
  Description of Artificial Sequence: Synthetic oligonucleotide
  Sense strand starting at position 182 of SEQ ID NO: 588946
cccaaauguccacacaguu

SEQ ID NO: 900649 - RNA, 19 nt, Artificial Sequence
  Description of Artificial Sequence: Synthetic oligonucleotide
  Antisense strand to SEQ ID NO: 900648
aacuguguggacauuuggg

SEQ ID NO: 900650 - RNA, 19 nt, Artificial Sequence
  Description of Artificial Sequence: Synthetic oligonucleotide
  Sense strand starting at position 213 of SEQ ID NO: 588946
ucccuaggccaaugucaaa

SEQ ID NO: 900651 - RNA, 19 nt, Artificial Sequence
  Description of Artificial Sequence: Synthetic oligonucleotide
  Antisense strand to SEQ ID NO: 900650
uuugacauuggccuaggga

SEQ ID NO: 900652 - RNA, 19 nt, Artificial Sequence
  Description of Artificial Sequence: Synthetic oligonucleotide
  Sense strand starting at position 267 of SEQ ID NO: 588946
gggacucaacaaugugcua

SEQ ID NO: 900653 - RNA, 19 nt, Artificial Sequence
  Description of Artificial Sequence: Synthetic oligonucleotide
  Antisense strand to SEQ ID NO: 900652
uagcacauuguugaguccc

SEQ ID NO: 900654 - RNA, 19 nt, Artificial Sequence
  Description of Artificial Sequence: Synthetic oligonucleotide
  Sense strand starting at position 291 of SEQ ID NO: 588946
cggaaugaagccuaucuga

SEQ ID NO: 900655 - RNA, 19 nt, Artificial Sequence
  Description of Artificial Sequence: Synthetic oligonucleotide
  Antisense strand to SEQ ID NO: 900654
ucagauaggcuucauuccg

SEQ ID NO: 900656 - RNA, 19 nt, Artificial Sequence
  Description of Artificial Sequence: Synthetic oligonucleotide
  Sense strand starting at position 352 of SEQ ID NO: 588946
ccaauugcucaucagacga

SEQ ID NO: 900657 - RNA, 19 nt, Artificial Sequence
  Description of Artificial Sequence: Synthetic oligonucleotide
  Antisense strand to SEQ ID NO: 900656
ucgucugaugagcaauugg

SEQ ID NO: 900658 - RNA, 19 nt, Artificial Sequence
  Description of Artificial Sequence: Synthetic oligonucleotide
  Sense strand starting at position 385 of SEQ ID NO: 588946
ugggcuacgccagauagua

SEQ ID NO: 900659 - RNA, 19 nt, Artificial Sequence
  Description of Artificial Sequence: Synthetic oligonucleotide
  Antisense strand to SEQ ID NO: 900658
uacuaucuggcguagccca

SEQ ID NO: 900660 - RNA, 19 nt, Artificial Sequence
  Description of Artificial Sequence: Synthetic oligonucleotide
  Sense strand starting at position 484 of SEQ ID NO: 588946
uuaaguuauuggguacuua

SEQ ID NO: 900661 - RNA, 19 nt, Artificial Sequence
  Description of Artificial Sequence: Synthetic oligonucleotide
  Antisense strand to SEQ ID NO: 900660
uaaguacccaauaacuuaa

SEQ ID NO: 900662 - RNA, 19 nt, Artificial Sequence
  Description of Artificial Sequence: Synthetic oligonucleotide
  Sense strand starting at position 485 of SEQ ID NO: 588946
uaaguuauuggguacuuaa

SEQ ID NO: 900663 - RNA, 19 nt, Artificial Sequence
  Description of Artificial Sequence: Synthetic oligonucleotide
  Antisense strand to SEQ ID NO: 900662
uuaaguacccaauaacuua

SEQ ID NO: 900664 - RNA, 19 nt, Artificial Sequence
  Description of Artificial Sequence: Synthetic oligonucleotide
  Sense strand starting at position 548 of SEQ ID NO: 588946
ccacuacuccugggaguuu

SEQ ID NO: 900665 - RNA, 19 nt, Artificial Sequence
  Description of Artificial Sequence: Synthetic oligonucleotide
  Antisense strand to SEQ ID NO: 900664
aaacucccaggaguagugg

SEQ ID NO: 900666 - RNA, 19 nt, Artificial Sequence
  Description of Artificial Sequence: Synthetic oligonucleotide
  Sense strand starting at position 564 of SEQ ID NO: 588946
uuuacuuguggugauuaaa

SEQ ID NO: 900667 - RNA, 19 nt, Artificial Sequence
  Description of Artificial Sequence: Synthetic oligonucleotide
  Antisense strand to SEQ ID NO: 900666
uuuaaucaccacaaguaaa

SEQ ID NO: 900668 - RNA, 19 nt, Artificial Sequence
  Description of Artificial Sequence: Synthetic oligonucleotide
  Sense strand starting at position 605 of SEQ ID NO: 588946
augcauuuacaucguagua

SEQ ID NO: 900669 - RNA, 19 nt, Artificial Sequence
  Description of Artificial Sequence: Synthetic oligonucleotide
  Antisense strand to SEQ ID NO: 900668
uacuacgauguaaaugcau

SEQ ID NO: 900670 - RNA, 19 nt, Artificial Sequence
  Description of Artificial Sequence: Synthetic oligonucleotide
  Sense strand starting at position 617 of SEQ ID NO: 588946
cguaguaaugcacaauaca

SEQ ID NO: 900671 - RNA, 19 nt, Artificial Sequence
  Description of Artificial Sequence: Synthetic oligonucleotide
  Antisense strand to SEQ ID NO: 900670
uguauugugcauuacuacg

SEQ ID NO: 900672 - RNA, 19 nt, Artificial Sequence
  Description of Artificial Sequence: Synthetic oligonucleotide
  Sense strand starting at position 644 of SEQ ID NO: 588946
agcuauuaggacugauuau

SEQ ID NO: 900673 - RNA, 19 nt, Artificial Sequence
  Description of Artificial Sequence: Synthetic oligonucleotide
  Antisense strand to SEQ ID NO: 900672
auaaucaguccuaauagcu

SEQ ID NO: 900674 - RNA, 19 nt, Artificial Sequence
  Description of Artificial Sequence: Synthetic oligonucleotide
  Sense strand starting at position 653 of SEQ ID NO: 588946
gacugauuauaaucgucac

SEQ ID NO: 900675 - RNA, 19 nt, Artificial Sequence
  Description of Artificial Sequence: Synthetic oligonucleotide
  Antisense strand to SEQ ID NO: 900674
gugacgauuauaaucaguc

SEQ ID NO: 900676 - RNA, 19 nt, Artificial Sequence
  Description of Artificial Sequence: Synthetic oligonucleotide
  Sense strand starting at position 819 of SEQ ID NO: 588946
acucaucccuuuguggaua

SEQ ID NO: 900677 - RNA, 19 nt, Artificial Sequence
  Description of Artificial Sequence: Synthetic oligonucleotide
  Antisense strand to SEQ ID NO: 900676
uauccacaaagggaugagu

SEQ ID NO: 900678 - RNA, 19 nt, Artificial Sequence
  Description of Artificial Sequence: Synthetic oligonucleotide
  Sense strand starting at position 951 of SEQ ID NO: 588946
ggaacaacgugagugaugu

SEQ ID NO: 900679 - RNA, 19 nt, Artificial Sequence
  Description of Artificial Sequence: Synthetic oligonucleotide
  Antisense strand to SEQ ID NO: 900678
acaucacucacguuguucc

SEQ ID NO: 900680 - RNA, 19 nt, Artificial Sequence
  Description of Artificial Sequence: Synthetic oligonucleotide
  Sense strand starting at position 952 of SEQ ID NO: 588946
gaacaacgugagugauguu

SEQ ID NO: 900681 - RNA, 19 nt, Artificial Sequence
  Description of Artificial Sequence: Synthetic oligonucleotide
  Antisense strand to SEQ ID NO: 900680
aacaucacucacguuguuc

SEQ ID NO: 900682 - RNA, 19 nt, Artificial Sequence
  Description of Artificial Sequence: Synthetic oligonucleotide
  Sense strand starting at position 961 of SEQ ID NO: 588946
gagugauguuccuucgagg

SEQ ID NO: 900683 - RNA, 19 nt, Artificial Sequence
  Description of Artificial Sequence: Synthetic oligonucleotide
  Antisense strand to SEQ ID NO: 900682
ccucgaaggaacaucacuc

SEQ ID NO: 900684 - RNA, 19 nt, Artificial Sequence
  Description of Artificial Sequence: Synthetic oligonucleotide
  Sense strand starting at position 966 of SEQ ID NO: 588946
auguuccuucgaggaaaua

SEQ ID NO: 900685 - RNA, 19 nt, Artificial Sequence
  Description of Artificial Sequence: Synthetic oligonucleotide
  Antisense strand to SEQ ID NO: 900684
uauuuccucgaaggaacau

SEQ ID NO: 900686 - RNA, 19 nt, Artificial Sequence
  Description of Artificial Sequence: Synthetic oligonucleotide
  Sense strand starting at position 967 of SEQ ID NO: 588946
uguuccuucgaggaaauaa

SEQ ID NO: 900687 - RNA, 19 nt, Artificial Sequence
  Description of Artificial Sequence: Synthetic oligonucleotide
  Antisense strand to SEQ ID NO: 900686
uuauuuccucgaaggaaca

SEQ ID NO: 900688 - RNA, 19 nt, Artificial Sequence
  Description of Artificial Sequence: Synthetic oligonucleotide
  Sense strand starting at position 1071 of SEQ ID NO: 588946
auccguagccgucugguua

SEQ ID NO: 900689 - RNA, 19 nt, Artificial Sequence
  Description of Artificial Sequence: Synthetic oligonucleotide
  Antisense strand to SEQ ID NO: 900688
uaaccagacggcuacggau

SEQ ID NO: 900690 - RNA, 19 nt, Artificial Sequence
  Description of Artificial Sequence: Synthetic oligonucleotide
  Sense strand starting at position 2603 of SEQ ID NO: 588946
gcgacucacucuccuauuu

SEQ ID NO: 900691 - RNA, 19 nt, Artificial Sequence
  Description of Artificial Sequence: Synthetic oligonucleotide
  Antisense strand to SEQ ID NO: 900690
aaauaggagagugagucgc

SEQ ID NO: 900692 - RNA, 19 nt, Artificial Sequence
  Description of Artificial Sequence: Synthetic oligonucleotide
  Sense strand starting at position 2894 of SEQ ID NO: 588946
gggagcagucaucauuacu

SEQ ID NO: 900693 - RNA, 19 nt, Artificial Sequence
  Description of Artificial Sequence: Synthetic oligonucleotide
  Antisense strand to SEQ ID NO: 900692
aguaaugaugacugcuccc

SEQ ID NO: 900694 - RNA, 19 nt, Artificial Sequence
  Description of Artificial Sequence: Synthetic oligonucleotide
  Sense strand starting at position 2924 of SEQ ID NO: 588946
cugacacugcuguauaaua

SEQ ID NO: 900695 - RNA, 19 nt, Artificial Sequence
  Description of Artificial Sequence: Synthetic oligonucleotide
  Antisense strand to SEQ ID NO: 900694
uauuauacagcagugucag

SEQ ID NO: 900696 - RNA, 19 nt, Artificial Sequence
  Description of Artificial Sequence: Synthetic oligonucleotide
  Sense strand starting at position 2936 of SEQ ID NO: 588946
uauaauaauccugaggugu

SEQ ID NO: 900697 - RNA, 19 nt, Artificial Sequence
  Description of Artificial Sequence: Synthetic oligonucleotide
  Antisense strand to SEQ ID NO: 900696
acaccucaggauuauuaua

SEQ ID NO: 900698 - RNA, 19 nt, Artificial Sequence
  Description of Artificial Sequence: Synthetic oligonucleotide
  Sense strand starting at position 3111 of SEQ ID NO: 588946
gaggcuguuacguagaaca

SEQ ID NO: 900699 - RNA, 19 nt, Artificial Sequence
  Description of Artificial Sequence: Synthetic oligonucleotide
  Antisense strand to SEQ ID NO: 900698
uguucuacguaacagccuc

SEQ ID NO: 900700 - RNA, 19 nt, Artificial Sequence
  Description of Artificial Sequence: Synthetic oligonucleotide
  Sense strand starting at position 3113 of SEQ ID NO: 588946
ggcuguuacguagaacaga

SEQ ID NO: 900701 - RNA, 19 nt, Artificial Sequence
  Description of Artificial Sequence: Synthetic oligonucleotide
  Antisense strand to SEQ ID NO: 900700
ucuguucuacguaacagcc

SEQ ID NO: 900702 - RNA, 19 nt, Artificial Sequence
  Description of Artificial Sequence: Synthetic oligonucleotide
  Sense strand starting at position 3176 of SEQ ID NO: 588946
ugugucauuugagcuuaga

SEQ ID NO: 900703 - RNA, 19 nt, Artificial Sequence
  Description of Artificial Sequence: Synthetic oligonucleotide
  Antisense strand to SEQ ID NO: 900702
ucuaagcucaaaugacaca

SEQ ID NO: 900704 - RNA, 19 nt, Artificial Sequence
  Description of Artificial Sequence: Synthetic oligonucleotide
  Sense strand starting at position 3214 of SEQ ID NO: 588946
caggaaucagaaugguucu

SEQ ID NO: 900705 - RNA, 19 nt, Artificial Sequence
  Description of Artificial Sequence: Synthetic oligonucleotide
  Antisense strand to SEQ ID NO: 900704
agaaccauucugauuccug

SEQ ID NO: 900706 - RNA, 19 nt, Artificial Sequence
  Description of Artificial Sequence: Synthetic oligonucleotide
  Sense strand starting at position 3217 of SEQ ID NO: 588946
gaaucagaaugguucugau

SEQ ID NO: 900707 - RNA, 19 nt, Artificial Sequence
  Description of Artificial Sequence: Synthetic oligonucleotide
  Antisense strand to SEQ ID NO: 900706
aucagaaccauucugauuc

SEQ ID NO: 900708 - RNA, 19 nt, Artificial Sequence
  Description of Artificial Sequence: Synthetic oligonucleotide
  Sense strand starting at position 3239 of SEQ ID NO: 588946
ugccaauuugugcacuacu

SEQ ID NO: 900709 - RNA, 19 nt, Artificial Sequence
  Description of Artificial Sequence: Synthetic oligonucleotide
  Antisense strand to SEQ ID NO: 900708
aguagugcacaaauuggca

SEQ ID NO: 900710 - RNA, 19 nt, Artificial Sequence
  Description of Artificial Sequence: Synthetic oligonucleotide
  Sense strand starting at position 3296 of SEQ ID NO: 588946
gcuuccuuccgggagauga

SEQ ID NO: 900711 - RNA, 19 nt, Artificial Sequence
  Description of Artificial Sequence: Synthetic oligonucleotide
  Antisense strand to SEQ ID NO: 900710
ucaucucccggaaggaagc

SEQ ID NO: 900712 - RNA, 19 nt, Artificial Sequence
  Description of Artificial Sequence: Synthetic oligonucleotide
  Sense strand starting at position 3330 of SEQ ID NO: 588946
ggauauuggagcugggauc

SEQ ID NO: 900713 - RNA, 19 nt, Artificial Sequence
  Description of Artificial Sequence: Synthetic oligonucleotide
  Antisense strand to SEQ ID NO: 900712
gaucccagcuccaauaucc

SEQ ID NO: 900714 - RNA, 19 nt, Artificial Sequence
  Description of Artificial Sequence: Synthetic oligonucleotide
  Sense strand starting at position 3783 of SEQ ID NO: 588946
gggauugaaucacuugucu

SEQ ID NO: 900715 - RNA, 19 nt, Artificial Sequence
  Description of Artificial Sequence: Synthetic oligonucleotide
  Antisense strand to SEQ ID NO: 900714
agacaagugauucaauccc

SEQ ID NO: 900716 - RNA, 19 nt, Artificial Sequence
  Description of Artificial Sequence: Synthetic oligonucleotide
  Sense strand starting at position 3808 of SEQ ID NO: 588946
ccuuaaaugacguaaugug

SEQ ID NO: 900717 - RNA, 19 nt, Artificial Sequence
  Description of Artificial Sequence: Synthetic oligonucleotide
  Antisense strand to SEQ ID NO: 900716
cacauuacgucauuuaagg

SEQ ID NO: 900718 - RNA, 19 nt, Artificial Sequence
  Description of Artificial Sequence: Synthetic oligonucleotide
  Sense strand starting at position 3887 of SEQ ID NO: 588946
cuuccagcucuguaugauu

SEQ ID NO: 900719 - RNA, 19 nt, Artificial Sequence
  Description of Artificial Sequence: Synthetic oligonucleotide
  Antisense strand to SEQ ID NO: 900718
aaucauacagagcuggaag

SEQ ID NO: 900720 - RNA, 19 nt, Artificial Sequence
  Description of Artificial Sequence: Synthetic oligonucleotide
  Sense strand starting at position 3892 of SEQ ID NO: 588946
agcucuguaugauucuaau

SEQ ID NO: 900721 - RNA, 19 nt, Artificial Sequence
  Description of Artificial Sequence: Synthetic oligonucleotide
  Antisense strand to SEQ ID NO: 900720
auuagaaucauacagagcu

SEQ ID NO: 900722 - RNA, 19 nt, Artificial Sequence
  Description of Artificial Sequence: Synthetic oligonucleotide
  Sense strand starting at position 3901 of SEQ ID NO: 588946
ugauucuaaucagcaugua

SEQ ID NO: 900723 - RNA, 19 nt, Artificial Sequence
  Description of Artificial Sequence: Synthetic oligonucleotide
  Antisense strand to SEQ ID NO: 900722
uacaugcugauuagaauca

SEQ ID NO: 900724 - RNA, 19 nt, Artificial Sequence
  Description of Artificial Sequence: Synthetic oligonucleotide
  Sense strand starting at position 3952 of SEQ ID NO: 588946
agccuagauuaaucagugu

SEQ ID NO: 900725 - RNA, 19 nt, Artificial Sequence
  Description of Artificial Sequence: Synthetic oligonucleotide
  Antisense strand to SEQ ID NO: 900724
acacugauuaaucuaggcu

SEQ ID NO: 900726 - RNA, 19 nt, Artificial Sequence
  Description of Artificial Sequence: Synthetic oligonucleotide
  Sense strand starting at position 3955 of SEQ ID NO: 588946
cuagauuaaucaguguuaa

SEQ ID NO: 900727 - RNA, 19 nt, Artificial Sequence
  Description of Artificial Sequence: Synthetic oligonucleotide
  Antisense strand to SEQ ID NO: 900726
uuaacacugauuaaucuag

SEQ ID NO: 900728 - RNA, 19 nt, Artificial Sequence
  Description of Artificial Sequence: Synthetic oligonucleotide
  Sense strand starting at position 25 of SEQ ID NO: 588951
aaguccuuugaagguaagu

SEQ ID NO: 900729 - RNA, 19 nt, Artificial Sequence
  Description of Artificial Sequence: Synthetic oligonucleotide
  Antisense strand to SEQ ID NO: 900728
acuuaccuucaaaggacuu

SEQ ID NO: 900730 - RNA, 19 nt, Artificial Sequence
  Description of Artificial Sequence: Synthetic oligonucleotide
  Sense strand starting at position 34 of SEQ ID NO: 588951
gaagguaagucucauuacu

SEQ ID NO: 900731 - RNA, 19 nt, Artificial Sequence
  Description of Artificial Sequence: Synthetic oligonucleotide
  Antisense strand to SEQ ID NO: 900730
aguaaugagacuuaccuuc

SEQ ID NO: 900732 - RNA, 19 nt, Artificial Sequence
  Description of Artificial Sequence: Synthetic oligonucleotide
  Sense strand starting at position 36 of SEQ ID NO: 588951
agguaagucucauuacuug

SEQ ID NO: 900733 - RNA, 19 nt, Artificial Sequence
  Description of Artificial Sequence: Synthetic oligonucleotide
  Antisense strand to SEQ ID NO: 900732
caaguaaugagacuuaccu

SEQ ID NO: 900734 - RNA, 19 nt, Artificial Sequence
  Description of Artificial Sequence: Synthetic oligonucleotide
  Sense strand starting at position 59 of SEQ ID NO: 588951
aacuaaggcugagauggau

SEQ ID NO: 900735 - RNA, 19 nt, Artificial Sequence
  Description of Artificial Sequence: Synthetic oligonucleotide
  Antisense strand to SEQ ID NO: 900734
auccaucucagccuuaguu

SEQ ID NO: 900736 - RNA, 19 nt, Artificial Sequence
  Description of Artificial Sequence: Synthetic oligonucleotide
  Sense strand starting at position 74 of SEQ ID NO: 588951
ggauauaaaugugacucca

SEQ ID NO: 900737 - RNA, 19 nt, Artificial Sequence
  Description of Artificial Sequence: Synthetic oligonucleotide
  Antisense strand to SEQ ID NO: 900736
uggagucacauuuauaucc

SEQ ID NO: 900738 - RNA, 19 nt, Artificial Sequence
  Description of Artificial Sequence: Synthetic oligonucleotide
  Sense strand starting at position 135 of SEQ ID NO: 588951
aggugagcuuucuucuuua

SEQ ID NO: 900739 - RNA, 19 nt, Artificial Sequence
  Description of Artificial Sequence: Synthetic oligonucleotide
  Antisense strand to SEQ ID NO: 900738
uaaagaagaaagcucaccu

SEQ ID NO: 900740 - RNA, 19 nt, Artificial Sequence
  Description of Artificial Sequence: Synthetic oligonucleotide
  Sense strand starting at position 185 of SEQ ID NO: 588951
aaugaugggcaauguuaua

SEQ ID NO: 900741 - RNA, 19 nt, Artificial Sequence
  Description of Artificial Sequence: Synthetic oligonucleotide
  Antisense strand to SEQ ID NO: 900740
uauaacauugcccaucauu

SEQ ID NO: 900742 - RNA, 19 nt, Artificial Sequence
  Description of Artificial Sequence: Synthetic oligonucleotide
  Sense strand starting at position 190 of SEQ ID NO: 588951
ugggcaauguuauaagcau

SEQ ID NO: 900743 - RNA, 19 nt, Artificial Sequence
  Description of Artificial Sequence: Synthetic oligonucleotide
  Antisense strand to SEQ ID NO: 900742
augcuuauaacauugccca

SEQ ID NO: 900744 - RNA, 19 nt, Artificial Sequence
  Description of Artificial Sequence: Synthetic oligonucleotide
  Sense strand starting at position 208 of SEQ ID NO: 588951
ucuagccuuccuuaaugga

SEQ ID NO: 900745 - RNA, 19 nt, Artificial Sequence
  Description of Artificial Sequence: Synthetic oligonucleotide
  Antisense strand to SEQ ID NO: 900744
uccauuaaggaaggcuaga

SEQ ID NO: 900746 - RNA, 19 nt, Artificial Sequence
  Description of Artificial Sequence: Synthetic oligonucleotide
  Sense strand starting at position 311 of SEQ ID NO: 588951
ugagacaucgauugaacca

SEQ ID NO: 900747 - RNA, 19 nt, Artificial Sequence
  Description of Artificial Sequence: Synthetic oligonucleotide
  Antisense strand to SEQ ID NO: 900746
ugguucaaucgaugucuca

SEQ ID NO: 900748 - RNA, 19 nt, Artificial Sequence
  Description of Artificial Sequence: Synthetic oligonucleotide
  Sense strand starting at position 335 of SEQ ID NO: 588951
ucagcucagucugcugaaa

SEQ ID NO: 900749 - RNA, 19 nt, Artificial Sequence
  Description of Artificial Sequence: Synthetic oligonucleotide
  Antisense strand to SEQ ID NO: 900748
uuucagcagacugagcuga

SEQ ID NO: 900750 - RNA, 19 nt, Artificial Sequence
  Description of Artificial Sequence: Synthetic oligonucleotide
  Sense strand starting at position 367 of SEQ ID NO: 588951
agugcaaauauugacgauu

SEQ ID NO: 900751 - RNA, 19 nt, Artificial Sequence
  Description of Artificial Sequence: Synthetic oligonucleotide
  Antisense strand to SEQ ID NO: 900750
aaucgucaauauuugcacu

SEQ ID NO: 900752 - RNA, 19 nt, Artificial Sequence
  Description of Artificial Sequence: Synthetic oligonucleotide
  Sense strand starting at position 376 of SEQ ID NO: 588951
auugacgauucucaugcaa

SEQ ID NO: 900753 - RNA, 19 nt, Artificial Sequence
  Description of Artificial Sequence: Synthetic oligonucleotide
  Antisense strand to SEQ ID NO: 900752
uugcaugagaaucgucaau

SEQ ID NO: 900754 - RNA, 19 nt, Artificial Sequence
  Description of Artificial Sequence: Synthetic oligonucleotide
  Sense strand starting at position 516 of SEQ ID NO: 588951
aaugacaggucuuaacuga

SEQ ID NO: 900755 - RNA, 19 nt, Artificial Sequence
  Description of Artificial Sequence: Synthetic oligonucleotide
  Antisense strand to SEQ ID NO: 900754
ucaguuaagaccugucauu

SEQ ID NO: 900756 - RNA, 19 nt, Artificial Sequence
  Description of Artificial Sequence: Synthetic oligonucleotide
  Sense strand starting at position 523 of SEQ ID NO: 588951
ggucuuaacugagacucca

SEQ ID NO: 900757 - RNA, 19 nt, Artificial Sequence
  Description of Artificial Sequence: Synthetic oligonucleotide
  Antisense strand to SEQ ID NO: 900756
uggagucucaguuaagacc

SEQ ID NO: 900758 - RNA, 19 nt, Artificial Sequence
  Description of Artificial Sequence: Synthetic oligonucleotide
  Sense strand starting at position 642 of SEQ ID NO: 588951
cggacacgcaccugugaua

SEQ ID NO: 900759 - RNA, 19 nt, Artificial Sequence
  Description of Artificial Sequence: Synthetic oligonucleotide
  Antisense strand to SEQ ID NO: 900758
uaucacaggugcguguccg

SEQ ID NO: 900760 - RNA, 19 nt, Artificial Sequence
  Description of Artificial Sequence: Synthetic oligonucleotide
  Sense strand starting at position 801 of SEQ ID NO: 588951
ugaauaaagcaguaaguca

SEQ ID NO: 900761 - RNA, 19 nt, Artificial Sequence
  Description of Artificial Sequence: Synthetic oligonucleotide
  Antisense strand to SEQ ID NO: 900760
ugacuuacugcuuuauuca

SEQ ID NO: 900762 - RNA, 19 nt, Artificial Sequence
  Description of Artificial Sequence: Synthetic oligonucleotide
  Sense strand starting at position 1186 of SEQ ID NO: 588951
gccgcauugacauguaaau

SEQ ID NO: 900763 - RNA, 19 nt, Artificial Sequence
  Description of Artificial Sequence: Synthetic oligonucleotide
  Antisense strand to SEQ ID NO: 900762
auuuacaugucaaugcggc

SEQ ID NO: 900764 - RNA, 19 nt, Artificial Sequence
  Description of Artificial Sequence: Synthetic oligonucleotide
  Sense strand starting at position 1188 of SEQ ID NO: 588951
cgcauugacauguaaauag

SEQ ID NO: 900765 - RNA, 19 nt, Artificial Sequence
  Description of Artificial Sequence: Synthetic oligonucleotide
  Antisense strand to SEQ ID NO: 900764
cuauuuacaugucaaugcg

SEQ ID NO: 900766 - RNA, 19 nt, Artificial Sequence
  Description of Artificial Sequence: Synthetic oligonucleotide
  Sense strand starting at position 1359 of SEQ ID NO: 588951
uuaagaguuucggcccacu

SEQ ID NO: 900767 - RNA, 19 nt, Artificial Sequence
  Description of Artificial Sequence: Synthetic oligonucleotide
  Antisense strand to SEQ ID NO: 900766
agugggccgaaacucuuaa

SEQ ID NO: 900768 - RNA, 19 nt, Artificial Sequence
  Description of Artificial Sequence: Synthetic oligonucleotide
  Sense strand starting at position 1620 of SEQ ID NO: 588951
cuuuaaucccgccgaggaa

SEQ ID NO: 900769 - RNA, 19 nt, Artificial Sequence
  Description of Artificial Sequence: Synthetic oligonucleotide
  Antisense strand to SEQ ID NO: 900768
uuccucggcgggauuaaag

SEQ ID NO: 900770 - RNA, 19 nt, Artificial Sequence
  Description of Artificial Sequence: Synthetic oligonucleotide
  Sense strand starting at position 1621 of SEQ ID NO: 588951
uuuaaucccgccgaggaaa

SEQ ID NO: 900771 - RNA, 19 nt, Artificial Sequence
  Description of Artificial Sequence: Synthetic oligonucleotide
  Antisense strand to SEQ ID NO: 900770
uuuccucggcgggauuaaa

SEQ ID NO: 900772 - RNA, 19 nt, Artificial Sequence
  Description of Artificial Sequence: Synthetic oligonucleotide
  Sense strand starting at position 1948 of SEQ ID NO: 588951
gccaguccugggcaaacaa

SEQ ID NO: 900773 - RNA, 19 nt, Artificial Sequence
  Description of Artificial Sequence: Synthetic oligonucleotide
  Antisense strand to SEQ ID NO: 900772
uuguuugcccaggacuggc

SEQ ID NO: 900774 - RNA, 19 nt, Artificial Sequence
  Description of Artificial Sequence: Synthetic oligonucleotide
  Sense strand starting at position 2098 of SEQ ID NO: 588951
gggcgacucccgcaagauu

SEQ ID NO: 900775 - RNA, 19 nt, Artificial Sequence
  Description of Artificial Sequence: Synthetic oligonucleotide
  Antisense strand to SEQ ID NO: 900774
aaucuugcgggagucgccc

SEQ ID NO: 900776 - RNA, 19 nt, Artificial Sequence
  Description of Artificial Sequence: Synthetic oligonucleotide
  Sense strand starting at position 2109 of SEQ ID NO: 588951
gcaagauucggcugcgccu

SEQ ID NO: 900777 - RNA, 19 nt, Artificial Sequence
  Description of Artificial Sequence: Synthetic oligonucleotide
  Antisense strand to SEQ ID NO: 900776
aggcgcagccgaaucuugc

SEQ ID NO: 900778 - RNA, 19 nt, Artificial Sequence
  Description of Artificial Sequence: Synthetic oligonucleotide
  Sense strand starting at position 2490 of SEQ ID NO: 588951
ucgugugcuucuccgcaaa

SEQ ID NO: 900779 - RNA, 19 nt, Artificial Sequence
  Description of Artificial Sequence: Synthetic oligonucleotide
  Antisense strand to SEQ ID NO: 900778
uuugcggagaagcacacga

SEQ ID NO: 900780 - RNA, 19 nt, Artificial Sequence
  Description of Artificial Sequence: Synthetic oligonucleotide
  Sense strand starting at position 2631 of SEQ ID NO: 588951
gggcgaguccagaguaguc

SEQ ID NO: 900781 - RNA, 19 nt, Artificial Sequence
  Description of Artificial Sequence: Synthetic oligonucleotide
  Antisense strand to SEQ ID NO: 900780
gacuacucuggacucgccc

SEQ ID NO: 900782 - RNA, 19 nt, Artificial Sequence
  Description of Artificial Sequence: Synthetic oligonucleotide
  Sense strand starting at position 3305 of SEQ ID NO: 588951
ugggcugucaaucaaagua

SEQ ID NO: 900783 - RNA, 19 nt, Artificial Sequence
  Description of Artificial Sequence: Synthetic oligonucleotide
  Antisense strand to SEQ ID NO: 900782
uacuuugauugacagccca

SEQ ID NO: 900784 - RNA, 19 nt, Artificial Sequence
  Description of Artificial Sequence: Synthetic oligonucleotide
  Sense strand starting at position 3397 of SEQ ID NO: 588951
gagggcucgaguuagcaaa

SEQ ID NO: 900785 - RNA, 19 nt, Artificial Sequence
  Description of Artificial Sequence: Synthetic oligonucleotide
  Antisense strand to SEQ ID NO: 900784
uuugcuaacucgagcccuc

SEQ ID NO: 900786 - RNA, 19 nt, Artificial Sequence
  Description of Artificial Sequence: Synthetic oligonucleotide
  Sense strand starting at position 3495 of SEQ ID NO: 588951
guuucuuauuggaggcgga

SEQ ID NO: 900787 - RNA, 19 nt, Artificial Sequence
  Description of Artificial Sequence: Synthetic oligonucleotide
  Antisense strand to SEQ ID NO: 900786
uccgccuccaauaagaaac

SEQ ID NO: 900788 - RNA, 19 nt, Artificial Sequence
  Description of Artificial Sequence: Synthetic oligonucleotide
  Sense strand starting at position 3524 of SEQ ID NO: 588951
ugguaauucgagcaaaugu

SEQ ID NO: 900789 - RNA, 19 nt, Artificial Sequence
  Description of Artificial Sequence: Synthetic oligonucleotide
  Antisense strand to SEQ ID NO: 900788
acauuugcucgaauuacca

SEQ ID NO: 900790 - RNA, 19 nt, Artificial Sequence
  Description of Artificial Sequence: Synthetic oligonucleotide
  Sense strand starting at position 3663 of SEQ ID NO: 588951
cugugcacuuaguuggaaa

SEQ ID NO: 900791 - RNA, 19 nt, Artificial Sequence
  Description of Artificial Sequence: Synthetic oligonucleotide
  Antisense strand to SEQ ID NO: 900790
uuuccaacuaagugcacag

SEQ ID NO: 900792 - RNA, 19 nt, Artificial Sequence
  Description of Artificial Sequence: Synthetic oligonucleotide
  Sense strand starting at position 3664 of SEQ ID NO: 588951
ugugcacuuaguuggaaau

SEQ ID NO: 900793 - RNA, 19 nt, Artificial Sequence
  Description of Artificial Sequence: Synthetic oligonucleotide
  Antisense strand to SEQ ID NO: 900792
auuuccaacuaagugcaca

SEQ ID NO: 900794 - RNA, 19 nt, Artificial Sequence
  Description of Artificial Sequence: Synthetic oligonucleotide
  Sense strand starting at position 3670 of SEQ ID NO: 588951
cuuaguuggaaaugcguaa

SEQ ID NO: 900795 - RNA, 19 nt, Artificial Sequence
  Description of Artificial Sequence: Synthetic oligonucleotide
  Antisense strand to SEQ ID NO: 900794
uuacgcauuuccaacuaag

SEQ ID NO: 900796 - RNA, 19 nt, Artificial Sequence
  Description of Artificial Sequence: Synthetic oligonucleotide
  Sense strand starting at position 3674 of SEQ ID NO: 588951
guuggaaaugcguaaauga

SEQ ID NO: 900797 - RNA, 19 nt, Artificial Sequence
  Description of Artificial Sequence: Synthetic oligonucleotide
  Antisense strand to SEQ ID NO: 900796
ucauuuacgcauuuccaac

SEQ ID NO: 900798 - RNA, 19 nt, Artificial Sequence
  Description of Artificial Sequence: Synthetic oligonucleotide
  Sense strand starting at position 3834 of SEQ ID NO: 588951
cccguuuggcgggaaggau

SEQ ID NO: 900799 - RNA, 19 nt, Artificial Sequence
  Description of Artificial Sequence: Synthetic oligonucleotide
  Antisense strand to SEQ ID NO: 900798
auccuucccgccaaacggg

SEQ ID NO: 900800 - RNA, 19 nt, Artificial Sequence
  Description of Artificial Sequence: Synthetic oligonucleotide
  Sense strand starting at position 3846 of SEQ ID NO: 588951
gaaggauucccagggugcu

SEQ ID NO: 900801 - RNA, 19 nt, Artificial Sequence
  Description of Artificial Sequence: Synthetic oligonucleotide
  Antisense strand to SEQ ID NO: 900800
agcacccugggaauccuuc

SEQ ID NO: 900802 - RNA, 19 nt, Artificial Sequence
  Description of Artificial Sequence: Synthetic oligonucleotide
  Sense strand starting at position 3879 of SEQ ID NO: 588951
cgcguguccgcagaugaga

SEQ ID NO: 900803 - RNA, 19 nt, Artificial Sequence
  Description of Artificial Sequence: Synthetic oligonucleotide
  Antisense strand to SEQ ID NO: 900802
ucucaucugcggacacgcg

SEQ ID NO: 900804 - RNA, 19 nt, Artificial Sequence
  Description of Artificial Sequence: Synthetic oligonucleotide
  Sense strand starting at position 3912 of SEQ ID NO: 588951
cgcgaaaucccaggucuuc

SEQ ID NO: 900805 - RNA, 19 nt, Artificial Sequence
  Description of Artificial Sequence: Synthetic oligonucleotide
  Antisense strand to SEQ ID NO: 900804
gaagaccugggauuucgcg

SEQ ID NO: 900806 - RNA, 19 nt, Artificial Sequence
  Description of Artificial Sequence: Synthetic oligonucleotide
  Sense strand starting at position 3918 of SEQ ID NO: 588951
aucccaggucuucgucuua

SEQ ID NO: 900807 - RNA, 19 nt, Artificial Sequence
  Description of Artificial Sequence: Synthetic oligonucleotide
  Antisense strand to SEQ ID NO: 900806
uaagacgaagaccugggau

SEQ ID NO: 900808 - RNA, 19 nt, Artificial Sequence
  Description of Artificial Sequence: Synthetic oligonucleotide
  Sense strand starting at position 140 of SEQ ID NO: 588953
guggaauguagguacauga

SEQ ID NO: 900809 - RNA, 19 nt, Artificial Sequence
  Description of Artificial Sequence: Synthetic oligonucleotide
  Antisense strand to SEQ ID NO: 900808
ucauguaccuacauuccac

SEQ ID NO: 900810 - RNA, 19 nt, Artificial Sequence
  Description of Artificial Sequence: Synthetic oligonucleotide
  Sense strand starting at position 150 of SEQ ID NO: 588953
gguacaugacugggugaaa

SEQ ID NO: 900811 - RNA, 19 nt, Artificial Sequence
  Description of Artificial Sequence: Synthetic oligonucleotide
  Antisense strand to SEQ ID NO: 900810
uuucacccagucauguacc

SEQ ID NO: 900812 - RNA, 19 nt, Artificial Sequence
  Description of Artificial Sequence: Synthetic oligonucleotide
  Sense strand starting at position 229 of SEQ ID NO: 588953
guaggaugugcggauuaaa

SEQ ID NO: 900813 - RNA, 19 nt, Artificial Sequence
  Description of Artificial Sequence: Synthetic oligonucleotide
  Antisense strand to SEQ ID NO: 900812
uuuaauccgcacauccuac

SEQ ID NO: 900814 - RNA, 19 nt, Artificial Sequence
  Description of Artificial Sequence: Synthetic oligonucleotide
  Sense strand starting at position 232 of SEQ ID NO: 588953
ggaugugcggauuaaaggu

SEQ ID NO: 900815 - RNA, 19 nt, Artificial Sequence
  Description of Artificial Sequence: Synthetic oligonucleotide
  Antisense strand to SEQ ID NO: 900814
accuuuaauccgcacaucc

SEQ ID NO: 900816 - RNA, 19 nt, Artificial Sequence
  Description of Artificial Sequence: Synthetic oligonucleotide
  Sense strand starting at position 339 of SEQ ID NO: 588953
aggcaggaugggugugaaa

SEQ ID NO: 900817 - RNA, 19 nt, Artificial Sequence
  Description of Artificial Sequence: Synthetic oligonucleotide
  Antisense strand to SEQ ID NO: 900816
uuucacacccauccugccu

SEQ ID NO: 900818 - RNA, 19 nt, Artificial Sequence
  Description of Artificial Sequence: Synthetic oligonucleotide
  Sense strand starting at position 341 of SEQ ID NO: 588953
gcaggaugggugugaaaug

SEQ ID NO: 900819 - RNA, 19 nt, Artificial Sequence
  Description of Artificial Sequence: Synthetic oligonucleotide
  Antisense strand to SEQ ID NO: 900818
cauuucacacccauccugc

SEQ ID NO: 900820 - RNA, 19 nt, Artificial Sequence
  Description of Artificial Sequence: Synthetic oligonucleotide
  Sense strand starting at position 471 of SEQ ID NO: 588953
aacagugauuccuugguua

SEQ ID NO: 900821 - RNA, 19 nt, Artificial Sequence
  Description of Artificial Sequence: Synthetic oligonucleotide
  Antisense strand to SEQ ID NO: 900820
uaaccaaggaaucacuguu

SEQ ID NO: 900822 - RNA, 19 nt, Artificial Sequence
  Description of Artificial Sequence: Synthetic oligonucleotide
  Sense strand starting at position 578 of SEQ ID NO: 588953
cuauguugucuguaaacaa

SEQ ID NO: 900823 - RNA, 19 nt, Artificial Sequence
  Description of Artificial Sequence: Synthetic oligonucleotide
  Antisense strand to SEQ ID NO: 900822
uuguuuacagacaacauag

SEQ ID NO: 900824 - RNA, 19 nt, Artificial Sequence
  Description of Artificial Sequence: Synthetic oligonucleotide
  Sense strand starting at position 641 of SEQ ID NO: 588953
gggccuugggcuuagagaa

SEQ ID NO: 900825 - RNA, 19 nt, Artificial Sequence
  Description of Artificial Sequence: Synthetic oligonucleotide
  Antisense strand to SEQ ID NO: 900824
uucucuaagcccaaggccc

SEQ ID NO: 900826 - RNA, 19 nt, Artificial Sequence
  Description of Artificial Sequence: Synthetic oligonucleotide
  Sense strand starting at position 707 of SEQ ID NO: 588953
ccagaacgcuagccugaaa

SEQ ID NO: 900827 - RNA, 19 nt, Artificial Sequence
  Description of Artificial Sequence: Synthetic oligonucleotide
  Antisense strand to SEQ ID NO: 900826
uuucaggcuagcguucugg

SEQ ID NO: 900828 - RNA, 19 nt, Artificial Sequence
  Description of Artificial Sequence: Synthetic oligonucleotide
  Sense strand starting at position 710 of SEQ ID NO: 588953
gaacgcuagccugaaauua

SEQ ID NO: 900829 - RNA, 19 nt, Artificial Sequence
  Description of Artificial Sequence: Synthetic oligonucleotide
  Antisense strand to SEQ ID NO: 900828
uaauuucaggcuagcguuc

SEQ ID NO: 900830 - RNA, 19 nt, Artificial Sequence
  Description of Artificial Sequence: Synthetic oligonucleotide
  Sense strand starting at position 728 of SEQ ID NO: 588953
aguuuaucucucuggguaa

SEQ ID NO: 900831 - RNA, 19 nt, Artificial Sequence
  Description of Artificial Sequence: Synthetic oligonucleotide
  Antisense strand to SEQ ID NO: 900830
uuacccagagagauaaacu

SEQ ID NO: 900832 - RNA, 19 nt, Artificial Sequence
  Description of Artificial Sequence: Synthetic oligonucleotide
  Sense strand starting at position 986 of SEQ ID NO: 588953
cccugaaacugaucuaagu

SEQ ID NO: 900833 - RNA, 19 nt, Artificial Sequence
  Description of Artificial Sequence: Synthetic oligonucleotide
  Antisense strand to SEQ ID NO: 900832
acuuagaucaguuucaggg

SEQ ID NO: 900834 - RNA, 19 nt, Artificial Sequence
  Description of Artificial Sequence: Synthetic oligonucleotide
  Sense strand starting at position 1028 of SEQ ID NO: 588953
ugauguuaacccuaaaugu

SEQ ID NO: 900835 - RNA, 19 nt, Artificial Sequence
  Description of Artificial Sequence: Synthetic oligonucleotide
  Antisense strand to SEQ ID NO: 900834
acauuuaggguuaacauca

SEQ ID NO: 900836 - RNA, 19 nt, Artificial Sequence
  Description of Artificial Sequence: Synthetic oligonucleotide
  Sense strand starting at position 1233 of SEQ ID NO: 588953
acaagauaaugaccguaau

SEQ ID NO: 900837 - RNA, 19 nt, Artificial Sequence
  Description of Artificial Sequence: Synthetic oligonucleotide
  Antisense strand to SEQ ID NO: 900836
auuacggucauuaucuugu

SEQ ID NO: 900838 - RNA, 19 nt, Artificial Sequence
  Description of Artificial Sequence: Synthetic oligonucleotide
  Sense strand starting at position 1559 of SEQ ID NO: 588953
cgcugaccucuccaacuaa

SEQ ID NO: 900839 - RNA, 19 nt, Artificial Sequence
  Description of Artificial Sequence: Synthetic oligonucleotide
  Antisense strand to SEQ ID NO: 900838
uuaguuggagaggucagcg

SEQ ID NO: 900840 - RNA, 19 nt, Artificial Sequence
  Description of Artificial Sequence: Synthetic oligonucleotide
  Sense strand starting at position 2738 of SEQ ID NO: 588953
uauggaucuaggugagucu

SEQ ID NO: 900841 - RNA, 19 nt, Artificial Sequence
  Description of Artificial Sequence: Synthetic oligonucleotide
  Antisense strand to SEQ ID NO: 900840
agacucaccuagauccaua

SEQ ID NO: 900842 - RNA, 19 nt, Artificial Sequence
  Description of Artificial Sequence: Synthetic oligonucleotide
  Sense strand starting at position 2741 of SEQ ID NO: 588953
ggaucuaggugagucugaa

SEQ ID NO: 900843 - RNA, 19 nt, Artificial Sequence
  Description of Artificial Sequence: Synthetic oligonucleotide
  Antisense strand to SEQ ID NO: 900842
uucagacucaccuagaucc

SEQ ID NO: 900844 - RNA, 19 nt, Artificial Sequence
  Description of Artificial Sequence: Synthetic oligonucleotide
  Sense strand starting at position 2749 of SEQ ID NO: 588953
gugagucugaaauaaguuu

SEQ ID NO: 900845 - RNA, 19 nt, Artificial Sequence
  Description of Artificial Sequence: Synthetic oligonucleotide
  Antisense strand to SEQ ID NO: 900844
aaacuuauuucagacucac

SEQ ID NO: 900846 - RNA, 19 nt, Artificial Sequence
  Description of Artificial Sequence: Synthetic oligonucleotide
  Sense strand starting at position 2884 of SEQ ID NO: 588953
gcagguacuugacuugauu

SEQ ID NO: 900847 - RNA, 19 nt, Artificial Sequence
  Description of Artificial Sequence: Synthetic oligonucleotide
  Antisense strand to SEQ ID NO: 900846
aaucaagucaaguaccugc

SEQ ID NO: 900848 - RNA, 19 nt, Artificial Sequence
  Description of Artificial Sequence: Synthetic oligonucleotide
  Sense strand starting at position 2988 of SEQ ID NO: 588953
cuuguuacccuaggagauu

SEQ ID NO: 900849 - RNA, 19 nt, Artificial Sequence
  Description of Artificial Sequence: Synthetic oligonucleotide
  Antisense strand to SEQ ID NO: 900848
aaucuccuaggguaacaag

SEQ ID NO: 900850 - RNA, 19 nt, Artificial Sequence
  Description of Artificial Sequence: Synthetic oligonucleotide
  Sense strand starting at position 3091 of SEQ ID NO: 588953
guaagacucucauugguug

SEQ ID NO: 900851 - RNA, 19 nt, Artificial Sequence
  Description of Artificial Sequence: Synthetic oligonucleotide
  Antisense strand to SEQ ID NO: 900850
caaccaaugagagucuuac

SEQ ID NO: 900852 - RNA, 19 nt, Artificial Sequence
  Description of Artificial Sequence: Synthetic oligonucleotide
  Sense strand starting at position 3092 of SEQ ID NO: 588953
uaagacucucauugguuga

SEQ ID NO: 900853 - RNA, 19 nt, Artificial Sequence
  Description of Artificial Sequence: Synthetic oligonucleotide
  Antisense strand to SEQ ID NO: 900852
ucaaccaaugagagucuua

SEQ ID NO: 900854 - RNA, 19 nt, Artificial Sequence
  Description of Artificial Sequence: Synthetic oligonucleotide
  Sense strand starting at position 3095 of SEQ ID NO: 588953
gacucucauugguugaaca

SEQ ID NO: 900855 - RNA, 19 nt, Artificial Sequence
  Description of Artificial Sequence: Synthetic oligonucleotide
  Antisense strand to SEQ ID NO: 900854
uguucaaccaaugagaguc

SEQ ID NO: 900856 - RNA, 19 nt, Artificial Sequence
  Description of Artificial Sequence: Synthetic oligonucleotide
  Sense strand starting at position 3096 of SEQ ID NO: 588953
acucucauugguugaacaa

SEQ ID NO: 900857 - RNA, 19 nt, Artificial Sequence
  Description of Artificial Sequence: Synthetic oligonucleotide
  Antisense strand to SEQ ID NO: 900856
uuguucaaccaaugagagu

SEQ ID NO: 900858 - RNA, 19 nt, Artificial Sequence
  Description of Artificial Sequence: Synthetic oligonucleotide
  Sense strand starting at position 3192 of SEQ ID NO: 588953
gugagaaacuuaguagauu

SEQ ID NO: 900859 - RNA, 19 nt, Artificial Sequence
  Description of Artificial Sequence: Synthetic oligonucleotide
  Antisense strand to SEQ ID NO: 900858
aaucuacuaaguuucucac

SEQ ID NO: 900860 - RNA, 19 nt, Artificial Sequence
  Description of Artificial Sequence: Synthetic oligonucleotide
  Sense strand starting at position 3193 of SEQ ID NO: 588953
ugagaaacuuaguagauuu

SEQ ID NO: 900861 - RNA, 19 nt, Artificial Sequence
  Description of Artificial Sequence: Synthetic oligonucleotide
  Antisense strand to SEQ ID NO: 900860
aaaucuacuaaguuucuca

SEQ ID NO: 900862 - RNA, 19 nt, Artificial Sequence
  Description of Artificial Sequence: Synthetic oligonucleotide
  Sense strand starting at position 3208 of SEQ ID NO: 588953
auuuauugcuaauaggaag

SEQ ID NO: 900863 - RNA, 19 nt, Artificial Sequence
  Description of Artificial Sequence: Synthetic oligonucleotide
  Antisense strand to SEQ ID NO: 900862
cuuccuauuagcaauaaau

SEQ ID NO: 900864 - RNA, 19 nt, Artificial Sequence
  Description of Artificial Sequence: Synthetic oligonucleotide
  Sense strand starting at position 3324 of SEQ ID NO: 588953
uuaucagugcaacauuagu

SEQ ID NO: 900865 - RNA, 19 nt, Artificial Sequence
  Description of Artificial Sequence: Synthetic oligonucleotide
  Antisense strand to SEQ ID NO: 900864
acuaauguugcacugauaa

SEQ ID NO: 900866 - RNA, 19 nt, Artificial Sequence
  Description of Artificial Sequence: Synthetic oligonucleotide
  Sense strand starting at position 3350 of SEQ ID NO: 588953
cuuggaaaggacuguguaa

SEQ ID NO: 900867 - RNA, 19 nt, Artificial Sequence
  Description of Artificial Sequence: Synthetic oligonucleotide
  Antisense strand to SEQ ID NO: 900866
uuacacaguccuuuccaag

SEQ ID NO: 900868 - RNA, 19 nt, Artificial Sequence
  Description of Artificial Sequence: Synthetic oligonucleotide
  Sense strand starting at position 3352 of SEQ ID NO: 588953
uggaaaggacuguguaagu

SEQ ID NO: 900869 - RNA, 19 nt, Artificial Sequence
  Description of Artificial Sequence: Synthetic oligonucleotide
  Antisense strand to SEQ ID NO: 900868
acuuacacaguccuuucca

SEQ ID NO: 900870 - RNA, 19 nt, Artificial Sequence
  Description of Artificial Sequence: Synthetic oligonucleotide
  Sense strand starting at position 3409 of SEQ ID NO: 588953
ccucuugcugaaugguaga

SEQ ID NO: 900871 - RNA, 19 nt, Artificial Sequence
  Description of Artificial Sequence: Synthetic oligonucleotide
  Antisense strand to SEQ ID NO: 900870
ucuaccauucagcaagagg

SEQ ID NO: 900872 - RNA, 19 nt, Artificial Sequence
  Description of Artificial Sequence: Synthetic oligonucleotide
  Sense strand starting at position 3414 of SEQ ID NO: 588953
ugcugaaugguagaacugu

SEQ ID NO: 900873 - RNA, 19 nt, Artificial Sequence
  Description of Artificial Sequence: Synthetic oligonucleotide
  Antisense strand to SEQ ID NO: 900872
acaguucuaccauucagca

SEQ ID NO: 900874 - RNA, 19 nt, Artificial Sequence
  Description of Artificial Sequence: Synthetic oligonucleotide
  Sense strand starting at position 3460 of SEQ ID NO: 588953
gcaguacaugaauaaaugu

SEQ ID NO: 900875 - RNA, 19 nt, Artificial Sequence
  Description of Artificial Sequence: Synthetic oligonucleotide
  Antisense strand to SEQ ID NO: 900874
acauuuauucauguacugc

SEQ ID NO: 900876 - RNA, 19 nt, Artificial Sequence
  Description of Artificial Sequence: Synthetic oligonucleotide
  Sense strand starting at position 3544 of SEQ ID NO: 588953
ugaugaaaucagugcucau

SEQ ID NO: 900877 - RNA, 19 nt, Artificial Sequence
  Description of Artificial Sequence: Synthetic oligonucleotide
  Antisense strand to SEQ ID NO: 900876
augagcacugauuucauca

SEQ ID NO: 900878 - RNA, 19 nt, Artificial Sequence
  Description of Artificial Sequence: Synthetic oligonucleotide
  Sense strand starting at position 3547 of SEQ ID NO: 588953
ugaaaucagugcucauuaa

SEQ ID NO: 900879 - RNA, 19 nt, Artificial Sequence
  Description of Artificial Sequence: Synthetic oligonucleotide
  Antisense strand to SEQ ID NO: 900878
uuaaugagcacugauuuca

SEQ ID NO: 900880 - RNA, 19 nt, Artificial Sequence
  Description of Artificial Sequence: Synthetic oligonucleotide
  Sense strand starting at position 3551 of SEQ ID NO: 588953
aucagugcucauuaauaga

SEQ ID NO: 900881 - RNA, 19 nt, Artificial Sequence
  Description of Artificial Sequence: Synthetic oligonucleotide
  Antisense strand to SEQ ID NO: 900880
ucuauuaaugagcacugau

SEQ ID NO: 900882 - RNA, 19 nt, Artificial Sequence
  Description of Artificial Sequence: Synthetic oligonucleotide
  Sense strand starting at position 3888 of SEQ ID NO: 588953
gugugauguggcuacuaag

SEQ ID NO: 900883 - RNA, 19 nt, Artificial Sequence
  Description of Artificial Sequence: Synthetic oligonucleotide
  Antisense strand to SEQ ID NO: 900882
cuuaguagccacaucacac

SEQ ID NO: 900884 - RNA, 19 nt, Artificial Sequence
  Description of Artificial Sequence: Synthetic oligonucleotide
  Sense strand starting at position 3939 of SEQ ID NO: 588953
gaguuauugucucuacaag

SEQ ID NO: 900885 - RNA, 19 nt, Artificial Sequence
  Description of Artificial Sequence: Synthetic oligonucleotide
  Antisense strand to SEQ ID NO: 900884
cuuguagagacaauaacuc

SEQ ID NO: 900886 - RNA, 19 nt, Artificial Sequence
  Description of Artificial Sequence: Synthetic oligonucleotide
  Sense strand starting at position 3940 of SEQ ID NO: 588953
aguuauugucucuacaagu

SEQ ID NO: 900887 - RNA, 19 nt, Artificial Sequence
  Description of Artificial Sequence: Synthetic oligonucleotide
  Antisense strand to SEQ ID NO: 900886
acuuguagagacaauaacu

SEQ ID NO: 900888 - RNA, 19 nt, Artificial Sequence
  Description of Artificial Sequence: Synthetic oligonucleotide
  Sense strand starting at position 26 of SEQ ID NO: 588954
augugaauaguguaaauug

SEQ ID NO: 900889 - RNA, 19 nt, Artificial Sequence
  Description of Artificial Sequence: Synthetic oligonucleotide
  Antisense strand to SEQ ID NO: 900888
caauuuacacuauucacau

SEQ ID NO: 900890 - RNA, 19 nt, Artificial Sequence
  Description of Artificial Sequence: Synthetic oligonucleotide
  Sense strand starting at position 38 of SEQ ID NO: 588954
uaaauugagaaguguggua

SEQ ID NO: 900891 - RNA, 19 nt, Artificial Sequence
  Description of Artificial Sequence: Synthetic oligonucleotide
  Antisense strand to SEQ ID NO: 900890
uaccacacuucucaauuua

SEQ ID NO: 900892 - RNA, 19 nt, Artificial Sequence
  Description of Artificial Sequence: Synthetic oligonucleotide
  Sense strand starting at position 40 of SEQ ID NO: 588954
aauugagaagugugguaaa

SEQ ID NO: 900893 - RNA, 19 nt, Artificial Sequence
  Description of Artificial Sequence: Synthetic oligonucleotide
  Antisense strand to SEQ ID NO: 900892
uuuaccacacuucucaauu

SEQ ID NO: 900894 - RNA, 19 nt, Artificial Sequence
  Description of Artificial Sequence: Synthetic oligonucleotide
  Sense strand starting at position 241 of SEQ ID NO: 588954
acauauguggcucacauaa

SEQ ID NO: 900895 - RNA, 19 nt, Artificial Sequence
  Description of Artificial Sequence: Synthetic oligonucleotide
  Antisense strand to SEQ ID NO: 900894
uuaugugagccacauaugu

SEQ ID NO: 900896 - RNA, 19 nt, Artificial Sequence
  Description of Artificial Sequence: Synthetic oligonucleotide
  Sense strand starting at position 282 of SEQ ID NO: 588954
ucuagcauucuagguagaa

SEQ ID NO: 900897 - RNA, 19 nt, Artificial Sequence
  Description of Artificial Sequence: Synthetic oligonucleotide
  Antisense strand to SEQ ID NO: 900896
uucuaccuagaaugcuaga

SEQ ID NO: 900898 - RNA, 19 nt, Artificial Sequence
  Description of Artificial Sequence: Synthetic oligonucleotide
  Sense strand starting at position 283 of SEQ ID NO: 588954
cuagcauucuagguagaag

SEQ ID NO: 900899 - RNA, 19 nt, Artificial Sequence
  Description of Artificial Sequence: Synthetic oligonucleotide
  Antisense strand to SEQ ID NO: 900898
cuucuaccuagaaugcuag

SEQ ID NO: 900900 - RNA, 19 nt, Artificial Sequence
  Description of Artificial Sequence: Synthetic oligonucleotide
  Sense strand starting at position 443 of SEQ ID NO: 588954
gaacgugcagaaugaauua

SEQ ID NO: 900901 - RNA, 19 nt, Artificial Sequence
  Description of Artificial Sequence: Synthetic oligonucleotide
  Antisense strand to SEQ ID NO: 900900
uaauucauucugcacguuc

SEQ ID NO: 900902 - RNA, 19 nt, Artificial Sequence
  Description of Artificial Sequence: Synthetic oligonucleotide
  Sense strand starting at position 637 of SEQ ID NO: 588954
cagugagccuaauuagaaa

SEQ ID NO: 900903 - RNA, 19 nt, Artificial Sequence
  Description of Artificial Sequence: Synthetic oligonucleotide
  Antisense strand to SEQ ID NO: 900902
uuucuaauuaggcucacug

SEQ ID NO: 900904 - RNA, 19 nt, Artificial Sequence
  Description of Artificial Sequence: Synthetic oligonucleotide
  Sense strand starting at position 710 of SEQ ID NO: 588954
ggacuaugggcagggaauu

SEQ ID NO: 900905 - RNA, 19 nt, Artificial Sequence
  Description of Artificial Sequence: Synthetic oligonucleotide
  Antisense strand to SEQ ID NO: 900904
aauucccugcccauagucc

SEQ ID NO: 900906 - RNA, 19 nt, Artificial Sequence
  Description of Artificial Sequence: Synthetic oligonucleotide
  Sense strand starting at position 870 of SEQ ID NO: 588954
agcuguucggcucuacuau

SEQ ID NO: 900907 - RNA, 19 nt, Artificial Sequence
  Description of Artificial Sequence: Synthetic oligonucleotide
  Antisense strand to SEQ ID NO: 900906
auaguagagccgaacagcu

SEQ ID NO: 900908 - RNA, 19 nt, Artificial Sequence
  Description of Artificial Sequence: Synthetic oligonucleotide
  Sense strand starting at position 1133 of SEQ ID NO: 588954
gaaaguucuuucucuagag

SEQ ID NO: 900909 - RNA, 19 nt, Artificial Sequence
  Description of Artificial Sequence: Synthetic oligonucleotide
  Antisense strand to SEQ ID NO: 900908
cucuagagaaagaacuuuc

SEQ ID NO: 900910 - RNA, 19 nt, Artificial Sequence
  Description of Artificial Sequence: Synthetic oligonucleotide
  Sense strand starting at position 1137 of SEQ ID NO: 588954
guucuuucucuagagacac

SEQ ID NO: 900911 - RNA, 19 nt, Artificial Sequence
  Description of Artificial Sequence: Synthetic oligonucleotide
  Antisense strand to SEQ ID NO: 900910
gugucucuagagaaagaac

SEQ ID NO: 900912 - RNA, 19 nt, Artificial Sequence
  Description of Artificial Sequence: Synthetic oligonucleotide
  Sense strand starting at position 1257 of SEQ ID NO: 588954
cugcuuacucucuagugaa

SEQ ID NO: 900913 - RNA, 19 nt, Artificial Sequence
  Description of Artificial Sequence: Synthetic oligonucleotide
  Antisense strand to SEQ ID NO: 900912
uucacuagagaguaagcag

SEQ ID NO: 900914 - RNA, 19 nt, Artificial Sequence
  Description of Artificial Sequence: Synthetic oligonucleotide
  Sense strand starting at position 1267 of SEQ ID NO: 588954
ucuagugaagaagguauua

SEQ ID NO: 900915 - RNA, 19 nt, Artificial Sequence
  Description of Artificial Sequence: Synthetic oligonucleotide
  Antisense strand to SEQ ID NO: 900914
uaauaccuucuucacuaga

SEQ ID NO: 900916 - RNA, 19 nt, Artificial Sequence
  Description of Artificial Sequence: Synthetic oligonucleotide
  Sense strand starting at position 1314 of SEQ ID NO: 588954
cucagacagguuugauaau

SEQ ID NO: 900917 - RNA, 19 nt, Artificial Sequence
  Description of Artificial Sequence: Synthetic oligonucleotide
  Antisense strand to SEQ ID NO: 900916
auuaucaaaccugucugag

SEQ ID NO: 900918 - RNA, 19 nt, Artificial Sequence
  Description of Artificial Sequence: Synthetic oligonucleotide
  Sense strand starting at position 1375 of SEQ ID NO: 588954
agaucuauguuaucucaug

SEQ ID NO: 900919 - RNA, 19 nt, Artificial Sequence
  Description of Artificial Sequence: Synthetic oligonucleotide
  Antisense strand to SEQ ID NO: 900918
caugagauaacauagaucu

SEQ ID NO: 900920 - RNA, 19 nt, Artificial Sequence
  Description of Artificial Sequence: Synthetic oligonucleotide
  Sense strand starting at position 1553 of SEQ ID NO: 588954
ugagaaguucugggcagaa

SEQ ID NO: 900921 - RNA, 19 nt, Artificial Sequence
  Description of Artificial Sequence: Synthetic oligonucleotide
  Antisense strand to SEQ ID NO: 900920
uucugcccagaacuucuca

SEQ ID NO: 900922 - RNA, 19 nt, Artificial Sequence
  Description of Artificial Sequence: Synthetic oligonucleotide
  Sense strand starting at position 1555 of SEQ ID NO: 588954
agaaguucugggcagaagu

SEQ ID NO: 900923 - RNA, 19 nt, Artificial Sequence
  Description of Artificial Sequence: Synthetic oligonucleotide
  Antisense strand to SEQ ID NO: 900922
acuucugcccagaacuucu

SEQ ID NO: 900924 - RNA, 19 nt, Artificial Sequence
  Description of Artificial Sequence: Synthetic oligonucleotide
  Sense strand starting at position 2085 of SEQ ID NO: 588954
ccuuguaacucucuaggau

SEQ ID NO: 900925 - RNA, 19 nt, Artificial Sequence
  Description of Artificial Sequence: Synthetic oligonucleotide
  Antisense strand to SEQ ID NO: 900924
auccuagagaguuacaagg

SEQ ID NO: 900926 - RNA, 19 nt, Artificial Sequence
  Description of Artificial Sequence: Synthetic oligonucleotide
  Sense strand starting at position 2086 of SEQ ID NO: 588954
cuuguaacucucuaggaug

SEQ ID NO: 900927 - RNA, 19 nt, Artificial Sequence
  Description of Artificial Sequence: Synthetic oligonucleotide
  Antisense strand to SEQ ID NO: 900926
cauccuagagaguuacaag

SEQ ID NO: 900928 - RNA, 19 nt, Artificial Sequence
  Description of Artificial Sequence: Synthetic oligonucleotide
  Sense strand starting at position 2402 of SEQ ID NO: 588954
ggguuaggacuucgauaug

SEQ ID NO: 900929 - RNA, 19 nt, Artificial Sequence
  Description of Artificial Sequence: Synthetic oligonucleotide
  Antisense strand to SEQ ID NO: 900928
cauaucgaaguccuaaccc

SEQ ID NO: 900930 - RNA, 19 nt, Artificial Sequence
  Description of Artificial Sequence: Synthetic oligonucleotide
  Sense strand starting at position 2405 of SEQ ID NO: 588954
uuaggacuucgauauguag

SEQ ID NO: 900931 - RNA, 19 nt, Artificial Sequence
  Description of Artificial Sequence: Synthetic oligonucleotide
  Antisense strand to SEQ ID NO: 900930
cuacauaucgaaguccuaa

SEQ ID NO: 900932 - RNA, 19 nt, Artificial Sequence
  Description of Artificial Sequence: Synthetic oligonucleotide
  Sense strand starting at position 2409 of SEQ ID NO: 588954
gacuucgauauguagguuu

SEQ ID NO: 900933 - RNA, 19 nt, Artificial Sequence
  Description of Artificial Sequence: Synthetic oligonucleotide
  Antisense strand to SEQ ID NO: 900932
aaaccuacauaucgaaguc

SEQ ID NO: 900934 - RNA, 19 nt, Artificial Sequence
  Description of Artificial Sequence: Synthetic oligonucleotide
  Sense strand starting at position 2598 of SEQ ID NO: 588954
ugaggcauuggucaaguca

SEQ ID NO: 900935 - RNA, 19 nt, Artificial Sequence
  Description of Artificial Sequence: Synthetic oligonucleotide
  Antisense strand to SEQ ID NO: 900934
ugacuugaccaaugccuca

SEQ ID NO: 900936 - RNA, 19 nt, Artificial Sequence
  Description of Artificial Sequence: Synthetic oligonucleotide
  Sense strand starting at position 2718 of SEQ ID NO: 588954
ugaccauuuguauguguac

SEQ ID NO: 900937 - RNA, 19 nt, Artificial Sequence
  Description of Artificial Sequence: Synthetic oligonucleotide
  Antisense strand to SEQ ID NO: 900936
guacacauacaaaugguca

SEQ ID NO: 900938 - RNA, 19 nt, Artificial Sequence
  Description of Artificial Sequence: Synthetic oligonucleotide
  Sense strand starting at position 2877 of SEQ ID NO: 588954
agcucuuagaaguggaauc

SEQ ID NO: 900939 - RNA, 19 nt, Artificial Sequence
  Description of Artificial Sequence: Synthetic oligonucleotide
  Antisense strand to SEQ ID NO: 900938
gauuccacuucuaagagcu

SEQ ID NO: 900940 - RNA, 19 nt, Artificial Sequence
  Description of Artificial Sequence: Synthetic oligonucleotide
  Sense strand starting at position 2958 of SEQ ID NO: 588954
uucuguguaguauagauca

SEQ ID NO: 900941 - RNA, 19 nt, Artificial Sequence
  Description of Artificial Sequence: Synthetic oligonucleotide
  Antisense strand to SEQ ID NO: 900940
ugaucuauacuacacagaa

SEQ ID NO: 900942 - RNA, 19 nt, Artificial Sequence
  Description of Artificial Sequence: Synthetic oligonucleotide
  Sense strand starting at position 2960 of SEQ ID NO: 588954
cuguguaguauagaucaaa

SEQ ID NO: 900943 - RNA, 19 nt, Artificial Sequence
  Description of Artificial Sequence: Synthetic oligonucleotide
  Antisense strand to SEQ ID NO: 900942
uuugaucuauacuacacag

SEQ ID NO: 900944 - RNA, 19 nt, Artificial Sequence
  Description of Artificial Sequence: Synthetic oligonucleotide
  Sense strand starting at position 3103 of SEQ ID NO: 588954
ccauaaacaugguuguaca

SEQ ID NO: 900945 - RNA, 19 nt, Artificial Sequence
  Description of Artificial Sequence: Synthetic oligonucleotide
  Antisense strand to SEQ ID NO: 900944
uguacaaccauguuuaugg

SEQ ID NO: 900946 - RNA, 19 nt, Artificial Sequence
  Description of Artificial Sequence: Synthetic oligonucleotide
  Sense strand starting at position 3154 of SEQ ID NO: 588954
uuggauacguacucagaag

SEQ ID NO: 900947 - RNA, 19 nt, Artificial Sequence
  Description of Artificial Sequence: Synthetic oligonucleotide
  Antisense strand to SEQ ID NO: 900946
cuucugaguacguauccaa

SEQ ID NO: 900948 - RNA, 19 nt, Artificial Sequence
  Description of Artificial Sequence: Synthetic oligonucleotide
  Sense strand starting at position 3155 of SEQ ID NO: 588954
uggauacguacucagaagu

SEQ ID NO: 900949 - RNA, 19 nt, Artificial Sequence
  Description of Artificial Sequence: Synthetic oligonucleotide
  Antisense strand to SEQ ID NO: 900948
acuucugaguacguaucca

SEQ ID NO: 900950 - RNA, 19 nt, Artificial Sequence
  Description of Artificial Sequence: Synthetic oligonucleotide
  Sense strand starting at position 3352 of SEQ ID NO: 588954
uuaaucauagcagaagcuu

SEQ ID NO: 900951 - RNA, 19 nt, Artificial Sequence
  Description of Artificial Sequence: Synthetic oligonucleotide
  Antisense strand to SEQ ID NO: 900950
aagcuucugcuaugauuaa

SEQ ID NO: 900952 - RNA, 19 nt, Artificial Sequence
  Description of Artificial Sequence: Synthetic oligonucleotide
  Sense strand starting at position 3358 of SEQ ID NO: 588954
auagcagaagcuugcauuu

SEQ ID NO: 900953 - RNA, 19 nt, Artificial Sequence
  Description of Artificial Sequence: Synthetic oligonucleotide
  Antisense strand to SEQ ID NO: 900952
aaaugcaagcuucugcuau

SEQ ID NO: 900954 - RNA, 19 nt, Artificial Sequence
  Description of Artificial Sequence: Synthetic oligonucleotide
  Sense strand starting at position 3401 of SEQ ID NO: 588954
cgcaaugguagucaaauua

SEQ ID NO: 900955 - RNA, 19 nt, Artificial Sequence
  Description of Artificial Sequence: Synthetic oligonucleotide
  Antisense strand to SEQ ID NO: 900954
uaauuugacuaccauugcg

SEQ ID NO: 900956 - RNA, 19 nt, Artificial Sequence
  Description of Artificial Sequence: Synthetic oligonucleotide
  Sense strand starting at position 3516 of SEQ ID NO: 588954
agucuagagcaucaucauu

SEQ ID NO: 900957 - RNA, 19 nt, Artificial Sequence
  Description of Artificial Sequence: Synthetic oligonucleotide
  Antisense strand to SEQ ID NO: 900956
aaugaugaugcucuagacu

SEQ ID NO: 900958 - RNA, 19 nt, Artificial Sequence
  Description of Artificial Sequence: Synthetic oligonucleotide
  Sense strand starting at position 3744 of SEQ ID NO: 588954
auaguucuacuguaauauc

SEQ ID NO: 900959 - RNA, 19 nt, Artificial Sequence
  Description of Artificial Sequence: Synthetic oligonucleotide
  Antisense strand to SEQ ID NO: 900958
gauauuacaguagaacuau

SEQ ID NO: 900960 - RNA, 19 nt, Artificial Sequence
  Description of Artificial Sequence: Synthetic oligonucleotide
  Sense strand starting at position 3969 of SEQ ID NO: 588954
aaaguuuaguucccuggaa

SEQ ID NO: 900961 - RNA, 19 nt, Artificial Sequence
  Description of Artificial Sequence: Synthetic oligonucleotide
  Antisense strand to SEQ ID NO: 900960
uuccagggaacuaaacuuu

SEQ ID NO: 900962 - RNA, 19 nt, Artificial Sequence
  Description of Artificial Sequence: Synthetic oligonucleotide
  Sense strand starting at position 3970 of SEQ ID NO: 588954
aaguuuaguucccuggaaa

SEQ ID NO: 900963 - RNA, 19 nt, Artificial Sequence
  Description of Artificial Sequence: Synthetic oligonucleotide
  Antisense strand to SEQ ID NO: 900962
uuuccagggaacuaaacuu

SEQ ID NO: 900964 - RNA, 19 nt, Artificial Sequence
  Description of Artificial Sequence: Synthetic oligonucleotide
  Sense strand starting at position 3971 of SEQ ID NO: 588954
aguuuaguucccuggaaag

SEQ ID NO: 900965 - RNA, 19 nt, Artificial Sequence
  Description of Artificial Sequence: Synthetic oligonucleotide
  Antisense strand to SEQ ID NO: 900964
cuuuccagggaacuaaacu

SEQ ID NO: 900966 - RNA, 19 nt, Artificial Sequence
  Description of Artificial Sequence: Synthetic oligonucleotide
  Sense strand starting at position 3973 of SEQ ID NO: 588954
uuuaguucccuggaaaguu

SEQ ID NO: 900967 - RNA, 19 nt, Artificial Sequence
  Description of Artificial Sequence: Synthetic oligonucleotide
  Antisense strand to SEQ ID NO: 900966
aacuuuccagggaacuaaa

SEQ ID NO: 900968 - RNA, 19 nt, Artificial Sequence
  Description of Artificial Sequence: Synthetic oligonucleotide
  Sense strand starting at position 213 of SEQ ID NO: 588955
gagcuuuaugaugaucuac

SEQ ID NO: 900969 - RNA, 19 nt, Artificial Sequence
  Description of Artificial Sequence: Synthetic oligonucleotide
  Antisense strand to SEQ ID NO: 900968
guagaucaucauaaagcuc

SEQ ID NO: 900970 - RNA, 19 nt, Artificial Sequence
  Description of Artificial Sequence: Synthetic oligonucleotide
  Sense strand starting at position 378 of SEQ ID NO: 588955
ugguaaagcaucuggucaa

SEQ ID NO: 900971 - RNA, 19 nt, Artificial Sequence
  Description of Artificial Sequence: Synthetic oligonucleotide
  Antisense strand to SEQ ID NO: 900970
uugaccagaugcuuuacca

SEQ ID NO: 900972 - RNA, 19 nt, Artificial Sequence
  Description of Artificial Sequence: Synthetic oligonucleotide
  Sense strand starting at position 382 of SEQ ID NO: 588955
aaagcaucuggucaacagu

SEQ ID NO: 900973 - RNA, 19 nt, Artificial Sequence
  Description of Artificial Sequence: Synthetic oligonucleotide
  Antisense strand to SEQ ID NO: 900972
acuguugaccagaugcuuu

SEQ ID NO: 900974 - RNA, 19 nt, Artificial Sequence
  Description of Artificial Sequence: Synthetic oligonucleotide
  Sense strand starting at position 683 of SEQ ID NO: 588955
gcaucauggcauuaucaug

SEQ ID NO: 900975 - RNA, 19 nt, Artificial Sequence
  Description of Artificial Sequence: Synthetic oligonucleotide
  Antisense strand to SEQ ID NO: 900974
caugauaaugccaugaugc

SEQ ID NO: 900976 - RNA, 19 nt, Artificial Sequence
  Description of Artificial Sequence: Synthetic oligonucleotide
  Sense strand starting at position 695 of SEQ ID NO: 588955
uaucaugguguauggagaa

SEQ ID NO: 900977 - RNA, 19 nt, Artificial Sequence
  Description of Artificial Sequence: Synthetic oligonucleotide
  Antisense strand to SEQ ID NO: 900976
uucuccauacaccaugaua

SEQ ID NO: 900978 - RNA, 19 nt, Artificial Sequence
  Description of Artificial Sequence: Synthetic oligonucleotide
  Sense strand starting at position 707 of SEQ ID NO: 588955
uggagaacuucugucuuau

SEQ ID NO: 900979 - RNA, 19 nt, Artificial Sequence
  Description of Artificial Sequence: Synthetic oligonucleotide
  Antisense strand to SEQ ID NO: 900978
auaagacagaaguucucca

SEQ ID NO: 900980 - RNA, 19 nt, Artificial Sequence
  Description of Artificial Sequence: Synthetic oligonucleotide
  Sense strand starting at position 964 of SEQ ID NO: 588955
uaggcugaguuccuuuaaa

SEQ ID NO: 900981 - RNA, 19 nt, Artificial Sequence
  Description of Artificial Sequence: Synthetic oligonucleotide
  Antisense strand to SEQ ID NO: 900980
uuuaaaggaacucagccua

SEQ ID NO: 900982 - RNA, 19 nt, Artificial Sequence
  Description of Artificial Sequence: Synthetic oligonucleotide
  Sense strand starting at position 1095 of SEQ ID NO: 588955
uucugacagcuguauguua

SEQ ID NO: 900983 - RNA, 19 nt, Artificial Sequence
  Description of Artificial Sequence: Synthetic oligonucleotide
  Antisense strand to SEQ ID NO: 900982
uaacauacagcugucagaa

SEQ ID NO: 900984 - RNA, 19 nt, Artificial Sequence
  Description of Artificial Sequence: Synthetic oligonucleotide
  Sense strand starting at position 1187 of SEQ ID NO: 588955
cccaucagucuuugacacu

SEQ ID NO: 900985 - RNA, 19 nt, Artificial Sequence
  Description of Artificial Sequence: Synthetic oligonucleotide
  Antisense strand to SEQ ID NO: 900984
agugucaaagacugauggg

SEQ ID NO: 900986 - RNA, 19 nt, Artificial Sequence
  Description of Artificial Sequence: Synthetic oligonucleotide
  Sense strand starting at position 1358 of SEQ ID NO: 588955
aggaaaucauugcauuuaa

SEQ ID NO: 900987 - RNA, 19 nt, Artificial Sequence
  Description of Artificial Sequence: Synthetic oligonucleotide
  Antisense strand to SEQ ID NO: 900986
uuaaaugcaaugauuuccu

SEQ ID NO: 900988 - RNA, 19 nt, Artificial Sequence
  Description of Artificial Sequence: Synthetic oligonucleotide
  Sense strand starting at position 1651 of SEQ ID NO: 588955
aucaauuacugggugacau

SEQ ID NO: 900989 - RNA, 19 nt, Artificial Sequence
  Description of Artificial Sequence: Synthetic oligonucleotide
  Antisense strand to SEQ ID NO: 900988
augucacccaguaauugau

SEQ ID NO: 900990 - RNA, 19 nt, Artificial Sequence
  Description of Artificial Sequence: Synthetic oligonucleotide
  Sense strand starting at position 1652 of SEQ ID NO: 588955
ucaauuacugggugacaug

SEQ ID NO: 900991 - RNA, 19 nt, Artificial Sequence
  Description of Artificial Sequence: Synthetic oligonucleotide
  Antisense strand to SEQ ID NO: 900990
caugucacccaguaauuga

SEQ ID NO: 900992 - RNA, 19 nt, Artificial Sequence
  Description of Artificial Sequence: Synthetic oligonucleotide
  Sense strand starting at position 1669 of SEQ ID NO: 588955
ugcugugcacugcaagaaa

SEQ ID NO: 900993 - RNA, 19 nt, Artificial Sequence
  Description of Artificial Sequence: Synthetic oligonucleotide
  Antisense strand to SEQ ID NO: 900992
uuucuugcagugcacagca

SEQ ID NO: 900994 - RNA, 19 nt, Artificial Sequence
  Description of Artificial Sequence: Synthetic oligonucleotide
  Sense strand starting at position 1773 of SEQ ID NO: 588955
ucacuaaugugauuaggga

SEQ ID NO: 900995 - RNA, 19 nt, Artificial Sequence
  Description of Artificial Sequence: Synthetic oligonucleotide
  Antisense strand to SEQ ID NO: 900994
ucccuaaucacauuaguga

SEQ ID NO: 900996 - RNA, 19 nt, Artificial Sequence
  Description of Artificial Sequence: Synthetic oligonucleotide
  Sense strand starting at position 1802 of SEQ ID NO: 588955
gagaaagucuucgauuuag

SEQ ID NO: 900997 - RNA, 19 nt, Artificial Sequence
  Description of Artificial Sequence: Synthetic oligonucleotide
  Antisense strand to SEQ ID NO: 900996
cuaaaucgaagacuuucuc

SEQ ID NO: 900998 - RNA, 19 nt, Artificial Sequence
  Description of Artificial Sequence: Synthetic oligonucleotide
  Sense strand starting at position 2008 of SEQ ID NO: 588955
uaggucuucggugaaauca

SEQ ID NO: 900999 - RNA, 19 nt, Artificial Sequence
  Description of Artificial Sequence: Synthetic oligonucleotide
  Antisense strand to SEQ ID NO: 900998
ugauuucaccgaagaccua

SEQ ID NO: 901000 - RNA, 19 nt, Artificial Sequence
  Description of Artificial Sequence: Synthetic oligonucleotide
  Sense strand starting at position 2093 of SEQ ID NO: 588955
gcgcaauggcgugauuuca

SEQ ID NO: 901001 - RNA, 19 nt, Artificial Sequence
  Description of Artificial Sequence: Synthetic oligonucleotide
  Antisense strand to SEQ ID NO: 901000
ugaaaucacgccauugcgc

SEQ ID NO: 901002 - RNA, 19 nt, Artificial Sequence
  Description of Artificial Sequence: Synthetic oligonucleotide
  Sense strand starting at position 2660 of SEQ ID NO: 588955
gggccuucugaggagacuu

SEQ ID NO: 901003 - RNA, 19 nt, Artificial Sequence
  Description of Artificial Sequence: Synthetic oligonucleotide
  Antisense strand to SEQ ID NO: 901002
aagucuccucagaaggccc

SEQ ID NO: 901004 - RNA, 19 nt, Artificial Sequence
  Description of Artificial Sequence: Synthetic oligonucleotide
  Sense strand starting at position 2696 of SEQ ID NO: 588955
ggauuaucagccugguaac

SEQ ID NO: 901005 - RNA, 19 nt, Artificial Sequence
  Description of Artificial Sequence: Synthetic oligonucleotide
  Antisense strand to SEQ ID NO: 901004
guuaccaggcugauaaucc

SEQ ID NO: 901006 - RNA, 19 nt, Artificial Sequence
  Description of Artificial Sequence: Synthetic oligonucleotide
  Sense strand starting at position 2697 of SEQ ID NO: 588955
gauuaucagccugguaacu

SEQ ID NO: 901007 - RNA, 19 nt, Artificial Sequence
  Description of Artificial Sequence: Synthetic oligonucleotide
  Antisense strand to SEQ ID NO: 901006
aguuaccaggcugauaauc

SEQ ID NO: 901008 - RNA, 19 nt, Artificial Sequence
  Description of Artificial Sequence: Synthetic oligonucleotide
  Sense strand starting at position 2709 of SEQ ID NO: 588955
gguaacuccuggccgaaga

SEQ ID NO: 901009 - RNA, 19 nt, Artificial Sequence
  Description of Artificial Sequence: Synthetic oligonucleotide
  Antisense strand to SEQ ID NO: 901008
ucuucggccaggaguuacc

SEQ ID NO: 901010 - RNA, 19 nt, Artificial Sequence
  Description of Artificial Sequence: Synthetic oligonucleotide
  Sense strand starting at position 2710 of SEQ ID NO: 588955
guaacuccuggccgaagaa

SEQ ID NO: 901011 - RNA, 19 nt, Artificial Sequence
  Description of Artificial Sequence: Synthetic oligonucleotide
  Antisense strand to SEQ ID NO: 901010
uucuucggccaggaguuac

SEQ ID NO: 901012 - RNA, 19 nt, Artificial Sequence
  Description of Artificial Sequence: Synthetic oligonucleotide
  Sense strand starting at position 2711 of SEQ ID NO: 588955
uaacuccuggccgaagaaa

SEQ ID NO: 901013 - RNA, 19 nt, Artificial Sequence
  Description of Artificial Sequence: Synthetic oligonucleotide
  Antisense strand to SEQ ID NO: 901012
uuucuucggccaggaguua

SEQ ID NO: 901014 - RNA, 19 nt, Artificial Sequence
  Description of Artificial Sequence: Synthetic oligonucleotide
  Sense strand starting at position 2828 of SEQ ID NO: 588955
agucuauuccuguaacuaa

SEQ ID NO: 901015 - RNA, 19 nt, Artificial Sequence
  Description of Artificial Sequence: Synthetic oligonucleotide
  Antisense strand to SEQ ID NO: 901014
uuaguuacaggaauagacu

SEQ ID NO: 901016 - RNA, 19 nt, Artificial Sequence
  Description of Artificial Sequence: Synthetic oligonucleotide
  Sense strand starting at position 2844 of SEQ ID NO: 588955
uaaugaagggcucagguuu

SEQ ID NO: 901017 - RNA, 19 nt, Artificial Sequence
  Description of Artificial Sequence: Synthetic oligonucleotide
  Antisense strand to SEQ ID NO: 901016
aaaccugagcccuucauua

SEQ ID NO: 901018 - RNA, 19 nt, Artificial Sequence
  Description of Artificial Sequence: Synthetic oligonucleotide
  Sense strand starting at position 2866 of SEQ ID NO: 588955
agguaaguuaauugucaga

SEQ ID NO: 901019 - RNA, 19 nt, Artificial Sequence
  Description of Artificial Sequence: Synthetic oligonucleotide
  Antisense strand to SEQ ID NO: 901018
ucugacaauuaacuuaccu

SEQ ID NO: 901020 - RNA, 19 nt, Artificial Sequence
  Description of Artificial Sequence: Synthetic oligonucleotide
  Sense strand starting at position 2868 of SEQ ID NO: 588955
guaaguuaauugucagacc

SEQ ID NO: 901021 - RNA, 19 nt, Artificial Sequence
  Description of Artificial Sequence: Synthetic oligonucleotide
  Antisense strand to SEQ ID NO: 901020
ggucugacaauuaacuuac

SEQ ID NO: 901022 - RNA, 19 nt, Artificial Sequence
  Description of Artificial Sequence: Synthetic oligonucleotide
  Sense strand starting at position 2897 of SEQ ID NO: 588955
uacccaguguccuugggaa

SEQ ID NO: 901023 - RNA, 19 nt, Artificial Sequence
  Description of Artificial Sequence: Synthetic oligonucleotide
  Antisense strand to SEQ ID NO: 901022
uucccaaggacacugggua

SEQ ID NO: 901024 - RNA, 19 nt, Artificial Sequence
  Description of Artificial Sequence: Synthetic oligonucleotide
  Sense strand starting at position 2899 of SEQ ID NO: 588955
cccaguguccuugggaaac

SEQ ID NO: 901025 - RNA, 19 nt, Artificial Sequence
  Description of Artificial Sequence: Synthetic oligonucleotide
  Antisense strand to SEQ ID NO: 901024
guuucccaaggacacuggg

SEQ ID NO: 901026 - RNA, 19 nt, Artificial Sequence
  Description of Artificial Sequence: Synthetic oligonucleotide
  Sense strand starting at position 3071 of SEQ ID NO: 588955
guuaacaucuacuuugaug

SEQ ID NO: 901027 - RNA, 19 nt, Artificial Sequence
  Description of Artificial Sequence: Synthetic oligonucleotide
  Antisense strand to SEQ ID NO: 901026
caucaaaguagauguuaac

SEQ ID NO: 901028 - RNA, 19 nt, Artificial Sequence
  Description of Artificial Sequence: Synthetic oligonucleotide
  Sense strand starting at position 3096 of SEQ ID NO: 588955
uuggguuuacuugaaucua

SEQ ID NO: 901029 - RNA, 19 nt, Artificial Sequence
  Description of Artificial Sequence: Synthetic oligonucleotide
  Antisense strand to SEQ ID NO: 901028
uagauucaaguaaacccaa

SEQ ID NO: 901030 - RNA, 19 nt, Artificial Sequence
  Description of Artificial Sequence: Synthetic oligonucleotide
  Sense strand starting at position 3268 of SEQ ID NO: 588955
agugauuucucagacuucu

SEQ ID NO: 901031 - RNA, 19 nt, Artificial Sequence
  Description of Artificial Sequence: Synthetic oligonucleotide
  Antisense strand to SEQ ID NO: 901030
agaagucugagaaaucacu

SEQ ID NO: 901032 - RNA, 19 nt, Artificial Sequence
  Description of Artificial Sequence: Synthetic oligonucleotide
  Sense strand starting at position 3424 of SEQ ID NO: 588955
gugugcuauagauaugcua

SEQ ID NO: 901033 - RNA, 19 nt, Artificial Sequence
  Description of Artificial Sequence: Synthetic oligonucleotide
  Antisense strand to SEQ ID NO: 901032
uagcauaucuauagcacac

SEQ ID NO: 901034 - RNA, 19 nt, Artificial Sequence
  Description of Artificial Sequence: Synthetic oligonucleotide
  Sense strand starting at position 3521 of SEQ ID NO: 588955
uuguuaaugucagcaauua

SEQ ID NO: 901035 - RNA, 19 nt, Artificial Sequence
  Description of Artificial Sequence: Synthetic oligonucleotide
  Antisense strand to SEQ ID NO: 901034
uaauugcugacauuaacaa

SEQ ID NO: 901036 - RNA, 19 nt, Artificial Sequence
  Description of Artificial Sequence: Synthetic oligonucleotide
  Sense strand starting at position 3522 of SEQ ID NO: 588955
uguuaaugucagcaauuau

SEQ ID NO: 901037 - RNA, 19 nt, Artificial Sequence
  Description of Artificial Sequence: Synthetic oligonucleotide
  Antisense strand to SEQ ID NO: 901036
auaauugcugacauuaaca

SEQ ID NO: 901038 - RNA, 19 nt, Artificial Sequence
  Description of Artificial Sequence: Synthetic oligonucleotide
  Sense strand starting at position 3586 of SEQ ID NO: 588955
guaugucuauuggcagaac

SEQ ID NO: 901039 - RNA, 19 nt, Artificial Sequence
  Description of Artificial Sequence: Synthetic oligonucleotide
  Antisense strand to SEQ ID NO: 901038
guucugccaauagacauac

SEQ ID NO: 901040 - RNA, 19 nt, Artificial Sequence
  Description of Artificial Sequence: Synthetic oligonucleotide
  Sense strand starting at position 3652 of SEQ ID NO: 588955
gugccuucuagagaaagca

SEQ ID NO: 901041 - RNA, 19 nt, Artificial Sequence
  Description of Artificial Sequence: Synthetic oligonucleotide
  Antisense strand to SEQ ID NO: 901040
ugcuuucucuagaaggcac

SEQ ID NO: 901042 - RNA, 19 nt, Artificial Sequence
  Description of Artificial Sequence: Synthetic oligonucleotide
  Sense strand starting at position 3670 of SEQ ID NO: 588955
auaguauaguccucccuca

SEQ ID NO: 901043 - RNA, 19 nt, Artificial Sequence
  Description of Artificial Sequence: Synthetic oligonucleotide
  Antisense strand to SEQ ID NO: 901042
ugagggaggacuauacuau

SEQ ID NO: 901044 - RNA, 19 nt, Artificial Sequence
  Description of Artificial Sequence: Synthetic oligonucleotide
  Sense strand starting at position 3775 of SEQ ID NO: 588955
auaucucuacugggagcau

SEQ ID NO: 901045 - RNA, 19 nt, Artificial Sequence
  Description of Artificial Sequence: Synthetic oligonucleotide
  Antisense strand to SEQ ID NO: 901044
augcucccaguagagauau

SEQ ID NO: 901046 - RNA, 19 nt, Artificial Sequence
  Description of Artificial Sequence: Synthetic oligonucleotide
  Sense strand starting at position 3796 of SEQ ID NO: 588955
acuaauaaugagugacucu

SEQ ID NO: 901047 - RNA, 19 nt, Artificial Sequence
  Description of Artificial Sequence: Synthetic oligonucleotide
  Antisense strand to SEQ ID NO: 901046
agagucacucauuauuagu

SEQ ID NO: 901048 - RNA, 19 nt, Artificial Sequence
  Description of Artificial Sequence: Synthetic oligonucleotide
  Sense strand starting at position 27 of SEQ ID NO: 588956
auaagcaucugcgcugaga

SEQ ID NO: 901049 - RNA, 19 nt, Artificial Sequence
  Description of Artificial Sequence: Synthetic oligonucleotide
  Antisense strand to SEQ ID NO: 901048
ucucagcgcagaugcuuau

SEQ ID NO: 901050 - RNA, 19 nt, Artificial Sequence
  Description of Artificial Sequence: Synthetic oligonucleotide
  Sense strand starting at position 159 of SEQ ID NO: 588956
uccgccuugguuuaaagaa

SEQ ID NO: 901051 - RNA, 19 nt, Artificial Sequence
  Description of Artificial Sequence: Synthetic oligonucleotide
  Antisense strand to SEQ ID NO: 901050
uucuuuaaaccaaggcgga

SEQ ID NO: 901052 - RNA, 19 nt, Artificial Sequence
  Description of Artificial Sequence: Synthetic oligonucleotide
  Sense strand starting at position 219 of SEQ ID NO: 588956
aaggauguggcuuaugauc

SEQ ID NO: 901053 - RNA, 19 nt, Artificial Sequence
  Description of Artificial Sequence: Synthetic oligonucleotide
  Antisense strand to SEQ ID NO: 901052
gaucauaagccacauccuu

SEQ ID NO: 901054 - RNA, 19 nt, Artificial Sequence
  Description of Artificial Sequence: Synthetic oligonucleotide
  Sense strand starting at position 227 of SEQ ID NO: 588956
ggcuuaugaucacuagcau

SEQ ID NO: 901055 - RNA, 19 nt, Artificial Sequence
  Description of Artificial Sequence: Synthetic oligonucleotide
  Antisense strand to SEQ ID NO: 901054
augcuagugaucauaagcc

SEQ ID NO: 901056 - RNA, 19 nt, Artificial Sequence
  Description of Artificial Sequence: Synthetic oligonucleotide
  Sense strand starting at position 228 of SEQ ID NO: 588956
gcuuaugaucacuagcauc

SEQ ID NO: 901057 - RNA, 19 nt, Artificial Sequence
  Description of Artificial Sequence: Synthetic oligonucleotide
  Antisense strand to SEQ ID NO: 901056
gaugcuagugaucauaagc

SEQ ID NO: 901058 - RNA, 19 nt, Artificial Sequence
  Description of Artificial Sequence: Synthetic oligonucleotide
  Sense strand starting at position 388 of SEQ ID NO: 588956
aguguuauccacuaaagcc

SEQ ID NO: 901059 - RNA, 19 nt, Artificial Sequence
  Description of Artificial Sequence: Synthetic oligonucleotide
  Antisense strand to SEQ ID NO: 901058
ggcuuuaguggauaacacu

SEQ ID NO: 901060 - RNA, 19 nt, Artificial Sequence
  Description of Artificial Sequence: Synthetic oligonucleotide
  Sense strand starting at position 410 of SEQ ID NO: 588956
gcaagcucuuuguuuccaa

SEQ ID NO: 901061 - RNA, 19 nt, Artificial Sequence
  Description of Artificial Sequence: Synthetic oligonucleotide
  Antisense strand to SEQ ID NO: 901060
uuggaaacaaagagcuugc

SEQ ID NO: 901062 - RNA, 19 nt, Artificial Sequence
  Description of Artificial Sequence: Synthetic oligonucleotide
  Sense strand starting at position 574 of SEQ ID NO: 588956
uuaauaacccaggguuaca

SEQ ID NO: 901063 - RNA, 19 nt, Artificial Sequence
  Description of Artificial Sequence: Synthetic oligonucleotide
  Antisense strand to SEQ ID NO: 901062
uguaacccuggguuauuaa

SEQ ID NO: 901064 - RNA, 19 nt, Artificial Sequence
  Description of Artificial Sequence: Synthetic oligonucleotide
  Sense strand starting at position 584 of SEQ ID NO: 588956
aggguuacaccuugcuaca

SEQ ID NO: 901065 - RNA, 19 nt, Artificial Sequence
  Description of Artificial Sequence: Synthetic oligonucleotide
  Antisense strand to SEQ ID NO: 901064
uguagcaagguguaacccu

SEQ ID NO: 901066 - RNA, 19 nt, Artificial Sequence
  Description of Artificial Sequence: Synthetic oligonucleotide
  Sense strand starting at position 605 of SEQ ID NO: 588956
agggcauucccugagaccu

SEQ ID NO: 901067 - RNA, 19 nt, Artificial Sequence
  Description of Artificial Sequence: Synthetic oligonucleotide
  Antisense strand to SEQ ID NO: 901066
aggucucagggaaugcccu

SEQ ID NO: 901068 - RNA, 19 nt, Artificial Sequence
  Description of Artificial Sequence: Synthetic oligonucleotide
  Sense strand starting at position 2516 of SEQ ID NO: 588956
gcaguucucagagauguug

SEQ ID NO: 901069 - RNA, 19 nt, Artificial Sequence
  Description of Artificial Sequence: Synthetic oligonucleotide
  Antisense strand to SEQ ID NO: 901068
caacaucucugagaacugc

SEQ ID NO: 901070 - RNA, 19 nt, Artificial Sequence
  Description of Artificial Sequence: Synthetic oligonucleotide
  Sense strand starting at position 2522 of SEQ ID NO: 588956
cucagagauguugggugaa

SEQ ID NO: 901071 - RNA, 19 nt, Artificial Sequence
  Description of Artificial Sequence: Synthetic oligonucleotide
  Antisense strand to SEQ ID NO: 901070
uucacccaacaucucugag

SEQ ID NO: 901072 - RNA, 19 nt, Artificial Sequence
  Description of Artificial Sequence: Synthetic oligonucleotide
  Sense strand starting at position 2524 of SEQ ID NO: 588956
cagagauguugggugaaug

SEQ ID NO: 901073 - RNA, 19 nt, Artificial Sequence
  Description of Artificial Sequence: Synthetic oligonucleotide
  Antisense strand to SEQ ID NO: 901072
cauucacccaacaucucug

SEQ ID NO: 901074 - RNA, 19 nt, Artificial Sequence
  Description of Artificial Sequence: Synthetic oligonucleotide
  Sense strand starting at position 2532 of SEQ ID NO: 588956
uugggugaaugguuagauu

SEQ ID NO: 901075 - RNA, 19 nt, Artificial Sequence
  Description of Artificial Sequence: Synthetic oligonucleotide
  Antisense strand to SEQ ID NO: 901074
aaucuaaccauucacccaa

SEQ ID NO: 901076 - RNA, 19 nt, Artificial Sequence
  Description of Artificial Sequence: Synthetic oligonucleotide
  Sense strand starting at position 2535 of SEQ ID NO: 588956
ggugaaugguuagauuucu

SEQ ID NO: 901077 - RNA, 19 nt, Artificial Sequence
  Description of Artificial Sequence: Synthetic oligonucleotide
  Antisense strand to SEQ ID NO: 901076
agaaaucuaaccauucacc

SEQ ID NO: 901078 - RNA, 19 nt, Artificial Sequence
  Description of Artificial Sequence: Synthetic oligonucleotide
  Sense strand starting at position 2541 of SEQ ID NO: 588956
ugguuagauuucuagguuc

SEQ ID NO: 901079 - RNA, 19 nt, Artificial Sequence
  Description of Artificial Sequence: Synthetic oligonucleotide
  Antisense strand to SEQ ID NO: 901078
gaaccuagaaaucuaacca

SEQ ID NO: 901080 - RNA, 19 nt, Artificial Sequence
  Description of Artificial Sequence: Synthetic oligonucleotide
  Sense strand starting at position 2675 of SEQ ID NO: 588956
uauacaaggccuggugaaa

SEQ ID NO: 901081 - RNA, 19 nt, Artificial Sequence
  Description of Artificial Sequence: Synthetic oligonucleotide
  Antisense strand to SEQ ID NO: 901080
uuucaccaggccuuguaua

SEQ ID NO: 901082 - RNA, 19 nt, Artificial Sequence
  Description of Artificial Sequence: Synthetic oligonucleotide
  Sense strand starting at position 2687 of SEQ ID NO: 588956
ggugaaagcucuuuaugug

SEQ ID NO: 901083 - RNA, 19 nt, Artificial Sequence
  Description of Artificial Sequence: Synthetic oligonucleotide
  Antisense strand to SEQ ID NO: 901082
cacauaaagagcuuucacc

SEQ ID NO: 901084 - RNA, 19 nt, Artificial Sequence
  Description of Artificial Sequence: Synthetic oligonucleotide
  Sense strand starting at position 2749 of SEQ ID NO: 588956
cguucuuaucuccauucua

SEQ ID NO: 901085 - RNA, 19 nt, Artificial Sequence
  Description of Artificial Sequence: Synthetic oligonucleotide
  Antisense strand to SEQ ID NO: 901084
uagaauggagauaagaacg

SEQ ID NO: 901086 - RNA, 19 nt, Artificial Sequence
  Description of Artificial Sequence: Synthetic oligonucleotide
  Sense strand starting at position 2792 of SEQ ID NO: 588956
gaggcaaggugaucugacu

SEQ ID NO: 901087 - RNA, 19 nt, Artificial Sequence
  Description of Artificial Sequence: Synthetic oligonucleotide
  Antisense strand to SEQ ID NO: 901086
agucagaucaccuugccuc

SEQ ID NO: 901088 - RNA, 19 nt, Artificial Sequence
  Description of Artificial Sequence: Synthetic oligonucleotide
  Sense strand starting at position 2833 of SEQ ID NO: 588956
cacauccugcuaggugaua

SEQ ID NO: 901089 - RNA, 19 nt, Artificial Sequence
  Description of Artificial Sequence: Synthetic oligonucleotide
  Antisense strand to SEQ ID NO: 901088
uaucaccuagcaggaugug

SEQ ID NO: 901090 - RNA, 19 nt, Artificial Sequence
  Description of Artificial Sequence: Synthetic oligonucleotide
  Sense strand starting at position 2834 of SEQ ID NO: 588956
acauccugcuaggugauaa

SEQ ID NO: 901091 - RNA, 19 nt, Artificial Sequence
  Description of Artificial Sequence: Synthetic oligonucleotide
  Antisense strand to SEQ ID NO: 901090
uuaucaccuagcaggaugu

SEQ ID NO: 901092 - RNA, 19 nt, Artificial Sequence
  Description of Artificial Sequence: Synthetic oligonucleotide
  Sense strand starting at position 2855 of SEQ ID NO: 588956
agacauagguacuaagauc

SEQ ID NO: 901093 - RNA, 19 nt, Artificial Sequence
  Description of Artificial Sequence: Synthetic oligonucleotide
  Antisense strand to SEQ ID NO: 901092
gaucuuaguaccuaugucu

SEQ ID NO: 901094 - RNA, 19 nt, Artificial Sequence
  Description of Artificial Sequence: Synthetic oligonucleotide
  Sense strand starting at position 2877 of SEQ ID NO: 588956
gacugaauugugugaaagu

SEQ ID NO: 901095 - RNA, 19 nt, Artificial Sequence
  Description of Artificial Sequence: Synthetic oligonucleotide
  Antisense strand to SEQ ID NO: 901094
acuuucacacaauucaguc

SEQ ID NO: 901096 - RNA, 19 nt, Artificial Sequence
  Description of Artificial Sequence: Synthetic oligonucleotide
  Sense strand starting at position 2888 of SEQ ID NO: 588956
gugaaaguccucugccuuu

SEQ ID NO: 901097 - RNA, 19 nt, Artificial Sequence
  Description of Artificial Sequence: Synthetic oligonucleotide
  Antisense strand to SEQ ID NO: 901096
aaaggcagaggacuuucac

SEQ ID NO: 901098 - RNA, 19 nt, Artificial Sequence
  Description of Artificial Sequence: Synthetic oligonucleotide
  Sense strand starting at position 3042 of SEQ ID NO: 588956
gugcaaauaugagacaaua

SEQ ID NO: 901099 - RNA, 19 nt, Artificial Sequence
  Description of Artificial Sequence: Synthetic oligonucleotide
  Antisense strand to SEQ ID NO: 901098
uauugucucauauuugcac

SEQ ID NO: 901100 - RNA, 19 nt, Artificial Sequence
  Description of Artificial Sequence: Synthetic oligonucleotide
  Sense strand starting at position 3071 of SEQ ID NO: 588956
aaaguuauaugucaagaag

SEQ ID NO: 901101 - RNA, 19 nt, Artificial Sequence
  Description of Artificial Sequence: Synthetic oligonucleotide
  Antisense strand to SEQ ID NO: 901100
cuucuugacauauaacuuu

SEQ ID NO: 901102 - RNA, 19 nt, Artificial Sequence
  Description of Artificial Sequence: Synthetic oligonucleotide
  Sense strand starting at position 3367 of SEQ ID NO: 588956
accuguaacgccuauaauc

SEQ ID NO: 901103 - RNA, 19 nt, Artificial Sequence
  Description of Artificial Sequence: Synthetic oligonucleotide
  Antisense strand to SEQ ID NO: 901102
gauuauaggcguuacaggu

SEQ ID NO: 901104 - RNA, 19 nt, Artificial Sequence
  Description of Artificial Sequence: Synthetic oligonucleotide
  Sense strand starting at position 3535 of SEQ ID NO: 588956
uuggaugauuaacaagagu

SEQ ID NO: 901105 - RNA, 19 nt, Artificial Sequence
  Description of Artificial Sequence: Synthetic oligonucleotide
  Antisense strand to SEQ ID NO: 901104
acucuuguuaaucauccaa

SEQ ID NO: 901106 - RNA, 19 nt, Artificial Sequence
  Description of Artificial Sequence: Synthetic oligonucleotide
  Sense strand starting at position 3769 of SEQ ID NO: 588956
cgguaccucuuaguacaau

SEQ ID NO: 901107 - RNA, 19 nt, Artificial Sequence
  Description of Artificial Sequence: Synthetic oligonucleotide
  Antisense strand to SEQ ID NO: 901106
auuguacuaagagguaccg

SEQ ID NO: 901108 - RNA, 19 nt, Artificial Sequence
  Description of Artificial Sequence: Synthetic oligonucleotide
  Sense strand starting at position 3775 of SEQ ID NO: 588956
cucuuaguacaauggagua

SEQ ID NO: 901109 - RNA, 19 nt, Artificial Sequence
  Description of Artificial Sequence: Synthetic oligonucleotide
  Antisense strand to SEQ ID NO: 901108
uacuccauuguacuaagag

SEQ ID NO: 901110 - RNA, 19 nt, Artificial Sequence
  Description of Artificial Sequence: Synthetic oligonucleotide
  Sense strand starting at position 3787 of SEQ ID NO: 588956
uggaguauuaugcagcuuu

SEQ ID NO: 901111 - RNA, 19 nt, Artificial Sequence
  Description of Artificial Sequence: Synthetic oligonucleotide
  Antisense strand to SEQ ID NO: 901110
aaagcugcauaauacucca

SEQ ID NO: 901112 - RNA, 19 nt, Artificial Sequence
  Description of Artificial Sequence: Synthetic oligonucleotide
  Sense strand starting at position 3808 of SEQ ID NO: 588956
caaugaugauaauuagguu

SEQ ID NO: 901113 - RNA, 19 nt, Artificial Sequence
  Description of Artificial Sequence: Synthetic oligonucleotide
  Antisense strand to SEQ ID NO: 901112
aaccuaauuaucaucauug

SEQ ID NO: 901114 - RNA, 19 nt, Artificial Sequence
  Description of Artificial Sequence: Synthetic oligonucleotide
  Sense strand starting at position 3814 of SEQ ID NO: 588956
ugauaauuagguuagcguu

SEQ ID NO: 901115 - RNA, 19 nt, Artificial Sequence
  Description of Artificial Sequence: Synthetic oligonucleotide
  Antisense strand to SEQ ID NO: 901114
aacgcuaaccuaauuauca

SEQ ID NO: 901116 - RNA, 19 nt, Artificial Sequence
  Description of Artificial Sequence: Synthetic oligonucleotide
  Sense strand starting at position 3816 of SEQ ID NO: 588956
auaauuagguuagcguuua

SEQ ID NO: 901117 - RNA, 19 nt, Artificial Sequence
  Description of Artificial Sequence: Synthetic oligonucleotide
  Antisense strand to SEQ ID NO: 901116
uaaacgcuaaccuaauuau

SEQ ID NO: 901118 - RNA, 19 nt, Artificial Sequence
  Description of Artificial Sequence: Synthetic oligonucleotide
  Sense strand starting at position 3856 of SEQ ID NO: 588956
acugaugaguaauaggaaa

SEQ ID NO: 901119 - RNA, 19 nt, Artificial Sequence
  Description of Artificial Sequence: Synthetic oligonucleotide
  Antisense strand to SEQ ID NO: 901118
uuuccuauuacucaucagu

SEQ ID NO: 901120 - RNA, 19 nt, Artificial Sequence
  Description of Artificial Sequence: Synthetic oligonucleotide
  Sense strand starting at position 3954 of SEQ ID NO: 588956
aacagugguuaugucugaa

SEQ ID NO: 901121 - RNA, 19 nt, Artificial Sequence
  Description of Artificial Sequence: Synthetic oligonucleotide
  Antisense strand to SEQ ID NO: 901120
uucagacauaaccacuguu

SEQ ID NO: 901122 - RNA, 19 nt, Artificial Sequence
  Description of Artificial Sequence: Synthetic oligonucleotide
  Sense strand starting at position 3957 of SEQ ID NO: 588956
agugguuaugucugaaaga

SEQ ID NO: 901123 - RNA, 19 nt, Artificial Sequence
  Description of Artificial Sequence: Synthetic oligonucleotide
  Antisense strand to SEQ ID NO: 901122
ucuuucagacauaaccacu

SEQ ID NO: 901124 - RNA, 19 nt, Artificial Sequence
  Description of Artificial Sequence: Synthetic oligonucleotide
  Sense strand starting at position 3975 of SEQ ID NO: 588956
accagcuuaugaguaauaa

SEQ ID NO: 901125 - RNA, 19 nt, Artificial Sequence
  Description of Artificial Sequence: Synthetic oligonucleotide
  Antisense strand to SEQ ID NO: 901124
uuauuacucauaagcuggu

SEQ ID NO: 901126 - RNA, 19 nt, Artificial Sequence
  Description of Artificial Sequence: Synthetic oligonucleotide
  Sense strand starting at position 3976 of SEQ ID NO: 588956
ccagcuuaugaguaauaau

SEQ ID NO: 901127 - RNA, 19 nt, Artificial Sequence
  Description of Artificial Sequence: Synthetic oligonucleotide
  Antisense strand to SEQ ID NO: 901126
auuauuacucauaagcugg

SEQ ID NO: 901128 - RNA, 19 nt, Artificial Sequence
  Description of Artificial Sequence: Synthetic oligonucleotide
  Sense strand starting at position 585 of SEQ ID NO: 588957
gaaacuggguuccguaaca

SEQ ID NO: 901129 - RNA, 19 nt, Artificial Sequence
  Description of Artificial Sequence: Synthetic oligonucleotide
  Antisense strand to SEQ ID NO: 901128
uguuacggaacccaguuuc

SEQ ID NO: 901130 - RNA, 19 nt, Artificial Sequence
  Description of Artificial Sequence: Synthetic oligonucleotide
  Sense strand starting at position 776 of SEQ ID NO: 588957
ggagcucuccaagaucugu

SEQ ID NO: 901131 - RNA, 19 nt, Artificial Sequence
  Description of Artificial Sequence: Synthetic oligonucleotide
  Antisense strand to SEQ ID NO: 901130
acagaucuuggagagcucc

SEQ ID NO: 901132 - RNA, 19 nt, Artificial Sequence
  Description of Artificial Sequence: Synthetic oligonucleotide
  Sense strand starting at position 1140 of SEQ ID NO: 588957
caggcuacuuccugacaga

SEQ ID NO: 901133 - RNA, 19 nt, Artificial Sequence
  Description of Artificial Sequence: Synthetic oligonucleotide
  Antisense strand to SEQ ID NO: 901132
ucugucaggaaguagccug

SEQ ID NO: 901134 - RNA, 19 nt, Artificial Sequence
  Description of Artificial Sequence: Synthetic oligonucleotide
  Sense strand starting at position 1143 of SEQ ID NO: 588957
gcuacuuccugacagacgu

SEQ ID NO: 901135 - RNA, 19 nt, Artificial Sequence
  Description of Artificial Sequence: Synthetic oligonucleotide
  Antisense strand to SEQ ID NO: 901134
acgucugucaggaaguagc

SEQ ID NO: 901136 - RNA, 19 nt, Artificial Sequence
  Description of Artificial Sequence: Synthetic oligonucleotide
  Sense strand starting at position 1540 of SEQ ID NO: 588957
gcagccuaccugugacgaa

SEQ ID NO: 901137 - RNA, 19 nt, Artificial Sequence
  Description of Artificial Sequence: Synthetic oligonucleotide
  Antisense strand to SEQ ID NO: 901136
uucgucacagguaggcugc

SEQ ID NO: 901138 - RNA, 19 nt, Artificial Sequence
  Description of Artificial Sequence: Synthetic oligonucleotide
  Sense strand starting at position 2290 of SEQ ID NO: 588957
gcggaggugucggguucua

SEQ ID NO: 901139 - RNA, 19 nt, Artificial Sequence
  Description of Artificial Sequence: Synthetic oligonucleotide
  Antisense strand to SEQ ID NO: 901138
uagaacccgacaccuccgc

SEQ ID NO: 901140 - RNA, 19 nt, Artificial Sequence
  Description of Artificial Sequence: Synthetic oligonucleotide
  Sense strand starting at position 2543 of SEQ ID NO: 588957
cuugcagaggccugaugau

SEQ ID NO: 901141 - RNA, 19 nt, Artificial Sequence
  Description of Artificial Sequence: Synthetic oligonucleotide
  Antisense strand to SEQ ID NO: 901140
aucaucaggccucugcaag

SEQ ID NO: 901142 - RNA, 19 nt, Artificial Sequence
  Description of Artificial Sequence: Synthetic oligonucleotide
  Sense strand starting at position 2550 of SEQ ID NO: 588957
aggccugaugauugucagu

SEQ ID NO: 901143 - RNA, 19 nt, Artificial Sequence
  Description of Artificial Sequence: Synthetic oligonucleotide
  Antisense strand to SEQ ID NO: 901142
acugacaaucaucaggccu

SEQ ID NO: 901144 - RNA, 19 nt, Artificial Sequence
  Description of Artificial Sequence: Synthetic oligonucleotide
  Sense strand starting at position 2552 of SEQ ID NO: 588957
gccugaugauugucagugu

SEQ ID NO: 901145 - RNA, 19 nt, Artificial Sequence
  Description of Artificial Sequence: Synthetic oligonucleotide
  Antisense strand to SEQ ID NO: 901144
acacugacaaucaucaggc

SEQ ID NO: 901146 - RNA, 19 nt, Artificial Sequence
  Description of Artificial Sequence: Synthetic oligonucleotide
  Sense strand starting at position 2553 of SEQ ID NO: 588957
ccugaugauugucaguguu

SEQ ID NO: 901147 - RNA, 19 nt, Artificial Sequence
  Description of Artificial Sequence: Synthetic oligonucleotide
  Antisense strand to SEQ ID NO: 901146
aacacugacaaucaucagg

SEQ ID NO: 901148 - RNA, 19 nt, Artificial Sequence
  Description of Artificial Sequence: Synthetic oligonucleotide
  Sense strand starting at position 2555 of SEQ ID NO: 588957
ugaugauugucaguguuau

SEQ ID NO: 901149 - RNA, 19 nt, Artificial Sequence
  Description of Artificial Sequence: Synthetic oligonucleotide
  Antisense strand to SEQ ID NO: 901148
auaacacugacaaucauca

SEQ ID NO: 901150 - RNA, 19 nt, Artificial Sequence
  Description of Artificial Sequence: Synthetic oligonucleotide
  Sense strand starting at position 2556 of SEQ ID NO: 588957
gaugauugucaguguuauu

SEQ ID NO: 901151 - RNA, 19 nt, Artificial Sequence
  Description of Artificial Sequence: Synthetic oligonucleotide
  Antisense strand to SEQ ID NO: 901150
aauaacacugacaaucauc

SEQ ID NO: 901152 - RNA, 19 nt, Artificial Sequence
  Description of Artificial Sequence: Synthetic oligonucleotide
  Sense strand starting at position 2648 of SEQ ID NO: 588957
uuagcaaagugguucugua

SEQ ID NO: 901153 - RNA, 19 nt, Artificial Sequence
  Description of Artificial Sequence: Synthetic oligonucleotide
  Antisense strand to SEQ ID NO: 901152
uacagaaccacuuugcuaa

SEQ ID NO: 901154 - RNA, 19 nt, Artificial Sequence
  Description of Artificial Sequence: Synthetic oligonucleotide
  Sense strand starting at position 2652 of SEQ ID NO: 588957
caaagugguucuguaacca

SEQ ID NO: 901155 - RNA, 19 nt, Artificial Sequence
  Description of Artificial Sequence: Synthetic oligonucleotide
  Antisense strand to SEQ ID NO: 901154
ugguuacagaaccacuuug

SEQ ID NO: 901156 - RNA, 19 nt, Artificial Sequence
  Description of Artificial Sequence: Synthetic oligonucleotide
  Sense strand starting at position 2761 of SEQ ID NO: 588957
auguacaaguucuugaauu

SEQ ID NO: 901157 - RNA, 19 nt, Artificial Sequence
  Description of Artificial Sequence: Synthetic oligonucleotide
  Antisense strand to SEQ ID NO: 901156
aauucaagaacuuguacau

SEQ ID NO: 901158 - RNA, 19 nt, Artificial Sequence
  Description of Artificial Sequence: Synthetic oligonucleotide
  Sense strand starting at position 2762 of SEQ ID NO: 588957
uguacaaguucuugaauuc

SEQ ID NO: 901159 - RNA, 19 nt, Artificial Sequence
  Description of Artificial Sequence: Synthetic oligonucleotide
  Antisense strand to SEQ ID NO: 901158
gaauucaagaacuuguaca

SEQ ID NO: 901160 - RNA, 19 nt, Artificial Sequence
  Description of Artificial Sequence: Synthetic oligonucleotide
  Sense strand starting at position 2763 of SEQ ID NO: 588957
guacaaguucuugaauucu

SEQ ID NO: 901161 - RNA, 19 nt, Artificial Sequence
  Description of Artificial Sequence: Synthetic oligonucleotide
  Antisense strand to SEQ ID NO: 901160
agaauucaagaacuuguac

SEQ ID NO: 901162 - RNA, 19 nt, Artificial Sequence
  Description of Artificial Sequence: Synthetic oligonucleotide
  Sense strand starting at position 2845 of SEQ ID NO: 588957
ugguguaaccauuagcaag

SEQ ID NO: 901163 - RNA, 19 nt, Artificial Sequence
  Description of Artificial Sequence: Synthetic oligonucleotide
  Antisense strand to SEQ ID NO: 901162
cuugcuaaugguuacacca

SEQ ID NO: 901164 - RNA, 19 nt, Artificial Sequence
  Description of Artificial Sequence: Synthetic oligonucleotide
  Sense strand starting at position 2847 of SEQ ID NO: 588957
guguaaccauuagcaagaa

SEQ ID NO: 901165 - RNA, 19 nt, Artificial Sequence
  Description of Artificial Sequence: Synthetic oligonucleotide
  Antisense strand to SEQ ID NO: 901164
uucuugcuaaugguuacac

SEQ ID NO: 901166 - RNA, 19 nt, Artificial Sequence
  Description of Artificial Sequence: Synthetic oligonucleotide
  Sense strand starting at position 2930 of SEQ ID NO: 588957
ucgauaaagucccugaucu

SEQ ID NO: 901167 - RNA, 19 nt, Artificial Sequence
  Description of Artificial Sequence: Synthetic oligonucleotide
  Antisense strand to SEQ ID NO: 901166
agaucagggacuuuaucga

SEQ ID NO: 901168 - RNA, 19 nt, Artificial Sequence
  Description of Artificial Sequence: Synthetic oligonucleotide
  Sense strand starting at position 2931 of SEQ ID NO: 588957
cgauaaagucccugaucuu

SEQ ID NO: 901169 - RNA, 19 nt, Artificial Sequence
  Description of Artificial Sequence: Synthetic oligonucleotide
  Antisense strand to SEQ ID NO: 901168
aagaucagggacuuuaucg

SEQ ID NO: 901170 - RNA, 19 nt, Artificial Sequence
  Description of Artificial Sequence: Synthetic oligonucleotide
  Sense strand starting at position 3135 of SEQ ID NO: 588957
gaugaaaucuuggccaggu

SEQ ID NO: 901171 - RNA, 19 nt, Artificial Sequence
  Description of Artificial Sequence: Synthetic oligonucleotide
  Antisense strand to SEQ ID NO: 901170
accuggccaagauuucauc

SEQ ID NO: 901172 - RNA, 19 nt, Artificial Sequence
  Description of Artificial Sequence: Synthetic oligonucleotide
  Sense strand starting at position 3225 of SEQ ID NO: 588957
auacuagccuggccaagau

SEQ ID NO: 901173 - RNA, 19 nt, Artificial Sequence
  Description of Artificial Sequence: Synthetic oligonucleotide
  Antisense strand to SEQ ID NO: 901172
aucuuggccaggcuaguau

SEQ ID NO: 901174 - RNA, 19 nt, Artificial Sequence
  Description of Artificial Sequence: Synthetic oligonucleotide
  Sense strand starting at position 3440 of SEQ ID NO: 588957
ggcugaagucuuuagauaa

SEQ ID NO: 901175 - RNA, 19 nt, Artificial Sequence
  Description of Artificial Sequence: Synthetic oligonucleotide
  Antisense strand to SEQ ID NO: 901174
uuaucuaaagacuucagcc

SEQ ID NO: 901176 - RNA, 19 nt, Artificial Sequence
  Description of Artificial Sequence: Synthetic oligonucleotide
  Sense strand starting at position 3638 of SEQ ID NO: 588957
auuauucugcuuugaaaug

SEQ ID NO: 901177 - RNA, 19 nt, Artificial Sequence
  Description of Artificial Sequence: Synthetic oligonucleotide
  Antisense strand to SEQ ID NO: 901176
cauuucaaagcagaauaau

SEQ ID NO: 901178 - RNA, 19 nt, Artificial Sequence
  Description of Artificial Sequence: Synthetic oligonucleotide
  Sense strand starting at position 3697 of SEQ ID NO: 588957
gaacaugugcuguauugac

SEQ ID NO: 901179 - RNA, 19 nt, Artificial Sequence
  Description of Artificial Sequence: Synthetic oligonucleotide
  Antisense strand to SEQ ID NO: 901178
gucaauacagcacauguuc

SEQ ID NO: 901180 - RNA, 19 nt, Artificial Sequence
  Description of Artificial Sequence: Synthetic oligonucleotide
  Sense strand starting at position 3752 of SEQ ID NO: 588957
ccuuguuaacaauguguuu

SEQ ID NO: 901181 - RNA, 19 nt, Artificial Sequence
  Description of Artificial Sequence: Synthetic oligonucleotide
  Antisense strand to SEQ ID NO: 901180
aaacacauuguuaacaagg

SEQ ID NO: 901182 - RNA, 19 nt, Artificial Sequence
  Description of Artificial Sequence: Synthetic oligonucleotide
  Sense strand starting at position 50 of SEQ ID NO: 588958
gaagucauuucggugugaa

SEQ ID NO: 901183 - RNA, 19 nt, Artificial Sequence
  Description of Artificial Sequence: Synthetic oligonucleotide
  Antisense strand to SEQ ID NO: 901182
uucacaccgaaaugacuuc

SEQ ID NO: 901184 - RNA, 19 nt, Artificial Sequence
  Description of Artificial Sequence: Synthetic oligonucleotide
  Sense strand starting at position 51 of SEQ ID NO: 588958
aagucauuucggugugaag

SEQ ID NO: 901185 - RNA, 19 nt, Artificial Sequence
  Description of Artificial Sequence: Synthetic oligonucleotide
  Antisense strand to SEQ ID NO: 901184
cuucacaccgaaaugacuu

SEQ ID NO: 901186 - RNA, 19 nt, Artificial Sequence
  Description of Artificial Sequence: Synthetic oligonucleotide
  Sense strand starting at position 53 of SEQ ID NO: 588958
gucauuucggugugaagag

SEQ ID NO: 901187 - RNA, 19 nt, Artificial Sequence
  Description of Artificial Sequence: Synthetic oligonucleotide
  Antisense strand to SEQ ID NO: 901186
cucuucacaccgaaaugac

SEQ ID NO: 901188 - RNA, 19 nt, Artificial Sequence
  Description of Artificial Sequence: Synthetic oligonucleotide
  Sense strand starting at position 133 of SEQ ID NO: 588958
uucugcuuugcccagaaau

SEQ ID NO: 901189 - RNA, 19 nt, Artificial Sequence
  Description of Artificial Sequence: Synthetic oligonucleotide
  Antisense strand to SEQ ID NO: 901188
auuucugggcaaagcagaa

SEQ ID NO: 901190 - RNA, 19 nt, Artificial Sequence
  Description of Artificial Sequence: Synthetic oligonucleotide
  Sense strand starting at position 164 of SEQ ID NO: 588958
gaacccuuuguauagguaa

SEQ ID NO: 901191 - RNA, 19 nt, Artificial Sequence
  Description of Artificial Sequence: Synthetic oligonucleotide
  Antisense strand to SEQ ID NO: 901190
uuaccuauacaaaggguuc

SEQ ID NO: 901192 - RNA, 19 nt, Artificial Sequence
  Description of Artificial Sequence: Synthetic oligonucleotide
  Sense strand starting at position 167 of SEQ ID NO: 588958
cccuuuguauagguaauca

SEQ ID NO: 901193 - RNA, 19 nt, Artificial Sequence
  Description of Artificial Sequence: Synthetic oligonucleotide
  Antisense strand to SEQ ID NO: 901192
ugauuaccuauacaaaggg

SEQ ID NO: 901194 - RNA, 19 nt, Artificial Sequence
  Description of Artificial Sequence: Synthetic oligonucleotide
  Sense strand starting at position 244 of SEQ ID NO: 588958
gggucaaauaagcauuagu

SEQ ID NO: 901195 - RNA, 19 nt, Artificial Sequence
  Description of Artificial Sequence: Synthetic oligonucleotide
  Antisense strand to SEQ ID NO: 901194
acuaaugcuuauuugaccc

SEQ ID NO: 901196 - RNA, 19 nt, Artificial Sequence
  Description of Artificial Sequence: Synthetic oligonucleotide
  Sense strand starting at position 325 of SEQ ID NO: 588958
cugagccauuuccaacaga

SEQ ID NO: 901197 - RNA, 19 nt, Artificial Sequence
  Description of Artificial Sequence: Synthetic oligonucleotide
  Antisense strand to SEQ ID NO: 901196
ucuguuggaaauggcucag

SEQ ID NO: 901198 - RNA, 19 nt, Artificial Sequence
  Description of Artificial Sequence: Synthetic oligonucleotide
  Sense strand starting at position 528 of SEQ ID NO: 588958
agcucaugugcacaaugaa

SEQ ID NO: 901199 - RNA, 19 nt, Artificial Sequence
  Description of Artificial Sequence: Synthetic oligonucleotide
  Antisense strand to SEQ ID NO: 901198
uucauugugcacaugagcu

SEQ ID NO: 901200 - RNA, 19 nt, Artificial Sequence
  Description of Artificial Sequence: Synthetic oligonucleotide
  Sense strand starting at position 531 of SEQ ID NO: 588958
ucaugugcacaaugaaagu

SEQ ID NO: 901201 - RNA, 19 nt, Artificial Sequence
  Description of Artificial Sequence: Synthetic oligonucleotide
  Antisense strand to SEQ ID NO: 901200
acuuucauugugcacauga

SEQ ID NO: 901202 - RNA, 19 nt, Artificial Sequence
  Description of Artificial Sequence: Synthetic oligonucleotide
  Sense strand starting at position 620 of SEQ ID NO: 588958
uuuccuaaccugcggagaa

SEQ ID NO: 901203 - RNA, 19 nt, Artificial Sequence
  Description of Artificial Sequence: Synthetic oligonucleotide
  Antisense strand to SEQ ID NO: 901202
uucuccgcagguuaggaaa

SEQ ID NO: 901204 - RNA, 19 nt, Artificial Sequence
  Description of Artificial Sequence: Synthetic oligonucleotide
  Sense strand starting at position 622 of SEQ ID NO: 588958
uccuaaccugcggagaauu

SEQ ID NO: 901205 - RNA, 19 nt, Artificial Sequence
  Description of Artificial Sequence: Synthetic oligonucleotide
  Antisense strand to SEQ ID NO: 901204
aauucuccgcagguuagga

SEQ ID NO: 901206 - RNA, 19 nt, Artificial Sequence
  Description of Artificial Sequence: Synthetic oligonucleotide
  Sense strand starting at position 813 of SEQ ID NO: 588958
cucccaacucugcagagaa

SEQ ID NO: 901207 - RNA, 19 nt, Artificial Sequence
  Description of Artificial Sequence: Synthetic oligonucleotide
  Antisense strand to SEQ ID NO: 901206
uucucugcagaguugggag

SEQ ID NO: 901208 - RNA, 19 nt, Artificial Sequence
  Description of Artificial Sequence: Synthetic oligonucleotide
  Sense strand starting at position 1123 of SEQ ID NO: 588958
ccgacuuugaaagguccau

SEQ ID NO: 901209 - RNA, 19 nt, Artificial Sequence
  Description of Artificial Sequence: Synthetic oligonucleotide
  Antisense strand to SEQ ID NO: 901208
auggaccuuucaaagucgg

SEQ ID NO: 901210 - RNA, 19 nt, Artificial Sequence
  Description of Artificial Sequence: Synthetic oligonucleotide
  Sense strand starting at position 1127 of SEQ ID NO: 588958
cuuugaaagguccauuguu

SEQ ID NO: 901211 - RNA, 19 nt, Artificial Sequence
  Description of Artificial Sequence: Synthetic oligonucleotide
  Antisense strand to SEQ ID NO: 901210
aacaauggaccuuucaaag

SEQ ID NO: 901212 - RNA, 19 nt, Artificial Sequence
  Description of Artificial Sequence: Synthetic oligonucleotide
  Sense strand starting at position 1207 of SEQ ID NO: 588958
cgaggacccuuucuuaaga

SEQ ID NO: 901213 - RNA, 19 nt, Artificial Sequence
  Description of Artificial Sequence: Synthetic oligonucleotide
  Antisense strand to SEQ ID NO: 901212
ucuuaagaaaggguccucg

SEQ ID NO: 901214 - RNA, 19 nt, Artificial Sequence
  Description of Artificial Sequence: Synthetic oligonucleotide
  Sense strand starting at position 1643 of SEQ ID NO: 588958
ucugccuggaggugaaaua

SEQ ID NO: 901215 - RNA, 19 nt, Artificial Sequence
  Description of Artificial Sequence: Synthetic oligonucleotide
  Antisense strand to SEQ ID NO: 901214
uauuucaccuccaggcaga

SEQ ID NO: 901216 - RNA, 19 nt, Artificial Sequence
  Description of Artificial Sequence: Synthetic oligonucleotide
  Sense strand starting at position 2509 of SEQ ID NO: 588958
guucucagcgcugucagaa

SEQ ID NO: 901217 - RNA, 19 nt, Artificial Sequence
  Description of Artificial Sequence: Synthetic oligonucleotide
  Antisense strand to SEQ ID NO: 901216
uucugacagcgcugagaac

SEQ ID NO: 901218 - RNA, 19 nt, Artificial Sequence
  Description of Artificial Sequence: Synthetic oligonucleotide
  Sense strand starting at position 2890 of SEQ ID NO: 588958
gucgucauccucgauuuaa

SEQ ID NO: 901219 - RNA, 19 nt, Artificial Sequence
  Description of Artificial Sequence: Synthetic oligonucleotide
  Antisense strand to SEQ ID NO: 901218
uuaaaucgaggaugacgac

SEQ ID NO: 901220 - RNA, 19 nt, Artificial Sequence
  Description of Artificial Sequence: Synthetic oligonucleotide
  Sense strand starting at position 3064 of SEQ ID NO: 588958
aggguauuaguucaggacu

SEQ ID NO: 901221 - RNA, 19 nt, Artificial Sequence
  Description of Artificial Sequence: Synthetic oligonucleotide
  Antisense strand to SEQ ID NO: 901220
aguccugaacuaauacccu

SEQ ID NO: 901222 - RNA, 19 nt, Artificial Sequence
  Description of Artificial Sequence: Synthetic oligonucleotide
  Sense strand starting at position 3101 of SEQ ID NO: 588958
uuuccaaaucuuggcugau

SEQ ID NO: 901223 - RNA, 19 nt, Artificial Sequence
  Description of Artificial Sequence: Synthetic oligonucleotide
  Antisense strand to SEQ ID NO: 901222
aucagccaagauuuggaaa

SEQ ID NO: 901224 - RNA, 19 nt, Artificial Sequence
  Description of Artificial Sequence: Synthetic oligonucleotide
  Sense strand starting at position 3102 of SEQ ID NO: 588958
uuccaaaucuuggcugaug

SEQ ID NO: 901225 - RNA, 19 nt, Artificial Sequence
  Description of Artificial Sequence: Synthetic oligonucleotide
  Antisense strand to SEQ ID NO: 901224
caucagccaagauuuggaa

SEQ ID NO: 901226 - RNA, 19 nt, Artificial Sequence
  Description of Artificial Sequence: Synthetic oligonucleotide
  Sense strand starting at position 3103 of SEQ ID NO: 588958
uccaaaucuuggcugauga

SEQ ID NO: 901227 - RNA, 19 nt, Artificial Sequence
  Description of Artificial Sequence: Synthetic oligonucleotide
  Antisense strand to SEQ ID NO: 901226
ucaucagccaagauuugga

SEQ ID NO: 901228 - RNA, 19 nt, Artificial Sequence
  Description of Artificial Sequence: Synthetic oligonucleotide
  Sense strand starting at position 3104 of SEQ ID NO: 588958
ccaaaucuuggcugaugau

SEQ ID NO: 901229 - RNA, 19 nt, Artificial Sequence
  Description of Artificial Sequence: Synthetic oligonucleotide
  Antisense strand to SEQ ID NO: 901228
aucaucagccaagauuugg

SEQ ID NO: 901230 - RNA, 19 nt, Artificial Sequence
  Description of Artificial Sequence: Synthetic oligonucleotide
  Sense strand starting at position 3182 of SEQ ID NO: 588958
aucagagguaucgggaaua

SEQ ID NO: 901231 - RNA, 19 nt, Artificial Sequence
  Description of Artificial Sequence: Synthetic oligonucleotide
  Antisense strand to SEQ ID NO: 901230
uauucccgauaccucugau

SEQ ID NO: 901232 - RNA, 19 nt, Artificial Sequence
  Description of Artificial Sequence: Synthetic oligonucleotide
  Sense strand starting at position 3187 of SEQ ID NO: 588958
agguaucgggaauauguaa

SEQ ID NO: 901233 - RNA, 19 nt, Artificial Sequence
  Description of Artificial Sequence: Synthetic oligonucleotide
  Antisense strand to SEQ ID NO: 901232
uuacauauucccgauaccu

SEQ ID NO: 901234 - RNA, 19 nt, Artificial Sequence
  Description of Artificial Sequence: Synthetic oligonucleotide
  Sense strand starting at position 3251 of SEQ ID NO: 588958
uuggaaagaugccuccaaa

SEQ ID NO: 901235 - RNA, 19 nt, Artificial Sequence
  Description of Artificial Sequence: Synthetic oligonucleotide
  Antisense strand to SEQ ID NO: 901234
uuuggaggcaucuuuccaa

SEQ ID NO: 901236 - RNA, 19 nt, Artificial Sequence
  Description of Artificial Sequence: Synthetic oligonucleotide
  Sense strand starting at position 3439 of SEQ ID NO: 588958
uuuggauugugcuuaauaa

SEQ ID NO: 901237 - RNA, 19 nt, Artificial Sequence
  Description of Artificial Sequence: Synthetic oligonucleotide
  Antisense strand to SEQ ID NO: 901236
uuauuaagcacaauccaaa

SEQ ID NO: 901238 - RNA, 19 nt, Artificial Sequence
  Description of Artificial Sequence: Synthetic oligonucleotide
  Sense strand starting at position 3440 of SEQ ID NO: 588958
uuggauugugcuuaauaaa

SEQ ID NO: 901239 - RNA, 19 nt, Artificial Sequence
  Description of Artificial Sequence: Synthetic oligonucleotide
  Antisense strand to SEQ ID NO: 901238
uuuauuaagcacaauccaa

SEQ ID NO: 901240 - RNA, 19 nt, Artificial Sequence
  Description of Artificial Sequence: Synthetic oligonucleotide
  Sense strand starting at position 3519 of SEQ ID NO: 588958
guucuaaguccuggaacuu

SEQ ID NO: 901241 - RNA, 19 nt, Artificial Sequence
  Description of Artificial Sequence: Synthetic oligonucleotide
  Antisense strand to SEQ ID NO: 901240
aaguuccaggacuuagaac

SEQ ID NO: 901242 - RNA, 19 nt, Artificial Sequence
  Description of Artificial Sequence: Synthetic oligonucleotide
  Sense strand starting at position 3528 of SEQ ID NO: 588958
ccuggaacuugugcauauu

SEQ ID NO: 901243 - RNA, 19 nt, Artificial Sequence
  Description of Artificial Sequence: Synthetic oligonucleotide
  Antisense strand to SEQ ID NO: 901242
aauaugcacaaguuccagg

SEQ ID NO: 901244 - RNA, 19 nt, Artificial Sequence
  Description of Artificial Sequence: Synthetic oligonucleotide
  Sense strand starting at position 3529 of SEQ ID NO: 588958
cuggaacuugugcauauua

SEQ ID NO: 901245 - RNA, 19 nt, Artificial Sequence
  Description of Artificial Sequence: Synthetic oligonucleotide
  Antisense strand to SEQ ID NO: 901244
uaauaugcacaaguuccag

SEQ ID NO: 901246 - RNA, 19 nt, Artificial Sequence
  Description of Artificial Sequence: Synthetic oligonucleotide
  Sense strand starting at position 3537 of SEQ ID NO: 588958
ugugcauauuaccuuacau

SEQ ID NO: 901247 - RNA, 19 nt, Artificial Sequence
  Description of Artificial Sequence: Synthetic oligonucleotide
  Antisense strand to SEQ ID NO: 901246
auguaagguaauaugcaca

SEQ ID NO: 901248 - RNA, 19 nt, Artificial Sequence
  Description of Artificial Sequence: Synthetic oligonucleotide
  Sense strand starting at position 3588 of SEQ ID NO: 588958
aauuaagggucuucuugag

SEQ ID NO: 901249 - RNA, 19 nt, Artificial Sequence
  Description of Artificial Sequence: Synthetic oligonucleotide
  Antisense strand to SEQ ID NO: 901248
cucaagaagacccuuaauu

SEQ ID NO: 901250 - RNA, 19 nt, Artificial Sequence
  Description of Artificial Sequence: Synthetic oligonucleotide
  Sense strand starting at position 3626 of SEQ ID NO: 588958
ugaucaagauggguccuaa

SEQ ID NO: 901251 - RNA, 19 nt, Artificial Sequence
  Description of Artificial Sequence: Synthetic oligonucleotide
  Antisense strand to SEQ ID NO: 901250
uuaggacccaucuugauca

SEQ ID NO: 901252 - RNA, 19 nt, Artificial Sequence
  Description of Artificial Sequence: Synthetic oligonucleotide
  Sense strand starting at position 3854 of SEQ ID NO: 588958
ugcuuccagaagugugaaa

SEQ ID NO: 901253 - RNA, 19 nt, Artificial Sequence
  Description of Artificial Sequence: Synthetic oligonucleotide
  Antisense strand to SEQ ID NO: 901252
uuucacacuucuggaagca

SEQ ID NO: 901254 - RNA, 19 nt, Artificial Sequence
  Description of Artificial Sequence: Synthetic oligonucleotide
  Sense strand starting at position 3856 of SEQ ID NO: 588958
cuuccagaagugugaaaga

SEQ ID NO: 901255 - RNA, 19 nt, Artificial Sequence
  Description of Artificial Sequence: Synthetic oligonucleotide
  Antisense strand to SEQ ID NO: 901254
ucuuucacacuucuggaag

SEQ ID NO: 901256 - RNA, 19 nt, Artificial Sequence
  Description of Artificial Sequence: Synthetic oligonucleotide
  Sense strand starting at position 3896 of SEQ ID NO: 588958
cacugaguuugggugauau

SEQ ID NO: 901257 - RNA, 19 nt, Artificial Sequence
  Description of Artificial Sequence: Synthetic oligonucleotide
  Antisense strand to SEQ ID NO: 901256
auaucacccaaacucagug

SEQ ID NO: 901258 - RNA, 19 nt, Artificial Sequence
  Description of Artificial Sequence: Synthetic oligonucleotide
  Sense strand starting at position 3898 of SEQ ID NO: 588958
cugaguuugggugauaugu

SEQ ID NO: 901259 - RNA, 19 nt, Artificial Sequence
  Description of Artificial Sequence: Synthetic oligonucleotide
  Antisense strand to SEQ ID NO: 901258
acauaucacccaaacucag

SEQ ID NO: 901260 - RNA, 19 nt, Artificial Sequence
  Description of Artificial Sequence: Synthetic oligonucleotide
  Sense strand starting at position 3969 of SEQ ID NO: 588958
uuugaauccuuauuaagug

SEQ ID NO: 901261 - RNA, 19 nt, Artificial Sequence
  Description of Artificial Sequence: Synthetic oligonucleotide
  Antisense strand to SEQ ID NO: 901260
cacuuaauaaggauucaaa

SEQ ID NO: 901262 - RNA, 19 nt, Artificial Sequence
  Description of Artificial Sequence: Synthetic oligonucleotide
  Sense strand starting at position 151 of SEQ ID NO: 588959
gcaagaagucaugggcucu

SEQ ID NO: 901263 - RNA, 19 nt, Artificial Sequence
  Description of Artificial Sequence: Synthetic oligonucleotide
  Antisense strand to SEQ ID NO: 901262
agagcccaugacuucuugc

SEQ ID NO: 901264 - RNA, 19 nt, Artificial Sequence
  Description of Artificial Sequence: Synthetic oligonucleotide
  Sense strand starting at position 381 of SEQ ID NO: 588959
agcagagaguaucucaaua

SEQ ID NO: 901265 - RNA, 19 nt, Artificial Sequence
  Description of Artificial Sequence: Synthetic oligonucleotide
  Antisense strand to SEQ ID NO: 901264
uauugagauacucucugcu

SEQ ID NO: 901266 - RNA, 19 nt, Artificial Sequence
  Description of Artificial Sequence: Synthetic oligonucleotide
  Sense strand starting at position 470 of SEQ ID NO: 588959
uuugcaucucagcaaaggu

SEQ ID NO: 901267 - RNA, 19 nt, Artificial Sequence
  Description of Artificial Sequence: Synthetic oligonucleotide
  Antisense strand to SEQ ID NO: 901266
accuuugcugagaugcaaa

SEQ ID NO: 901268 - RNA, 19 nt, Artificial Sequence
  Description of Artificial Sequence: Synthetic oligonucleotide
  Sense strand starting at position 523 of SEQ ID NO: 588959
uucguaggccaacaaagau

SEQ ID NO: 901269 - RNA, 19 nt, Artificial Sequence
  Description of Artificial Sequence: Synthetic oligonucleotide
  Antisense strand to SEQ ID NO: 901268
aucuuuguuggccuacgaa

SEQ ID NO: 901270 - RNA, 19 nt, Artificial Sequence
  Description of Artificial Sequence: Synthetic oligonucleotide
  Sense strand starting at position 569 of SEQ ID NO: 588959
gaucucagugccuaugagu

SEQ ID NO: 901271 - RNA, 19 nt, Artificial Sequence
  Description of Artificial Sequence: Synthetic oligonucleotide
  Antisense strand to SEQ ID NO: 901270
acucauaggcacugagauc

SEQ ID NO: 901272 - RNA, 19 nt, Artificial Sequence
  Description of Artificial Sequence: Synthetic oligonucleotide
  Sense strand starting at position 612 of SEQ ID NO: 588959
gucucuuagggaggcuuaa

SEQ ID NO: 901273 - RNA, 19 nt, Artificial Sequence
  Description of Artificial Sequence: Synthetic oligonucleotide
  Antisense strand to SEQ ID NO: 901272
uuaagccucccuaagagac

SEQ ID NO: 901274 - RNA, 19 nt, Artificial Sequence
  Description of Artificial Sequence: Synthetic oligonucleotide
  Sense strand starting at position 851 of SEQ ID NO: 588959
gagauacaagcucguuuac

SEQ ID NO: 901275 - RNA, 19 nt, Artificial Sequence
  Description of Artificial Sequence: Synthetic oligonucleotide
  Antisense strand to SEQ ID NO: 901274
guaaacgagcuuguaucuc

SEQ ID NO: 901276 - RNA, 19 nt, Artificial Sequence
  Description of Artificial Sequence: Synthetic oligonucleotide
  Sense strand starting at position 853 of SEQ ID NO: 588959
gauacaagcucguuuacau

SEQ ID NO: 901277 - RNA, 19 nt, Artificial Sequence
  Description of Artificial Sequence: Synthetic oligonucleotide
  Antisense strand to SEQ ID NO: 901276
auguaaacgagcuuguauc

SEQ ID NO: 901278 - RNA, 19 nt, Artificial Sequence
  Description of Artificial Sequence: Synthetic oligonucleotide
  Sense strand starting at position 861 of SEQ ID NO: 588959
cucguuuacaugugauaga

SEQ ID NO: 901279 - RNA, 19 nt, Artificial Sequence
  Description of Artificial Sequence: Synthetic oligonucleotide
  Antisense strand to SEQ ID NO: 901278
ucuaucacauguaaacgag

SEQ ID NO: 901280 - RNA, 19 nt, Artificial Sequence
  Description of Artificial Sequence: Synthetic oligonucleotide
  Sense strand starting at position 896 of SEQ ID NO: 588959
accgaagucuggucuggau

SEQ ID NO: 901281 - RNA, 19 nt, Artificial Sequence
  Description of Artificial Sequence: Synthetic oligonucleotide
  Antisense strand to SEQ ID NO: 901280
auccagaccagacuucggu

SEQ ID NO: 901282 - RNA, 19 nt, Artificial Sequence
  Description of Artificial Sequence: Synthetic oligonucleotide
  Sense strand starting at position 994 of SEQ ID NO: 588959
aguacuuucccaggaucca

SEQ ID NO: 901283 - RNA, 19 nt, Artificial Sequence
  Description of Artificial Sequence: Synthetic oligonucleotide
  Antisense strand to SEQ ID NO: 901282
uggauccugggaaaguacu

SEQ ID NO: 901284 - RNA, 19 nt, Artificial Sequence
  Description of Artificial Sequence: Synthetic oligonucleotide
  Sense strand starting at position 1024 of SEQ ID NO: 588959
cagaguccaccuggacauu

SEQ ID NO: 901285 - RNA, 19 nt, Artificial Sequence
  Description of Artificial Sequence: Synthetic oligonucleotide
  Antisense strand to SEQ ID NO: 901284
aauguccagguggacucug

SEQ ID NO: 901286 - RNA, 19 nt, Artificial Sequence
  Description of Artificial Sequence: Synthetic oligonucleotide
  Sense strand starting at position 1053 of SEQ ID NO: 588959
ucaguuuccaagugucaga

SEQ ID NO: 901287 - RNA, 19 nt, Artificial Sequence
  Description of Artificial Sequence: Synthetic oligonucleotide
  Antisense strand to SEQ ID NO: 901286
ucugacacuuggaaacuga

SEQ ID NO: 901288 - RNA, 19 nt, Artificial Sequence
  Description of Artificial Sequence: Synthetic oligonucleotide
  Sense strand starting at position 1120 of SEQ ID NO: 588959
aggauuaucuacucaaagc

SEQ ID NO: 901289 - RNA, 19 nt, Artificial Sequence
  Description of Artificial Sequence: Synthetic oligonucleotide
  Antisense strand to SEQ ID NO: 901288
gcuuugaguagauaauccu

SEQ ID NO: 901290 - RNA, 19 nt, Artificial Sequence
  Description of Artificial Sequence: Synthetic oligonucleotide
  Sense strand starting at position 1311 of SEQ ID NO: 588959
gcucgaggucaacauucua

SEQ ID NO: 901291 - RNA, 19 nt, Artificial Sequence
  Description of Artificial Sequence: Synthetic oligonucleotide
  Antisense strand to SEQ ID NO: 901290
uagaauguugaccucgagc

SEQ ID NO: 901292 - RNA, 19 nt, Artificial Sequence
  Description of Artificial Sequence: Synthetic oligonucleotide
  Sense strand starting at position 1319 of SEQ ID NO: 588959
ucaacauucuaguugucca

SEQ ID NO: 901293 - RNA, 19 nt, Artificial Sequence
  Description of Artificial Sequence: Synthetic oligonucleotide
  Antisense strand to SEQ ID NO: 901292
uggacaacuagaauguuga

SEQ ID NO: 901294 - RNA, 19 nt, Artificial Sequence
  Description of Artificial Sequence: Synthetic oligonucleotide
  Sense strand starting at position 1507 of SEQ ID NO: 588959
gaccguaaguacccagaaa

SEQ ID NO: 901295 - RNA, 19 nt, Artificial Sequence
  Description of Artificial Sequence: Synthetic oligonucleotide
  Antisense strand to SEQ ID NO: 901294
uuucuggguacuuacgguc

SEQ ID NO: 901296 - RNA, 19 nt, Artificial Sequence
  Description of Artificial Sequence: Synthetic oligonucleotide
  Sense strand starting at position 2381 of SEQ ID NO: 588959
uucccuuauggcggauuua

SEQ ID NO: 901297 - RNA, 19 nt, Artificial Sequence
  Description of Artificial Sequence: Synthetic oligonucleotide
  Antisense strand to SEQ ID NO: 901296
uaaauccgccauaagggaa

SEQ ID NO: 901298 - RNA, 19 nt, Artificial Sequence
  Description of Artificial Sequence: Synthetic oligonucleotide
  Sense strand starting at position 2496 of SEQ ID NO: 588959
cccugucagccugaguaaa

SEQ ID NO: 901299 - RNA, 19 nt, Artificial Sequence
  Description of Artificial Sequence: Synthetic oligonucleotide
  Antisense strand to SEQ ID NO: 901298
uuuacucaggcugacaggg

SEQ ID NO: 901300 - RNA, 19 nt, Artificial Sequence
  Description of Artificial Sequence: Synthetic oligonucleotide
  Sense strand starting at position 2684 of SEQ ID NO: 588959
ugauguggcuccucagauc

SEQ ID NO: 901301 - RNA, 19 nt, Artificial Sequence
  Description of Artificial Sequence: Synthetic oligonucleotide
  Antisense strand to SEQ ID NO: 901300
gaucugaggagccacauca

SEQ ID NO: 901302 - RNA, 19 nt, Artificial Sequence
  Description of Artificial Sequence: Synthetic oligonucleotide
  Sense strand starting at position 2828 of SEQ ID NO: 588959
gguugcccucucuaauaaa

SEQ ID NO: 901303 - RNA, 19 nt, Artificial Sequence
  Description of Artificial Sequence: Synthetic oligonucleotide
  Antisense strand to SEQ ID NO: 901302
uuuauuagagagggcaacc

SEQ ID NO: 901304 - RNA, 19 nt, Artificial Sequence
  Description of Artificial Sequence: Synthetic oligonucleotide
  Sense strand starting at position 2906 of SEQ ID NO: 588959
cuaucuauaugugcaucua

SEQ ID NO: 901305 - RNA, 19 nt, Artificial Sequence
  Description of Artificial Sequence: Synthetic oligonucleotide
  Antisense strand to SEQ ID NO: 901304
uagaugcacauauagauag

SEQ ID NO: 901306 - RNA, 19 nt, Artificial Sequence
  Description of Artificial Sequence: Synthetic oligonucleotide
  Sense strand starting at position 2927 of SEQ ID NO: 588959
cugggucuuguguguauuu

SEQ ID NO: 901307 - RNA, 19 nt, Artificial Sequence
  Description of Artificial Sequence: Synthetic oligonucleotide
  Antisense strand to SEQ ID NO: 901306
aaauacacacaagacccag

SEQ ID NO: 901308 - RNA, 19 nt, Artificial Sequence
  Description of Artificial Sequence: Synthetic oligonucleotide
  Sense strand starting at position 2929 of SEQ ID NO: 588959
gggucuuguguguauuucu

SEQ ID NO: 901309 - RNA, 19 nt, Artificial Sequence
  Description of Artificial Sequence: Synthetic oligonucleotide
  Antisense strand to SEQ ID NO: 901308
agaaauacacacaagaccc

SEQ ID NO: 901310 - RNA, 19 nt, Artificial Sequence
  Description of Artificial Sequence: Synthetic oligonucleotide
  Sense strand starting at position 2934 of SEQ ID NO: 588959
uuguguguauuucuagacu

SEQ ID NO: 901311 - RNA, 19 nt, Artificial Sequence
  Description of Artificial Sequence: Synthetic oligonucleotide
  Antisense strand to SEQ ID NO: 901310
agucuagaaauacacacaa

SEQ ID NO: 901312 - RNA, 19 nt, Artificial Sequence
  Description of Artificial Sequence: Synthetic oligonucleotide
  Sense strand starting at position 2963 of SEQ ID NO: 588959
cagggaacguugcugaauu

SEQ ID NO: 901313 - RNA, 19 nt, Artificial Sequence
  Description of Artificial Sequence: Synthetic oligonucleotide
  Antisense strand to SEQ ID NO: 901312
aauucagcaacguucccug

SEQ ID NO: 901314 - RNA, 19 nt, Artificial Sequence
  Description of Artificial Sequence: Synthetic oligonucleotide
  Sense strand starting at position 2973 of SEQ ID NO: 588959
ugcugaauucucugaccau

SEQ ID NO: 901315 - RNA, 19 nt, Artificial Sequence
  Description of Artificial Sequence: Synthetic oligonucleotide
  Antisense strand to SEQ ID NO: 901314
auggucagagaauucagca

SEQ ID NO: 901316 - RNA, 19 nt, Artificial Sequence
  Description of Artificial Sequence: Synthetic oligonucleotide
  Sense strand starting at position 3139 of SEQ ID NO: 588959
gggaaaguagcauauguca

SEQ ID NO: 901317 - RNA, 19 nt, Artificial Sequence
  Description of Artificial Sequence: Synthetic oligonucleotide
  Antisense strand to SEQ ID NO: 901316
ugacauaugcuacuuuccc

SEQ ID NO: 901318 - RNA, 19 nt, Artificial Sequence
  Description of Artificial Sequence: Synthetic oligonucleotide
  Sense strand starting at position 3175 of SEQ ID NO: 588959
ggcaucgagccuuaucuca

SEQ ID NO: 901319 - RNA, 19 nt, Artificial Sequence
  Description of Artificial Sequence: Synthetic oligonucleotide
  Antisense strand to SEQ ID NO: 901318
ugagauaaggcucgaugcc

SEQ ID NO: 901320 - RNA, 19 nt, Artificial Sequence
  Description of Artificial Sequence: Synthetic oligonucleotide
  Sense strand starting at position 3240 of SEQ ID NO: 588959
agcugagucacggaaggau

SEQ ID NO: 901321 - RNA, 19 nt, Artificial Sequence
  Description of Artificial Sequence: Synthetic oligonucleotide
  Antisense strand to SEQ ID NO: 901320
auccuuccgugacucagcu

SEQ ID NO: 901322 - RNA, 19 nt, Artificial Sequence
  Description of Artificial Sequence: Synthetic oligonucleotide
  Sense strand starting at position 3418 of SEQ ID NO: 588959
guccaaagagccugaguaa

SEQ ID NO: 901323 - RNA, 19 nt, Artificial Sequence
  Description of Artificial Sequence: Synthetic oligonucleotide
  Antisense strand to SEQ ID NO: 901322
uuacucaggcucuuuggac

SEQ ID NO: 901324 - RNA, 19 nt, Artificial Sequence
  Description of Artificial Sequence: Synthetic oligonucleotide
  Sense strand starting at position 3446 of SEQ ID NO: 588959
ggcagaugggcuugaaaug

SEQ ID NO: 901325 - RNA, 19 nt, Artificial Sequence
  Description of Artificial Sequence: Synthetic oligonucleotide
  Antisense strand to SEQ ID NO: 901324
cauuucaagcccaucugcc

SEQ ID NO: 901326 - RNA, 19 nt, Artificial Sequence
  Description of Artificial Sequence: Synthetic oligonucleotide
  Sense strand starting at position 3447 of SEQ ID NO: 588959
gcagaugggcuugaaauga

SEQ ID NO: 901327 - RNA, 19 nt, Artificial Sequence
  Description of Artificial Sequence: Synthetic oligonucleotide
  Antisense strand to SEQ ID NO: 901326
ucauuucaagcccaucugc

SEQ ID NO: 901328 - RNA, 19 nt, Artificial Sequence
  Description of Artificial Sequence: Synthetic oligonucleotide
  Sense strand starting at position 3455 of SEQ ID NO: 588959
gcuugaaaugaaggguugu

SEQ ID NO: 901329 - RNA, 19 nt, Artificial Sequence
  Description of Artificial Sequence: Synthetic oligonucleotide
  Antisense strand to SEQ ID NO: 901328
acaacccuucauuucaagc

SEQ ID NO: 901330 - RNA, 19 nt, Artificial Sequence
  Description of Artificial Sequence: Synthetic oligonucleotide
  Sense strand starting at position 3485 of SEQ ID NO: 588959
gggugacacagucauguuc

SEQ ID NO: 901331 - RNA, 19 nt, Artificial Sequence
  Description of Artificial Sequence: Synthetic oligonucleotide
  Antisense strand to SEQ ID NO: 901330
gaacaugacugugucaccc

SEQ ID NO: 901332 - RNA, 19 nt, Artificial Sequence
  Description of Artificial Sequence: Synthetic oligonucleotide
  Sense strand starting at position 3573 of SEQ ID NO: 588959
gcagaugcuaccgaucuga

SEQ ID NO: 901333 - RNA, 19 nt, Artificial Sequence
  Description of Artificial Sequence: Synthetic oligonucleotide
  Antisense strand to SEQ ID NO: 901332
ucagaucgguagcaucugc

SEQ ID NO: 901334 - RNA, 19 nt, Artificial Sequence
  Description of Artificial Sequence: Synthetic oligonucleotide
  Sense strand starting at position 3727 of SEQ ID NO: 588959
ggugguuccauccacagaa

SEQ ID NO: 901335 - RNA, 19 nt, Artificial Sequence
  Description of Artificial Sequence: Synthetic oligonucleotide
  Antisense strand to SEQ ID NO: 901334
uucuguggauggaaccacc

SEQ ID NO: 901336 - RNA, 19 nt, Artificial Sequence
  Description of Artificial Sequence: Synthetic oligonucleotide
  Sense strand starting at position 3806 of SEQ ID NO: 588959
ggagaagugcaguaggacu

SEQ ID NO: 901337 - RNA, 19 nt, Artificial Sequence
  Description of Artificial Sequence: Synthetic oligonucleotide
  Antisense strand to SEQ ID NO: 901336
aguccuacugcacuucucc

SEQ ID NO: 901338 - RNA, 19 nt, Artificial Sequence
  Description of Artificial Sequence: Synthetic oligonucleotide
  Sense strand starting at position 3820 of SEQ ID NO: 588959
ggacuagcgcuccaaggaa

SEQ ID NO: 901339 - RNA, 19 nt, Artificial Sequence
  Description of Artificial Sequence: Synthetic oligonucleotide
  Antisense strand to SEQ ID NO: 901338
uuccuuggagcgcuagucc

SEQ ID NO: 901340 - RNA, 19 nt, Artificial Sequence
  Description of Artificial Sequence: Synthetic oligonucleotide
  Sense strand starting at position 3859 of SEQ ID NO: 588959
uguugagguagccacaaua

SEQ ID NO: 901341 - RNA, 19 nt, Artificial Sequence
  Description of Artificial Sequence: Synthetic oligonucleotide
  Antisense strand to SEQ ID NO: 901340
uauuguggcuaccucaaca

SEQ ID NO: 901342 - RNA, 19 nt, Artificial Sequence
  Description of Artificial Sequence: Synthetic oligonucleotide
  Sense strand starting at position 480 of SEQ ID NO: 588960
ccaggacucuccugggaua

SEQ ID NO: 901343 - RNA, 19 nt, Artificial Sequence
  Description of Artificial Sequence: Synthetic oligonucleotide
  Antisense strand to SEQ ID NO: 901342
uaucccaggagaguccugg

SEQ ID NO: 901344 - RNA, 19 nt, Artificial Sequence
  Description of Artificial Sequence: Synthetic oligonucleotide
  Sense strand starting at position 483 of SEQ ID NO: 588960
ggacucuccugggauagag

SEQ ID NO: 901345 - RNA, 19 nt, Artificial Sequence
  Description of Artificial Sequence: Synthetic oligonucleotide
  Antisense strand to SEQ ID NO: 901344
cucuaucccaggagagucc

SEQ ID NO: 901346 - RNA, 19 nt, Artificial Sequence
  Description of Artificial Sequence: Synthetic oligonucleotide
  Sense strand starting at position 722 of SEQ ID NO: 588960
gcacucugcuuugaugaga

SEQ ID NO: 901347 - RNA, 19 nt, Artificial Sequence
  Description of Artificial Sequence: Synthetic oligonucleotide
  Antisense strand to SEQ ID NO: 901346
ucucaucaaagcagagugc

SEQ ID NO: 901348 - RNA, 19 nt, Artificial Sequence
  Description of Artificial Sequence: Synthetic oligonucleotide
  Sense strand starting at position 727 of SEQ ID NO: 588960
cugcuuugaugagacccau

SEQ ID NO: 901349 - RNA, 19 nt, Artificial Sequence
  Description of Artificial Sequence: Synthetic oligonucleotide
  Antisense strand to SEQ ID NO: 901348
augggucucaucaaagcag

SEQ ID NO: 901350 - RNA, 19 nt, Artificial Sequence
  Description of Artificial Sequence: Synthetic oligonucleotide
  Sense strand starting at position 882 of SEQ ID NO: 588960
gccacuaaauacgcuuuaa

SEQ ID NO: 901351 - RNA, 19 nt, Artificial Sequence
  Description of Artificial Sequence: Synthetic oligonucleotide
  Antisense strand to SEQ ID NO: 901350
uuaaagcguauuuaguggc

SEQ ID NO: 901352 - RNA, 19 nt, Artificial Sequence
  Description of Artificial Sequence: Synthetic oligonucleotide
  Sense strand starting at position 1377 of SEQ ID NO: 588960
acuugucucgggcauguuu

SEQ ID NO: 901353 - RNA, 19 nt, Artificial Sequence
  Description of Artificial Sequence: Synthetic oligonucleotide
  Antisense strand to SEQ ID NO: 901352
aaacaugcccgagacaagu

SEQ ID NO: 901354 - RNA, 19 nt, Artificial Sequence
  Description of Artificial Sequence: Synthetic oligonucleotide
  Sense strand starting at position 2071 of SEQ ID NO: 588960
ucacaaugccaguguguca

SEQ ID NO: 901355 - RNA, 19 nt, Artificial Sequence
  Description of Artificial Sequence: Synthetic oligonucleotide
  Antisense strand to SEQ ID NO: 901354
ugacacacuggcauuguga

SEQ ID NO: 901356 - RNA, 19 nt, Artificial Sequence
  Description of Artificial Sequence: Synthetic oligonucleotide
  Sense strand starting at position 2628 of SEQ ID NO: 588960
uggcaaagcucaggucaga

SEQ ID NO: 901357 - RNA, 19 nt, Artificial Sequence
  Description of Artificial Sequence: Synthetic oligonucleotide
  Antisense strand to SEQ ID NO: 901356
ucugaccugagcuuugcca

SEQ ID NO: 901358 - RNA, 19 nt, Artificial Sequence
  Description of Artificial Sequence: Synthetic oligonucleotide
  Sense strand starting at position 3281 of SEQ ID NO: 588960
gcagguuuguauccugguu

SEQ ID NO: 901359 - RNA, 19 nt, Artificial Sequence
  Description of Artificial Sequence: Synthetic oligonucleotide
  Antisense strand to SEQ ID NO: 901358
aaccaggauacaaaccugc

SEQ ID NO: 901360 - RNA, 19 nt, Artificial Sequence
  Description of Artificial Sequence: Synthetic oligonucleotide
  Sense strand starting at position 3283 of SEQ ID NO: 588960
agguuuguauccugguuag

SEQ ID NO: 901361 - RNA, 19 nt, Artificial Sequence
  Description of Artificial Sequence: Synthetic oligonucleotide
  Antisense strand to SEQ ID NO: 901360
cuaaccaggauacaaaccu

SEQ ID NO: 901362 - RNA, 19 nt, Artificial Sequence
  Description of Artificial Sequence: Synthetic oligonucleotide
  Sense strand starting at position 3286 of SEQ ID NO: 588960
uuuguauccugguuaggac

SEQ ID NO: 901363 - RNA, 19 nt, Artificial Sequence
  Description of Artificial Sequence: Synthetic oligonucleotide
  Antisense strand to SEQ ID NO: 901362
guccuaaccaggauacaaa

SEQ ID NO: 901364 - RNA, 19 nt, Artificial Sequence
  Description of Artificial Sequence: Synthetic oligonucleotide
  Sense strand starting at position 3287 of SEQ ID NO: 588960
uuguauccugguuaggaca

SEQ ID NO: 901365 - RNA, 19 nt, Artificial Sequence
  Description of Artificial Sequence: Synthetic oligonucleotide
  Antisense strand to SEQ ID NO: 901364
uguccuaaccaggauacaa

SEQ ID NO: 901366 - RNA, 19 nt, Artificial Sequence
  Description of Artificial Sequence: Synthetic oligonucleotide
  Sense strand starting at position 3289 of SEQ ID NO: 588960
guauccugguuaggacaau

SEQ ID NO: 901367 - RNA, 19 nt, Artificial Sequence
  Description of Artificial Sequence: Synthetic oligonucleotide
  Antisense strand to SEQ ID NO: 901366
auuguccuaaccaggauac

SEQ ID NO: 901368 - RNA, 19 nt, Artificial Sequence
  Description of Artificial Sequence: Synthetic oligonucleotide
  Sense strand starting at position 3618 of SEQ ID NO: 588960
acaagaguucuccagagca

SEQ ID NO: 901369 - RNA, 19 nt, Artificial Sequence
  Description of Artificial Sequence: Synthetic oligonucleotide
  Antisense strand to SEQ ID NO: 901368
ugcucuggagaacucuugu

SEQ ID NO: 901370 - RNA, 19 nt, Artificial Sequence
  Description of Artificial Sequence: Synthetic oligonucleotide
  Sense strand starting at position 1369 of SEQ ID NO: 588961
ucuauucugucagagauga

SEQ ID NO: 901371 - RNA, 19 nt, Artificial Sequence
  Description of Artificial Sequence: Synthetic oligonucleotide
  Antisense strand to SEQ ID NO: 901370
ucaucucugacagaauaga

SEQ ID NO: 901372 - RNA, 19 nt, Artificial Sequence
  Description of Artificial Sequence: Synthetic oligonucleotide
  Sense strand starting at position 1536 of SEQ ID NO: 588961
ugcguuucucuugcaaucu

SEQ ID NO: 901373 - RNA, 19 nt, Artificial Sequence
  Description of Artificial Sequence: Synthetic oligonucleotide
  Antisense strand to SEQ ID NO: 901372
agauugcaagagaaacgca

SEQ ID NO: 901374 - RNA, 19 nt, Artificial Sequence
  Description of Artificial Sequence: Synthetic oligonucleotide
  Sense strand starting at position 1992 of SEQ ID NO: 588961
uuguuacaucacugucaga

SEQ ID NO: 901375 - RNA, 19 nt, Artificial Sequence
  Description of Artificial Sequence: Synthetic oligonucleotide
  Antisense strand to SEQ ID NO: 901374
ucugacagugauguaacaa

SEQ ID NO: 901376 - RNA, 19 nt, Artificial Sequence
  Description of Artificial Sequence: Synthetic oligonucleotide
  Sense strand starting at position 2349 of SEQ ID NO: 588961
guuacaaauccgggugacu

SEQ ID NO: 901377 - RNA, 19 nt, Artificial Sequence
  Description of Artificial Sequence: Synthetic oligonucleotide
  Antisense strand to SEQ ID NO: 901376
agucacccggauuuguaac

SEQ ID NO: 901378 - RNA, 19 nt, Artificial Sequence
  Description of Artificial Sequence: Synthetic oligonucleotide
  Sense strand starting at position 2351 of SEQ ID NO: 588961
uacaaauccgggugacuga

SEQ ID NO: 901379 - RNA, 19 nt, Artificial Sequence
  Description of Artificial Sequence: Synthetic oligonucleotide
  Antisense strand to SEQ ID NO: 901378
ucagucacccggauuugua

SEQ ID NO: 901380 - RNA, 19 nt, Artificial Sequence
  Description of Artificial Sequence: Synthetic oligonucleotide
  Sense strand starting at position 2497 of SEQ ID NO: 588961
gcgcgaaagcgcucuugca

SEQ ID NO: 901381 - RNA, 19 nt, Artificial Sequence
  Description of Artificial Sequence: Synthetic oligonucleotide
  Antisense strand to SEQ ID NO: 901380
ugcaagagcgcuuucgcgc

SEQ ID NO: 901382 - RNA, 19 nt, Artificial Sequence
  Description of Artificial Sequence: Synthetic oligonucleotide
  Sense strand starting at position 2900 of SEQ ID NO: 588961
acuggcuuuggcugugauu

SEQ ID NO: 901383 - RNA, 19 nt, Artificial Sequence
  Description of Artificial Sequence: Synthetic oligonucleotide
  Antisense strand to SEQ ID NO: 901382
aaucacagccaaagccagu

SEQ ID NO: 901384 - RNA, 19 nt, Artificial Sequence
  Description of Artificial Sequence: Synthetic oligonucleotide
  Sense strand starting at position 2902 of SEQ ID NO: 588961
uggcuuuggcugugauucu

SEQ ID NO: 901385 - RNA, 19 nt, Artificial Sequence
  Description of Artificial Sequence: Synthetic oligonucleotide
  Antisense strand to SEQ ID NO: 901384
agaaucacagccaaagcca

SEQ ID NO: 901386 - RNA, 19 nt, Artificial Sequence
  Description of Artificial Sequence: Synthetic oligonucleotide
  Sense strand starting at position 2975 of SEQ ID NO: 588961
gcgguacaugcuuucaugu

SEQ ID NO: 901387 - RNA, 19 nt, Artificial Sequence
  Description of Artificial Sequence: Synthetic oligonucleotide
  Antisense strand to SEQ ID NO: 901386
acaugaaagcauguaccgc

SEQ ID NO: 901388 - RNA, 19 nt, Artificial Sequence
  Description of Artificial Sequence: Synthetic oligonucleotide
  Sense strand starting at position 3054 of SEQ ID NO: 588961
guauauuccugggcaagug

SEQ ID NO: 901389 - RNA, 19 nt, Artificial Sequence
  Description of Artificial Sequence: Synthetic oligonucleotide
  Antisense strand to SEQ ID NO: 901388
cacuugcccaggaauauac

SEQ ID NO: 901390 - RNA, 19 nt, Artificial Sequence
  Description of Artificial Sequence: Synthetic oligonucleotide
  Sense strand starting at position 3055 of SEQ ID NO: 588961
uauauuccugggcaaguga

SEQ ID NO: 901391 - RNA, 19 nt, Artificial Sequence
  Description of Artificial Sequence: Synthetic oligonucleotide
  Antisense strand to SEQ ID NO: 901390
ucacuugcccaggaauaua

SEQ ID NO: 901392 - RNA, 19 nt, Artificial Sequence
  Description of Artificial Sequence: Synthetic oligonucleotide
  Sense strand starting at position 3084 of SEQ ID NO: 588961
cugagaaucagucguccua

SEQ ID NO: 901393 - RNA, 19 nt, Artificial Sequence
  Description of Artificial Sequence: Synthetic oligonucleotide
  Antisense strand to SEQ ID NO: 901392
uaggacgacugauucucag

SEQ ID NO: 901394 - RNA, 19 nt, Artificial Sequence
  Description of Artificial Sequence: Synthetic oligonucleotide
  Sense strand starting at position 3086 of SEQ ID NO: 588961
gagaaucagucguccuauc

SEQ ID NO: 901395 - RNA, 19 nt, Artificial Sequence
  Description of Artificial Sequence: Synthetic oligonucleotide
  Antisense strand to SEQ ID NO: 901394
gauaggacgacugauucuc

SEQ ID NO: 901396 - RNA, 19 nt, Artificial Sequence
  Description of Artificial Sequence: Synthetic oligonucleotide
  Sense strand starting at position 3123 of SEQ ID NO: 588961
ccaaauauaugaggaaaca

SEQ ID NO: 901397 - RNA, 19 nt, Artificial Sequence
  Description of Artificial Sequence: Synthetic oligonucleotide
  Antisense strand to SEQ ID NO: 901396
uguuuccucauauauuugg

SEQ ID NO: 901398 - RNA, 19 nt, Artificial Sequence
  Description of Artificial Sequence: Synthetic oligonucleotide
  Sense strand starting at position 3133 of SEQ ID NO: 588961
gaggaaacauugugaggau

SEQ ID NO: 901399 - RNA, 19 nt, Artificial Sequence
  Description of Artificial Sequence: Synthetic oligonucleotide
  Antisense strand to SEQ ID NO: 901398
auccucacaauguuuccuc

SEQ ID NO: 901400 - RNA, 19 nt, Artificial Sequence
  Description of Artificial Sequence: Synthetic oligonucleotide
  Sense strand starting at position 3134 of SEQ ID NO: 588961
aggaaacauugugaggauu

SEQ ID NO: 901401 - RNA, 19 nt, Artificial Sequence
  Description of Artificial Sequence: Synthetic oligonucleotide
  Antisense strand to SEQ ID NO: 901400
aauccucacaauguuuccu

SEQ ID NO: 901402 - RNA, 19 nt, Artificial Sequence
  Description of Artificial Sequence: Synthetic oligonucleotide
  Sense strand starting at position 3136 of SEQ ID NO: 588961
gaaacauugugaggauuaa

SEQ ID NO: 901403 - RNA, 19 nt, Artificial Sequence
  Description of Artificial Sequence: Synthetic oligonucleotide
  Antisense strand to SEQ ID NO: 901402
uuaauccucacaauguuuc

SEQ ID NO: 901404 - RNA, 19 nt, Artificial Sequence
  Description of Artificial Sequence: Synthetic oligonucleotide
  Sense strand starting at position 3184 of SEQ ID NO: 588961
gguacauagucuguguaca

SEQ ID NO: 901405 - RNA, 19 nt, Artificial Sequence
  Description of Artificial Sequence: Synthetic oligonucleotide
  Antisense strand to SEQ ID NO: 901404
uguacacagacuauguacc

SEQ ID NO: 901406 - RNA, 19 nt, Artificial Sequence
  Description of Artificial Sequence: Synthetic oligonucleotide
  Sense strand starting at position 3185 of SEQ ID NO: 588961
guacauagucuguguacaa

SEQ ID NO: 901407 - RNA, 19 nt, Artificial Sequence
  Description of Artificial Sequence: Synthetic oligonucleotide
  Antisense strand to SEQ ID NO: 901406
uuguacacagacuauguac

SEQ ID NO: 901408 - RNA, 19 nt, Artificial Sequence
  Description of Artificial Sequence: Synthetic oligonucleotide
  Sense strand starting at position 3251 of SEQ ID NO: 588961
uugucaucauaauuagugu

SEQ ID NO: 901409 - RNA, 19 nt, Artificial Sequence
  Description of Artificial Sequence: Synthetic oligonucleotide
  Antisense strand to SEQ ID NO: 901408
acacuaauuaugaugacaa

SEQ ID NO: 901410 - RNA, 19 nt, Artificial Sequence
  Description of Artificial Sequence: Synthetic oligonucleotide
  Sense strand starting at position 3298 of SEQ ID NO: 588961
aaucauaaaggcugugaga

SEQ ID NO: 901411 - RNA, 19 nt, Artificial Sequence
  Description of Artificial Sequence: Synthetic oligonucleotide
  Antisense strand to SEQ ID NO: 901410
ucucacagccuuuaugauu

SEQ ID NO: 901412 - RNA, 19 nt, Artificial Sequence
  Description of Artificial Sequence: Synthetic oligonucleotide
  Sense strand starting at position 3300 of SEQ ID NO: 588961
ucauaaaggcugugagacu

SEQ ID NO: 901413 - RNA, 19 nt, Artificial Sequence
  Description of Artificial Sequence: Synthetic oligonucleotide
  Antisense strand to SEQ ID NO: 901412
agucucacagccuuuauga

SEQ ID NO: 901414 - RNA, 19 nt, Artificial Sequence
  Description of Artificial Sequence: Synthetic oligonucleotide
  Sense strand starting at position 3301 of SEQ ID NO: 588961
cauaaaggcugugagacua

SEQ ID NO: 901415 - RNA, 19 nt, Artificial Sequence
  Description of Artificial Sequence: Synthetic oligonucleotide
  Antisense strand to SEQ ID NO: 901414
uagucucacagccuuuaug

SEQ ID NO: 901416 - RNA, 19 nt, Artificial Sequence
  Description of Artificial Sequence: Synthetic oligonucleotide
  Sense strand starting at position 3343 of SEQ ID NO: 588961
ugaagaacgcuugauguau

SEQ ID NO: 901417 - RNA, 19 nt, Artificial Sequence
  Description of Artificial Sequence: Synthetic oligonucleotide
  Antisense strand to SEQ ID NO: 901416
auacaucaagcguucuuca

SEQ ID NO: 901418 - RNA, 19 nt, Artificial Sequence
  Description of Artificial Sequence: Synthetic oligonucleotide
  Sense strand starting at position 3345 of SEQ ID NO: 588961
aagaacgcuugauguauuu

SEQ ID NO: 901419 - RNA, 19 nt, Artificial Sequence
  Description of Artificial Sequence: Synthetic oligonucleotide
  Antisense strand to SEQ ID NO: 901418
aaauacaucaagcguucuu

SEQ ID NO: 901420 - RNA, 19 nt, Artificial Sequence
  Description of Artificial Sequence: Synthetic oligonucleotide
  Sense strand starting at position 3450 of SEQ ID NO: 588961
ccgggagucuuguucagua

SEQ ID NO: 901421 - RNA, 19 nt, Artificial Sequence
  Description of Artificial Sequence: Synthetic oligonucleotide
  Antisense strand to SEQ ID NO: 901420
uacugaacaagacucccgg

SEQ ID NO: 901422 - RNA, 19 nt, Artificial Sequence
  Description of Artificial Sequence: Synthetic oligonucleotide
  Sense strand starting at position 3452 of SEQ ID NO: 588961
gggagucuuguucaguaag

SEQ ID NO: 901423 - RNA, 19 nt, Artificial Sequence
  Description of Artificial Sequence: Synthetic oligonucleotide
  Antisense strand to SEQ ID NO: 901422
cuuacugaacaagacuccc

SEQ ID NO: 901424 - RNA, 19 nt, Artificial Sequence
  Description of Artificial Sequence: Synthetic oligonucleotide
  Sense strand starting at position 3469 of SEQ ID NO: 588961
agcugagaaguucaguaag

SEQ ID NO: 901425 - RNA, 19 nt, Artificial Sequence
  Description of Artificial Sequence: Synthetic oligonucleotide
  Antisense strand to SEQ ID NO: 901424
cuuacugaacuucucagcu

SEQ ID NO: 901426 - RNA, 19 nt, Artificial Sequence
  Description of Artificial Sequence: Synthetic oligonucleotide
  Sense strand starting at position 3554 of SEQ ID NO: 588961
gaggguauuuaaggguuga

SEQ ID NO: 901427 - RNA, 19 nt, Artificial Sequence
  Description of Artificial Sequence: Synthetic oligonucleotide
  Antisense strand to SEQ ID NO: 901426
ucaacccuuaaauacccuc

SEQ ID NO: 901428 - RNA, 19 nt, Artificial Sequence
  Description of Artificial Sequence: Synthetic oligonucleotide
  Sense strand starting at position 3567 of SEQ ID NO: 588961
gguugagugaagugucuug

SEQ ID NO: 901429 - RNA, 19 nt, Artificial Sequence
  Description of Artificial Sequence: Synthetic oligonucleotide
  Antisense strand to SEQ ID NO: 901428
caagacacuucacucaacc

SEQ ID NO: 901430 - RNA, 19 nt, Artificial Sequence
  Description of Artificial Sequence: Synthetic oligonucleotide
  Sense strand starting at position 3660 of SEQ ID NO: 588961
ggaagcagauccuucucau

SEQ ID NO: 901431 - RNA, 19 nt, Artificial Sequence
  Description of Artificial Sequence: Synthetic oligonucleotide
  Antisense strand to SEQ ID NO: 901430
augagaaggaucugcuucc

SEQ ID NO: 901432 - RNA, 19 nt, Artificial Sequence
  Description of Artificial Sequence: Synthetic oligonucleotide
  Sense strand starting at position 3749 of SEQ ID NO: 588961
uagaaucauuuaggaggga

SEQ ID NO: 901433 - RNA, 19 nt, Artificial Sequence
  Description of Artificial Sequence: Synthetic oligonucleotide
  Antisense strand to SEQ ID NO: 901432
ucccuccuaaaugauucua

SEQ ID NO: 901434 - RNA, 19 nt, Artificial Sequence
  Description of Artificial Sequence: Synthetic oligonucleotide
  Sense strand starting at position 3864 of SEQ ID NO: 588961
auaggcaucugccuguaau

SEQ ID NO: 901435 - RNA, 19 nt, Artificial Sequence
  Description of Artificial Sequence: Synthetic oligonucleotide
  Antisense strand to SEQ ID NO: 901434
auuacaggcagaugccuau

SEQ ID NO: 901436 - RNA, 19 nt, Artificial Sequence
  Description of Artificial Sequence: Synthetic oligonucleotide
  Sense strand starting at position 3865 of SEQ ID NO: 588961
uaggcaucugccuguaauu

SEQ ID NO: 901437 - RNA, 19 nt, Artificial Sequence
  Description of Artificial Sequence: Synthetic oligonucleotide
  Antisense strand to SEQ ID NO: 901436
aauuacaggcagaugccua

SEQ ID NO: 901438 - RNA, 19 nt, Artificial Sequence
  Description of Artificial Sequence: Synthetic oligonucleotide
  Sense strand starting at position 3867 of SEQ ID NO: 588961
ggcaucugccuguaauuga

SEQ ID NO: 901439 - RNA, 19 nt, Artificial Sequence
  Description of Artificial Sequence: Synthetic oligonucleotide
  Antisense strand to SEQ ID NO: 901438
ucaauuacaggcagaugcc

SEQ ID NO: 901440 - RNA, 19 nt, Artificial Sequence
  Description of Artificial Sequence: Synthetic oligonucleotide
  Sense strand starting at position 3874 of SEQ ID NO: 588961
gccuguaauugaccagaga

SEQ ID NO: 901441 - RNA, 19 nt, Artificial Sequence
  Description of Artificial Sequence: Synthetic oligonucleotide
  Antisense strand to SEQ ID NO: 901440
ucucuggucaauuacaggc

SEQ ID NO: 901442 - RNA, 19 nt, Artificial Sequence
  Description of Artificial Sequence: Synthetic oligonucleotide
  Sense strand starting at position 3885 of SEQ ID NO: 588961
accagagauggaugagcuu

SEQ ID NO: 901443 - RNA, 19 nt, Artificial Sequence
  Description of Artificial Sequence: Synthetic oligonucleotide
  Antisense strand to SEQ ID NO: 901442
aagcucauccaucucuggu

SEQ ID NO: 901444 - RNA, 19 nt, Artificial Sequence
  Description of Artificial Sequence: Synthetic oligonucleotide
  Sense strand starting at position 3892 of SEQ ID NO: 588961
auggaugagcuuugggaua

SEQ ID NO: 901445 - RNA, 19 nt, Artificial Sequence
  Description of Artificial Sequence: Synthetic oligonucleotide
  Antisense strand to SEQ ID NO: 901444
uaucccaaagcucauccau

SEQ ID NO: 901446 - RNA, 19 nt, Artificial Sequence
  Description of Artificial Sequence: Synthetic oligonucleotide
  Sense strand starting at position 3894 of SEQ ID NO: 588961
ggaugagcuuugggauaca

SEQ ID NO: 901447 - RNA, 19 nt, Artificial Sequence
  Description of Artificial Sequence: Synthetic oligonucleotide
  Antisense strand to SEQ ID NO: 901446
uguaucccaaagcucaucc

SEQ ID NO: 901448 - RNA, 19 nt, Artificial Sequence
  Description of Artificial Sequence: Synthetic oligonucleotide
  Sense strand starting at position 3950 of SEQ ID NO: 588961
auccacugauggucugaaa

SEQ ID NO: 901449 - RNA, 19 nt, Artificial Sequence
  Description of Artificial Sequence: Synthetic oligonucleotide
  Antisense strand to SEQ ID NO: 901448
uuucagaccaucaguggau

SEQ ID NO: 901450 - RNA, 19 nt, Artificial Sequence
  Description of Artificial Sequence: Synthetic oligonucleotide
  Sense strand starting at position 17 of SEQ ID NO: 588963
uuuaauaucugacuaggca

SEQ ID NO: 901451 - RNA, 19 nt, Artificial Sequence
  Description of Artificial Sequence: Synthetic oligonucleotide
  Antisense strand to SEQ ID NO: 901450
ugccuagucagauauuaaa

SEQ ID NO: 901452 - RNA, 19 nt, Artificial Sequence
  Description of Artificial Sequence: Synthetic oligonucleotide
  Sense strand starting at position 21 of SEQ ID NO: 588963
auaucugacuaggcaaauu

SEQ ID NO: 901453 - RNA, 19 nt, Artificial Sequence
  Description of Artificial Sequence: Synthetic oligonucleotide
  Antisense strand to SEQ ID NO: 901452
aauuugccuagucagauau

SEQ ID NO: 901454 - RNA, 19 nt, Artificial Sequence
  Description of Artificial Sequence: Synthetic oligonucleotide
  Sense strand starting at position 43 of SEQ ID NO: 588963
ucucauuacccaggaugau

SEQ ID NO: 901455 - RNA, 19 nt, Artificial Sequence
  Description of Artificial Sequence: Synthetic oligonucleotide
  Antisense strand to SEQ ID NO: 901454
aucauccuggguaaugaga

SEQ ID NO: 901456 - RNA, 19 nt, Artificial Sequence
  Description of Artificial Sequence: Synthetic oligonucleotide
  Sense strand starting at position 88 of SEQ ID NO: 588963
uuuauugaggugcaguuua

SEQ ID NO: 901457 - RNA, 19 nt, Artificial Sequence
  Description of Artificial Sequence: Synthetic oligonucleotide
  Antisense strand to SEQ ID NO: 901456
uaaacugcaccucaauaaa

SEQ ID NO: 901458 - RNA, 19 nt, Artificial Sequence
  Description of Artificial Sequence: Synthetic oligonucleotide
  Sense strand starting at position 421 of SEQ ID NO: 588963
uguuaauucccauggguaa

SEQ ID NO: 901459 - RNA, 19 nt, Artificial Sequence
  Description of Artificial Sequence: Synthetic oligonucleotide
  Antisense strand to SEQ ID NO: 901458
uuacccaugggaauuaaca

SEQ ID NO: 901460 - RNA, 19 nt, Artificial Sequence
  Description of Artificial Sequence: Synthetic oligonucleotide
  Sense strand starting at position 422 of SEQ ID NO: 588963
guuaauucccauggguaau

SEQ ID NO: 901461 - RNA, 19 nt, Artificial Sequence
  Description of Artificial Sequence: Synthetic oligonucleotide
  Antisense strand to SEQ ID NO: 901460
auuacccaugggaauuaac

SEQ ID NO: 901462 - RNA, 19 nt, Artificial Sequence
  Description of Artificial Sequence: Synthetic oligonucleotide
  Sense strand starting at position 585 of SEQ ID NO: 588963
uugcuucuccuuuggauuu

SEQ ID NO: 901463 - RNA, 19 nt, Artificial Sequence
  Description of Artificial Sequence: Synthetic oligonucleotide
  Antisense strand to SEQ ID NO: 901462
aaauccaaaggagaagcaa

SEQ ID NO: 901464 - RNA, 19 nt, Artificial Sequence
  Description of Artificial Sequence: Synthetic oligonucleotide
  Sense strand starting at position 620 of SEQ ID NO: 588963
uucuaauauguguauccuu

SEQ ID NO: 901465 - RNA, 19 nt, Artificial Sequence
  Description of Artificial Sequence: Synthetic oligonucleotide
  Antisense strand to SEQ ID NO: 901464
aaggauacacauauuagaa

SEQ ID NO: 901466 - RNA, 19 nt, Artificial Sequence
  Description of Artificial Sequence: Synthetic oligonucleotide
  Sense strand starting at position 625 of SEQ ID NO: 588963
auauguguauccuuacaac

SEQ ID NO: 901467 - RNA, 19 nt, Artificial Sequence
  Description of Artificial Sequence: Synthetic oligonucleotide
  Antisense strand to SEQ ID NO: 901466
guuguaaggauacacauau

SEQ ID NO: 901468 - RNA, 19 nt, Artificial Sequence
  Description of Artificial Sequence: Synthetic oligonucleotide
  Sense strand starting at position 813 of SEQ ID NO: 588963
gugagaucaucauuggagc

SEQ ID NO: 901469 - RNA, 19 nt, Artificial Sequence
  Description of Artificial Sequence: Synthetic oligonucleotide
  Antisense strand to SEQ ID NO: 901468
gcuccaaugaugaucucac

SEQ ID NO: 901470 - RNA, 19 nt, Artificial Sequence
  Description of Artificial Sequence: Synthetic oligonucleotide
  Sense strand starting at position 1216 of SEQ ID NO: 588963
gcgaggucgcccgcagaaa

SEQ ID NO: 901471 - RNA, 19 nt, Artificial Sequence
  Description of Artificial Sequence: Synthetic oligonucleotide
  Antisense strand to SEQ ID NO: 901470
uuucugcgggcgaccucgc

SEQ ID NO: 901472 - RNA, 19 nt, Artificial Sequence
  Description of Artificial Sequence: Synthetic oligonucleotide
  Sense strand starting at position 1394 of SEQ ID NO: 588963
gcucgcguccuucuauuga

SEQ ID NO: 901473 - RNA, 19 nt, Artificial Sequence
  Description of Artificial Sequence: Synthetic oligonucleotide
  Antisense strand to SEQ ID NO: 901472
ucaauagaaggacgcgagc

SEQ ID NO: 901474 - RNA, 19 nt, Artificial Sequence
  Description of Artificial Sequence: Synthetic oligonucleotide
  Sense strand starting at position 2106 of SEQ ID NO: 588963
acuagaagccagcauuaua

SEQ ID NO: 901475 - RNA, 19 nt, Artificial Sequence
  Description of Artificial Sequence: Synthetic oligonucleotide
  Antisense strand to SEQ ID NO: 901474
uauaaugcuggcuucuagu

SEQ ID NO: 901476 - RNA, 19 nt, Artificial Sequence
  Description of Artificial Sequence: Synthetic oligonucleotide
  Sense strand starting at position 2182 of SEQ ID NO: 588963
gcguguaaacgcuucauga

SEQ ID NO: 901477 - RNA, 19 nt, Artificial Sequence
  Description of Artificial Sequence: Synthetic oligonucleotide
  Antisense strand to SEQ ID NO: 901476
ucaugaagcguuuacacgc

SEQ ID NO: 901478 - RNA, 19 nt, Artificial Sequence
  Description of Artificial Sequence: Synthetic oligonucleotide
  Sense strand starting at position 2184 of SEQ ID NO: 588963
guguaaacgcuucaugaga

SEQ ID NO: 901479 - RNA, 19 nt, Artificial Sequence
  Description of Artificial Sequence: Synthetic oligonucleotide
  Antisense strand to SEQ ID NO: 901478
ucucaugaagcguuuacac

SEQ ID NO: 901480 - RNA, 19 nt, Artificial Sequence
  Description of Artificial Sequence: Synthetic oligonucleotide
  Sense strand starting at position 2276 of SEQ ID NO: 588963
agacauaacgccugaggua

SEQ ID NO: 901481 - RNA, 19 nt, Artificial Sequence
  Description of Artificial Sequence: Synthetic oligonucleotide
  Antisense strand to SEQ ID NO: 901480
uaccucaggcguuaugucu

SEQ ID NO: 901482 - RNA, 19 nt, Artificial Sequence
  Description of Artificial Sequence: Synthetic oligonucleotide
  Sense strand starting at position 2277 of SEQ ID NO: 588963
gacauaacgccugagguau

SEQ ID NO: 901483 - RNA, 19 nt, Artificial Sequence
  Description of Artificial Sequence: Synthetic oligonucleotide
  Antisense strand to SEQ ID NO: 901482
auaccucaggcguuauguc

SEQ ID NO: 901484 - RNA, 19 nt, Artificial Sequence
  Description of Artificial Sequence: Synthetic oligonucleotide
  Sense strand starting at position 2283 of SEQ ID NO: 588963
acgccugagguaugagaaa

SEQ ID NO: 901485 - RNA, 19 nt, Artificial Sequence
  Description of Artificial Sequence: Synthetic oligonucleotide
  Antisense strand to SEQ ID NO: 901484
uuucucauaccucaggcgu

SEQ ID NO: 901486 - RNA, 19 nt, Artificial Sequence
  Description of Artificial Sequence: Synthetic oligonucleotide
  Sense strand starting at position 2294 of SEQ ID NO: 588963
augagaaaguaugcacauu

SEQ ID NO: 901487 - RNA, 19 nt, Artificial Sequence
  Description of Artificial Sequence: Synthetic oligonucleotide
  Antisense strand to SEQ ID NO: 901486
aaugugcauacuuucucau

SEQ ID NO: 901488 - RNA, 19 nt, Artificial Sequence
  Description of Artificial Sequence: Synthetic oligonucleotide
  Sense strand starting at position 2300 of SEQ ID NO: 588963
aaguaugcacauugauuga

SEQ ID NO: 901489 - RNA, 19 nt, Artificial Sequence
  Description of Artificial Sequence: Synthetic oligonucleotide
  Antisense strand to SEQ ID NO: 901488
ucaaucaaugugcauacuu

SEQ ID NO: 901490 - RNA, 19 nt, Artificial Sequence
  Description of Artificial Sequence: Synthetic oligonucleotide
  Sense strand starting at position 2319 of SEQ ID NO: 588963
gaacaaucccggcaaagca

SEQ ID NO: 901491 - RNA, 19 nt, Artificial Sequence
  Description of Artificial Sequence: Synthetic oligonucleotide
  Antisense strand to SEQ ID NO: 901490
ugcuuugccgggauuguuc

SEQ ID NO: 901492 - RNA, 19 nt, Artificial Sequence
  Description of Artificial Sequence: Synthetic oligonucleotide
  Sense strand starting at position 2351 of SEQ ID NO: 588963
uacggaaugauccgaggga

SEQ ID NO: 901493 - RNA, 19 nt, Artificial Sequence
  Description of Artificial Sequence: Synthetic oligonucleotide
  Antisense strand to SEQ ID NO: 901492
ucccucggaucauuccgua

SEQ ID NO: 901494 - RNA, 19 nt, Artificial Sequence
  Description of Artificial Sequence: Synthetic oligonucleotide
  Sense strand starting at position 2632 of SEQ ID NO: 588963
auuugaugaucguaaacaa

SEQ ID NO: 901495 - RNA, 19 nt, Artificial Sequence
  Description of Artificial Sequence: Synthetic oligonucleotide
  Antisense strand to SEQ ID NO: 901494
uuguuuacgaucaucaaau

SEQ ID NO: 901496 - RNA, 19 nt, Artificial Sequence
  Description of Artificial Sequence: Synthetic oligonucleotide
  Sense strand starting at position 2691 of SEQ ID NO: 588963
ggcugcuaccaugaaagaa

SEQ ID NO: 901497 - RNA, 19 nt, Artificial Sequence
  Description of Artificial Sequence: Synthetic oligonucleotide
  Antisense strand to SEQ ID NO: 901496
uucuuucaugguagcagcc

SEQ ID NO: 901498 - RNA, 19 nt, Artificial Sequence
  Description of Artificial Sequence: Synthetic oligonucleotide
  Sense strand starting at position 2980 of SEQ ID NO: 588963
cugccaucacuauagauga

SEQ ID NO: 901499 - RNA, 19 nt, Artificial Sequence
  Description of Artificial Sequence: Synthetic oligonucleotide
  Antisense strand to SEQ ID NO: 901498
ucaucuauagugauggcag

SEQ ID NO: 901500 - RNA, 19 nt, Artificial Sequence
  Description of Artificial Sequence: Synthetic oligonucleotide
  Sense strand starting at position 3006 of SEQ ID NO: 588963
guaagaaugagguguggau

SEQ ID NO: 901501 - RNA, 19 nt, Artificial Sequence
  Description of Artificial Sequence: Synthetic oligonucleotide
  Antisense strand to SEQ ID NO: 901500
auccacaccucauucuuac

SEQ ID NO: 901502 - RNA, 19 nt, Artificial Sequence
  Description of Artificial Sequence: Synthetic oligonucleotide
  Sense strand starting at position 3010 of SEQ ID NO: 588963
gaaugagguguggauccuu

SEQ ID NO: 901503 - RNA, 19 nt, Artificial Sequence
  Description of Artificial Sequence: Synthetic oligonucleotide
  Antisense strand to SEQ ID NO: 901502
aaggauccacaccucauuc

SEQ ID NO: 901504 - RNA, 19 nt, Artificial Sequence
  Description of Artificial Sequence: Synthetic oligonucleotide
  Sense strand starting at position 3033 of SEQ ID NO: 588963
caaggaauuugucauuagg

SEQ ID NO: 901505 - RNA, 19 nt, Artificial Sequence
  Description of Artificial Sequence: Synthetic oligonucleotide
  Antisense strand to SEQ ID NO: 901504
ccuaaugacaaauuccuug

SEQ ID NO: 901506 - RNA, 19 nt, Artificial Sequence
  Description of Artificial Sequence: Synthetic oligonucleotide
  Sense strand starting at position 3042 of SEQ ID NO: 588963
ugucauuaggaaugcugga

SEQ ID NO: 901507 - RNA, 19 nt, Artificial Sequence
  Description of Artificial Sequence: Synthetic oligonucleotide
  Antisense strand to SEQ ID NO: 901506
uccagcauuccuaaugaca

SEQ ID NO: 901508 - RNA, 19 nt, Artificial Sequence
  Description of Artificial Sequence: Synthetic oligonucleotide
  Sense strand starting at position 3067 of SEQ ID NO: 588963
auaucugaggcuggaaagu

SEQ ID NO: 901509 - RNA, 19 nt, Artificial Sequence
  Description of Artificial Sequence: Synthetic oligonucleotide
  Antisense strand to SEQ ID NO: 901508
acuuuccagccucagauau

SEQ ID NO: 901510 - RNA, 19 nt, Artificial Sequence
  Description of Artificial Sequence: Synthetic oligonucleotide
  Sense strand starting at position 3117 of SEQ ID NO: 588963
uugggaagguaguuucauu

SEQ ID NO: 901511 - RNA, 19 nt, Artificial Sequence
  Description of Artificial Sequence: Synthetic oligonucleotide
  Antisense strand to SEQ ID NO: 901510
aaugaaacuaccuucccaa

SEQ ID NO: 901512 - RNA, 19 nt, Artificial Sequence
  Description of Artificial Sequence: Synthetic oligonucleotide
  Sense strand starting at position 3153 of SEQ ID NO: 588963
ggagucugauauuccgaaa

SEQ ID NO: 901513 - RNA, 19 nt, Artificial Sequence
  Description of Artificial Sequence: Synthetic oligonucleotide
  Antisense strand to SEQ ID NO: 901512
uuucggaauaucagacucc

SEQ ID NO: 901514 - RNA, 19 nt, Artificial Sequence
  Description of Artificial Sequence: Synthetic oligonucleotide
  Sense strand starting at position 3165 of SEQ ID NO: 588963
uccgaaauuggaggauugu

SEQ ID NO: 901515 - RNA, 19 nt, Artificial Sequence
  Description of Artificial Sequence: Synthetic oligonucleotide
  Antisense strand to SEQ ID NO: 901514
acaauccuccaauuucgga

SEQ ID NO: 901516 - RNA, 19 nt, Artificial Sequence
  Description of Artificial Sequence: Synthetic oligonucleotide
  Sense strand starting at position 3280 of SEQ ID NO: 588963
uguucucaucuauauauug

SEQ ID NO: 901517 - RNA, 19 nt, Artificial Sequence
  Description of Artificial Sequence: Synthetic oligonucleotide
  Antisense strand to SEQ ID NO: 901516
caauauauagaugagaaca

SEQ ID NO: 901518 - RNA, 19 nt, Artificial Sequence
  Description of Artificial Sequence: Synthetic oligonucleotide
  Sense strand starting at position 3326 of SEQ ID NO: 588963
uguugagagguuuacauga

SEQ ID NO: 901519 - RNA, 19 nt, Artificial Sequence
  Description of Artificial Sequence: Synthetic oligonucleotide
  Antisense strand to SEQ ID NO: 901518
ucauguaaaccucucaaca

SEQ ID NO: 901520 - RNA, 19 nt, Artificial Sequence
  Description of Artificial Sequence: Synthetic oligonucleotide
  Sense strand starting at position 3397 of SEQ ID NO: 588963
uauaaaugguugguaguua

SEQ ID NO: 901521 - RNA, 19 nt, Artificial Sequence
  Description of Artificial Sequence: Synthetic oligonucleotide
  Antisense strand to SEQ ID NO: 901520
uaacuaccaaccauuuaua

SEQ ID NO: 901522 - RNA, 19 nt, Artificial Sequence
  Description of Artificial Sequence: Synthetic oligonucleotide
  Sense strand starting at position 3451 of SEQ ID NO: 588963
uaugauguuccaggcaaug

SEQ ID NO: 901523 - RNA, 19 nt, Artificial Sequence
  Description of Artificial Sequence: Synthetic oligonucleotide
  Antisense strand to SEQ ID NO: 901522
cauugccuggaacaucaua

SEQ ID NO: 901524 - RNA, 19 nt, Artificial Sequence
  Description of Artificial Sequence: Synthetic oligonucleotide
  Sense strand starting at position 3483 of SEQ ID NO: 588963
aucucauggucacuaguca

SEQ ID NO: 901525 - RNA, 19 nt, Artificial Sequence
  Description of Artificial Sequence: Synthetic oligonucleotide
  Antisense strand to SEQ ID NO: 901524
ugacuagugaccaugagau

SEQ ID NO: 901526 - RNA, 19 nt, Artificial Sequence
  Description of Artificial Sequence: Synthetic oligonucleotide
  Sense strand starting at position 3579 of SEQ ID NO: 588963
uugaaaugcucaguaccua

SEQ ID NO: 901527 - RNA, 19 nt, Artificial Sequence
  Description of Artificial Sequence: Synthetic oligonucleotide
  Antisense strand to SEQ ID NO: 901526
uagguacugagcauuucaa

SEQ ID NO: 901528 - RNA, 19 nt, Artificial Sequence
  Description of Artificial Sequence: Synthetic oligonucleotide
  Sense strand starting at position 3658 of SEQ ID NO: 588963
aguucuaugagauagugcu

SEQ ID NO: 901529 - RNA, 19 nt, Artificial Sequence
  Description of Artificial Sequence: Synthetic oligonucleotide
  Antisense strand to SEQ ID NO: 901528
agcacuaucucauagaacu

SEQ ID NO: 901530 - RNA, 19 nt, Artificial Sequence
  Description of Artificial Sequence: Synthetic oligonucleotide
  Sense strand starting at position 45 of SEQ ID NO: 588964
gagguaguccucuaacauu

SEQ ID NO: 901531 - RNA, 19 nt, Artificial Sequence
  Description of Artificial Sequence: Synthetic oligonucleotide
  Antisense strand to SEQ ID NO: 901530
aauguuagaggacuaccuc

SEQ ID NO: 901532 - RNA, 19 nt, Artificial Sequence
  Description of Artificial Sequence: Synthetic oligonucleotide
  Sense strand starting at position 227 of SEQ ID NO: 588964
ggaugcucauggguaagau

SEQ ID NO: 901533 - RNA, 19 nt, Artificial Sequence
  Description of Artificial Sequence: Synthetic oligonucleotide
  Antisense strand to SEQ ID NO: 901532
aucuuacccaugagcaucc

SEQ ID NO: 901534 - RNA, 19 nt, Artificial Sequence
  Description of Artificial Sequence: Synthetic oligonucleotide
  Sense strand starting at position 228 of SEQ ID NO: 588964
gaugcucauggguaagauu

SEQ ID NO: 901535 - RNA, 19 nt, Artificial Sequence
  Description of Artificial Sequence: Synthetic oligonucleotide
  Antisense strand to SEQ ID NO: 901534
aaucuuacccaugagcauc

SEQ ID NO: 901536 - RNA, 19 nt, Artificial Sequence
  Description of Artificial Sequence: Synthetic oligonucleotide
  Sense strand starting at position 236 of SEQ ID NO: 588964
uggguaagauuacuuauau

SEQ ID NO: 901537 - RNA, 19 nt, Artificial Sequence
  Description of Artificial Sequence: Synthetic oligonucleotide
  Antisense strand to SEQ ID NO: 901536
auauaaguaaucuuaccca

SEQ ID NO: 901538 - RNA, 19 nt, Artificial Sequence
  Description of Artificial Sequence: Synthetic oligonucleotide
  Sense strand starting at position 237 of SEQ ID NO: 588964
ggguaagauuacuuauauu

SEQ ID NO: 901539 - RNA, 19 nt, Artificial Sequence
  Description of Artificial Sequence: Synthetic oligonucleotide
  Antisense strand to SEQ ID NO: 901538
aauauaaguaaucuuaccc

SEQ ID NO: 901540 - RNA, 19 nt, Artificial Sequence
  Description of Artificial Sequence: Synthetic oligonucleotide
  Sense strand starting at position 345 of SEQ ID NO: 588964
ugagaaugaugccuagggu

SEQ ID NO: 901541 - RNA, 19 nt, Artificial Sequence
  Description of Artificial Sequence: Synthetic oligonucleotide
  Antisense strand to SEQ ID NO: 901540
acccuaggcaucauucuca

SEQ ID NO: 901542 - RNA, 19 nt, Artificial Sequence
  Description of Artificial Sequence: Synthetic oligonucleotide
  Sense strand starting at position 360 of SEQ ID NO: 588964
ggguguuaucccuaaaugg

SEQ ID NO: 901543 - RNA, 19 nt, Artificial Sequence
  Description of Artificial Sequence: Synthetic oligonucleotide
  Antisense strand to SEQ ID NO: 901542
ccauuuagggauaacaccc

SEQ ID NO: 901544 - RNA, 19 nt, Artificial Sequence
  Description of Artificial Sequence: Synthetic oligonucleotide
  Sense strand starting at position 392 of SEQ ID NO: 588964
caagaauuaggagguuucu

SEQ ID NO: 901545 - RNA, 19 nt, Artificial Sequence
  Description of Artificial Sequence: Synthetic oligonucleotide
  Antisense strand to SEQ ID NO: 901544
agaaaccuccuaauucuug

SEQ ID NO: 901546 - RNA, 19 nt, Artificial Sequence
  Description of Artificial Sequence: Synthetic oligonucleotide
  Sense strand starting at position 415 of SEQ ID NO: 588964
gccugauacugacuauaag

SEQ ID NO: 901547 - RNA, 19 nt, Artificial Sequence
  Description of Artificial Sequence: Synthetic oligonucleotide
  Antisense strand to SEQ ID NO: 901546
cuuauagucaguaucaggc

SEQ ID NO: 901548 - RNA, 19 nt, Artificial Sequence
  Description of Artificial Sequence: Synthetic oligonucleotide
  Sense strand starting at position 860 of SEQ ID NO: 588964
caagcauugguguacaaac

SEQ ID NO: 901549 - RNA, 19 nt, Artificial Sequence
  Description of Artificial Sequence: Synthetic oligonucleotide
  Antisense strand to SEQ ID NO: 901548
guuuguacaccaaugcuug

SEQ ID NO: 901550 - RNA, 19 nt, Artificial Sequence
  Description of Artificial Sequence: Synthetic oligonucleotide
  Sense strand starting at position 862 of SEQ ID NO: 588964
agcauugguguacaaacau

SEQ ID NO: 901551 - RNA, 19 nt, Artificial Sequence
  Description of Artificial Sequence: Synthetic oligonucleotide
  Antisense strand to SEQ ID NO: 901550
auguuuguacaccaaugcu

SEQ ID NO: 901552 - RNA, 19 nt, Artificial Sequence
  Description of Artificial Sequence: Synthetic oligonucleotide
  Sense strand starting at position 1098 of SEQ ID NO: 588964
uauccuaauguaugagaug

SEQ ID NO: 901553 - RNA, 19 nt, Artificial Sequence
  Description of Artificial Sequence: Synthetic oligonucleotide
  Antisense strand to SEQ ID NO: 901552
caucucauacauuaggaua

SEQ ID NO: 901554 - RNA, 19 nt, Artificial Sequence
  Description of Artificial Sequence: Synthetic oligonucleotide
  Sense strand starting at position 1104 of SEQ ID NO: 588964
aauguaugagauggcgaga

SEQ ID NO: 901555 - RNA, 19 nt, Artificial Sequence
  Description of Artificial Sequence: Synthetic oligonucleotide
  Antisense strand to SEQ ID NO: 901554
ucucgccaucucauacauu

SEQ ID NO: 901556 - RNA, 19 nt, Artificial Sequence
  Description of Artificial Sequence: Synthetic oligonucleotide
  Sense strand starting at position 1205 of SEQ ID NO: 588964
gacaguaaacugggacuuu

SEQ ID NO: 901557 - RNA, 19 nt, Artificial Sequence
  Description of Artificial Sequence: Synthetic oligonucleotide
  Antisense strand to SEQ ID NO: 901556
aaagucccaguuuacuguc

SEQ ID NO: 901558 - RNA, 19 nt, Artificial Sequence
  Description of Artificial Sequence: Synthetic oligonucleotide
  Sense strand starting at position 1268 of SEQ ID NO: 588964
ucauuuguuguguggcaga

SEQ ID NO: 901559 - RNA, 19 nt, Artificial Sequence
  Description of Artificial Sequence: Synthetic oligonucleotide
  Antisense strand to SEQ ID NO: 901558
ucugccacacaacaaauga

SEQ ID NO: 901560 - RNA, 19 nt, Artificial Sequence
  Description of Artificial Sequence: Synthetic oligonucleotide
  Sense strand starting at position 1297 of SEQ ID NO: 588964
ggacuugcuuuccuuagaa

SEQ ID NO: 901561 - RNA, 19 nt, Artificial Sequence
  Description of Artificial Sequence: Synthetic oligonucleotide
  Antisense strand to SEQ ID NO: 901560
uucuaaggaaagcaagucc

SEQ ID NO: 901562 - RNA, 19 nt, Artificial Sequence
  Description of Artificial Sequence: Synthetic oligonucleotide
  Sense strand starting at position 1520 of SEQ ID NO: 588964
agaguaauucccugacaau

SEQ ID NO: 901563 - RNA, 19 nt, Artificial Sequence
  Description of Artificial Sequence: Synthetic oligonucleotide
  Antisense strand to SEQ ID NO: 901562
auugucagggaauuacucu

SEQ ID NO: 901564 - RNA, 19 nt, Artificial Sequence
  Description of Artificial Sequence: Synthetic oligonucleotide
  Sense strand starting at position 1706 of SEQ ID NO: 588964
agguguugucggagcaugu

SEQ ID NO: 901565 - RNA, 19 nt, Artificial Sequence
  Description of Artificial Sequence: Synthetic oligonucleotide
  Antisense strand to SEQ ID NO: 901564
acaugcuccgacaacaccu

SEQ ID NO: 901566 - RNA, 19 nt, Artificial Sequence
  Description of Artificial Sequence: Synthetic oligonucleotide
  Sense strand starting at position 2007 of SEQ ID NO: 588964
ccaagagaaugagcucauu

SEQ ID NO: 901567 - RNA, 19 nt, Artificial Sequence
  Description of Artificial Sequence: Synthetic oligonucleotide
  Antisense strand to SEQ ID NO: 901566
aaugagcucauucucuugg

SEQ ID NO: 901568 - RNA, 19 nt, Artificial Sequence
  Description of Artificial Sequence: Synthetic oligonucleotide
  Sense strand starting at position 2027 of SEQ ID NO: 588964
gccagcuugcagcuuuaua

SEQ ID NO: 901569 - RNA, 19 nt, Artificial Sequence
  Description of Artificial Sequence: Synthetic oligonucleotide
  Antisense strand to SEQ ID NO: 901568
uauaaagcugcaagcuggc

SEQ ID NO: 901570 - RNA, 19 nt, Artificial Sequence
  Description of Artificial Sequence: Synthetic oligonucleotide
  Sense strand starting at position 2111 of SEQ ID NO: 588964
cauugaaaguaaguguaau

SEQ ID NO: 901571 - RNA, 19 nt, Artificial Sequence
  Description of Artificial Sequence: Synthetic oligonucleotide
  Antisense strand to SEQ ID NO: 901570
auuacacuuacuuucaaug

SEQ ID NO: 901572 - RNA, 19 nt, Artificial Sequence
  Description of Artificial Sequence: Synthetic oligonucleotide
  Sense strand starting at position 2122 of SEQ ID NO: 588964
aguguaauauccuuggaga

SEQ ID NO: 901573 - RNA, 19 nt, Artificial Sequence
  Description of Artificial Sequence: Synthetic oligonucleotide
  Antisense strand to SEQ ID NO: 901572
ucuccaaggauauuacacu

SEQ ID NO: 901574 - RNA, 19 nt, Artificial Sequence
  Description of Artificial Sequence: Synthetic oligonucleotide
  Sense strand starting at position 2123 of SEQ ID NO: 588964
guguaauauccuuggagaa

SEQ ID NO: 901575 - RNA, 19 nt, Artificial Sequence
  Description of Artificial Sequence: Synthetic oligonucleotide
  Antisense strand to SEQ ID NO: 901574
uucuccaaggauauuacac

SEQ ID NO: 901576 - RNA, 19 nt, Artificial Sequence
  Description of Artificial Sequence: Synthetic oligonucleotide
  Sense strand starting at position 2124 of SEQ ID NO: 588964
uguaauauccuuggagaau

SEQ ID NO: 901577 - RNA, 19 nt, Artificial Sequence
  Description of Artificial Sequence: Synthetic oligonucleotide
  Antisense strand to SEQ ID NO: 901576
auucuccaaggauauuaca

SEQ ID NO: 901578 - RNA, 19 nt, Artificial Sequence
  Description of Artificial Sequence: Synthetic oligonucleotide
  Sense strand starting at position 2174 of SEQ ID NO: 588964
gcaggaguggcuucgugua

SEQ ID NO: 901579 - RNA, 19 nt, Artificial Sequence
  Description of Artificial Sequence: Synthetic oligonucleotide
  Antisense strand to SEQ ID NO: 901578
uacacgaagccacuccugc

SEQ ID NO: 901580 - RNA, 19 nt, Artificial Sequence
  Description of Artificial Sequence: Synthetic oligonucleotide
  Sense strand starting at position 2326 of SEQ ID NO: 588964
guuagcacucuuuaaagaa

SEQ ID NO: 901581 - RNA, 19 nt, Artificial Sequence
  Description of Artificial Sequence: Synthetic oligonucleotide
  Antisense strand to SEQ ID NO: 901580
uucuuuaaagagugcuaac

SEQ ID NO: 901582 - RNA, 19 nt, Artificial Sequence
  Description of Artificial Sequence: Synthetic oligonucleotide
  Sense strand starting at position 2333 of SEQ ID NO: 588964
cucuuuaaagaacgaucuu

SEQ ID NO: 901583 - RNA, 19 nt, Artificial Sequence
  Description of Artificial Sequence: Synthetic oligonucleotide
  Antisense strand to SEQ ID NO: 901582
aagaucguucuuuaaagag

SEQ ID NO: 901584 - RNA, 19 nt, Artificial Sequence
  Description of Artificial Sequence: Synthetic oligonucleotide
  Sense strand starting at position 2352 of SEQ ID NO: 588964
cuuugagguuugguaagaa

SEQ ID NO: 901585 - RNA, 19 nt, Artificial Sequence
  Description of Artificial Sequence: Synthetic oligonucleotide
  Antisense strand to SEQ ID NO: 901584
uucuuaccaaaccucaaag

SEQ ID NO: 901586 - RNA, 19 nt, Artificial Sequence
  Description of Artificial Sequence: Synthetic oligonucleotide
  Sense strand starting at position 2507 of SEQ ID NO: 588964
agaaguucagagugugaac

SEQ ID NO: 901587 - RNA, 19 nt, Artificial Sequence
  Description of Artificial Sequence: Synthetic oligonucleotide
  Antisense strand to SEQ ID NO: 901586
guucacacucugaacuucu

SEQ ID NO: 901588 - RNA, 19 nt, Artificial Sequence
  Description of Artificial Sequence: Synthetic oligonucleotide
  Sense strand starting at position 2534 of SEQ ID NO: 588964
uccugcucuguugacaaga

SEQ ID NO: 901589 - RNA, 19 nt, Artificial Sequence
  Description of Artificial Sequence: Synthetic oligonucleotide
  Antisense strand to SEQ ID NO: 901588
ucuugucaacagagcagga

SEQ ID NO: 901590 - RNA, 19 nt, Artificial Sequence
  Description of Artificial Sequence: Synthetic oligonucleotide
  Sense strand starting at position 2539 of SEQ ID NO: 588964
cucuguugacaagaucgaa

SEQ ID NO: 901591 - RNA, 19 nt, Artificial Sequence
  Description of Artificial Sequence: Synthetic oligonucleotide
  Antisense strand to SEQ ID NO: 901590
uucgaucuugucaacagag

SEQ ID NO: 901592 - RNA, 19 nt, Artificial Sequence
  Description of Artificial Sequence: Synthetic oligonucleotide
  Sense strand starting at position 2542 of SEQ ID NO: 588964
uguugacaagaucgaaaga

SEQ ID NO: 901593 - RNA, 19 nt, Artificial Sequence
  Description of Artificial Sequence: Synthetic oligonucleotide
  Antisense strand to SEQ ID NO: 901592
ucuuucgaucuugucaaca

SEQ ID NO: 901594 - RNA, 19 nt, Artificial Sequence
  Description of Artificial Sequence: Synthetic oligonucleotide
  Sense strand starting at position 2793 of SEQ ID NO: 588964
uguuuccuggcuggaauuu

SEQ ID NO: 901595 - RNA, 19 nt, Artificial Sequence
  Description of Artificial Sequence: Synthetic oligonucleotide
  Antisense strand to SEQ ID NO: 901594
aaauuccagccaggaaaca

SEQ ID NO: 901596 - RNA, 19 nt, Artificial Sequence
  Description of Artificial Sequence: Synthetic oligonucleotide
  Sense strand starting at position 2833 of SEQ ID NO: 588964
uuugauuguggauagcuua

SEQ ID NO: 901597 - RNA, 19 nt, Artificial Sequence
  Description of Artificial Sequence: Synthetic oligonucleotide
  Antisense strand to SEQ ID NO: 901596
uaagcuauccacaaucaaa

SEQ ID NO: 901598 - RNA, 19 nt, Artificial Sequence
  Description of Artificial Sequence: Synthetic oligonucleotide
  Sense strand starting at position 3026 of SEQ ID NO: 588964
uuacuuucccaaugagagc

SEQ ID NO: 901599 - RNA, 19 nt, Artificial Sequence
  Description of Artificial Sequence: Synthetic oligonucleotide
  Antisense strand to SEQ ID NO: 901598
gcucucauugggaaaguaa

SEQ ID NO: 901600 - RNA, 19 nt, Artificial Sequence
  Description of Artificial Sequence: Synthetic oligonucleotide
  Sense strand starting at position 3123 of SEQ ID NO: 588964
ucauguuagggcugggaga

SEQ ID NO: 901601 - RNA, 19 nt, Artificial Sequence
  Description of Artificial Sequence: Synthetic oligonucleotide
  Antisense strand to SEQ ID NO: 901600
ucucccagcccuaacauga

SEQ ID NO: 901602 - RNA, 19 nt, Artificial Sequence
  Description of Artificial Sequence: Synthetic oligonucleotide
  Sense strand starting at position 3256 of SEQ ID NO: 588964
ucuucuagucuugauauug

SEQ ID NO: 901603 - RNA, 19 nt, Artificial Sequence
  Description of Artificial Sequence: Synthetic oligonucleotide
  Antisense strand to SEQ ID NO: 901602
caauaucaagacuagaaga

SEQ ID NO: 901604 - RNA, 19 nt, Artificial Sequence
  Description of Artificial Sequence: Synthetic oligonucleotide
  Sense strand starting at position 3325 of SEQ ID NO: 588964
auggaauauuucuaagaug

SEQ ID NO: 901605 - RNA, 19 nt, Artificial Sequence
  Description of Artificial Sequence: Synthetic oligonucleotide
  Antisense strand to SEQ ID NO: 901604
caucuuagaaauauuccau

SEQ ID NO: 901606 - RNA, 19 nt, Artificial Sequence
  Description of Artificial Sequence: Synthetic oligonucleotide
  Sense strand starting at position 3607 of SEQ ID NO: 588964
ggccaacagucacugaaga

SEQ ID NO: 901607 - RNA, 19 nt, Artificial Sequence
  Description of Artificial Sequence: Synthetic oligonucleotide
  Antisense strand to SEQ ID NO: 901606
ucuucagugacuguuggcc

SEQ ID NO: 901608 - RNA, 19 nt, Artificial Sequence
  Description of Artificial Sequence: Synthetic oligonucleotide
  Sense strand starting at position 3704 of SEQ ID NO: 588964
cccacugagccuugagaug

SEQ ID NO: 901609 - RNA, 19 nt, Artificial Sequence
  Description of Artificial Sequence: Synthetic oligonucleotide
  Antisense strand to SEQ ID NO: 901608
caucucaaggcucaguggg

SEQ ID NO: 901610 - RNA, 19 nt, Artificial Sequence
  Description of Artificial Sequence: Synthetic oligonucleotide
  Sense strand starting at position 163 of SEQ ID NO: 588965
gcucucauaaggugaugga

SEQ ID NO: 901611 - RNA, 19 nt, Artificial Sequence
  Description of Artificial Sequence: Synthetic oligonucleotide
  Antisense strand to SEQ ID NO: 901610
uccaucaccuuaugagagc

SEQ ID NO: 901612 - RNA, 19 nt, Artificial Sequence
  Description of Artificial Sequence: Synthetic oligonucleotide
  Sense strand starting at position 166 of SEQ ID NO: 588965
cucauaaggugauggauuu

SEQ ID NO: 901613 - RNA, 19 nt, Artificial Sequence
  Description of Artificial Sequence: Synthetic oligonucleotide
  Antisense strand to SEQ ID NO: 901612
aaauccaucaccuuaugag

SEQ ID NO: 901614 - RNA, 19 nt, Artificial Sequence
  Description of Artificial Sequence: Synthetic oligonucleotide
  Sense strand starting at position 271 of SEQ ID NO: 588965
uuaacaguuguugauccaa

SEQ ID NO: 901615 - RNA, 19 nt, Artificial Sequence
  Description of Artificial Sequence: Synthetic oligonucleotide
  Antisense strand to SEQ ID NO: 901614
uuggaucaacaacuguuaa

SEQ ID NO: 901616 - RNA, 19 nt, Artificial Sequence
  Description of Artificial Sequence: Synthetic oligonucleotide
  Sense strand starting at position 282 of SEQ ID NO: 588965
ugauccaauuaugaaagaa

SEQ ID NO: 901617 - RNA, 19 nt, Artificial Sequence
  Description of Artificial Sequence: Synthetic oligonucleotide
  Antisense strand to SEQ ID NO: 901616
uucuuucauaauuggauca

SEQ ID NO: 901618 - RNA, 19 nt, Artificial Sequence
  Description of Artificial Sequence: Synthetic oligonucleotide
  Sense strand starting at position 571 of SEQ ID NO: 588965
uccugugaaaucugugaag

SEQ ID NO: 901619 - RNA, 19 nt, Artificial Sequence
  Description of Artificial Sequence: Synthetic oligonucleotide
  Antisense strand to SEQ ID NO: 901618
cuucacagauuucacagga

SEQ ID NO: 901620 - RNA, 19 nt, Artificial Sequence
  Description of Artificial Sequence: Synthetic oligonucleotide
  Sense strand starting at position 677 of SEQ ID NO: 588965
acaagugucuguccagaac

SEQ ID NO: 901621 - RNA, 19 nt, Artificial Sequence
  Description of Artificial Sequence: Synthetic oligonucleotide
  Antisense strand to SEQ ID NO: 901620
guucuggacagacacuugu

SEQ ID NO: 901622 - RNA, 19 nt, Artificial Sequence
  Description of Artificial Sequence: Synthetic oligonucleotide
  Sense strand starting at position 937 of SEQ ID NO: 588965
gaggauauauuaccauugu

SEQ ID NO: 901623 - RNA, 19 nt, Artificial Sequence
  Description of Artificial Sequence: Synthetic oligonucleotide
  Antisense strand to SEQ ID NO: 901622
acaaugguaauauauccuc

SEQ ID NO: 901624 - RNA, 19 nt, Artificial Sequence
  Description of Artificial Sequence: Synthetic oligonucleotide
  Sense strand starting at position 1084 of SEQ ID NO: 588965
cacugacaaucgguuugaa

SEQ ID NO: 901625 - RNA, 19 nt, Artificial Sequence
  Description of Artificial Sequence: Synthetic oligonucleotide
  Antisense strand to SEQ ID NO: 901624
uucaaaccgauugucagug

SEQ ID NO: 901626 - RNA, 19 nt, Artificial Sequence
  Description of Artificial Sequence: Synthetic oligonucleotide
  Sense strand starting at position 1184 of SEQ ID NO: 588965
ccaaguaggugagcuuaga

SEQ ID NO: 901627 - RNA, 19 nt, Artificial Sequence
  Description of Artificial Sequence: Synthetic oligonucleotide
  Antisense strand to SEQ ID NO: 901626
ucuaagcucaccuacuugg

SEQ ID NO: 901628 - RNA, 19 nt, Artificial Sequence
  Description of Artificial Sequence: Synthetic oligonucleotide
  Sense strand starting at position 1208 of SEQ ID NO: 588965
cgucuaaagaucugggauu

SEQ ID NO: 901629 - RNA, 19 nt, Artificial Sequence
  Description of Artificial Sequence: Synthetic oligonucleotide
  Antisense strand to SEQ ID NO: 901628
aaucccagaucuuuagacg

SEQ ID NO: 901630 - RNA, 19 nt, Artificial Sequence
  Description of Artificial Sequence: Synthetic oligonucleotide
  Sense strand starting at position 1299 of SEQ ID NO: 588965
ggcuuugagaucugauaua

SEQ ID NO: 901631 - RNA, 19 nt, Artificial Sequence
  Description of Artificial Sequence: Synthetic oligonucleotide
  Antisense strand to SEQ ID NO: 901630
uauaucagaucucaaagcc

SEQ ID NO: 901632 - RNA, 19 nt, Artificial Sequence
  Description of Artificial Sequence: Synthetic oligonucleotide
  Sense strand starting at position 1309 of SEQ ID NO: 588965
ucugauauaccugggauca

SEQ ID NO: 901633 - RNA, 19 nt, Artificial Sequence
  Description of Artificial Sequence: Synthetic oligonucleotide
  Antisense strand to SEQ ID NO: 901632
ugaucccagguauaucaga

SEQ ID NO: 901634 - RNA, 19 nt, Artificial Sequence
  Description of Artificial Sequence: Synthetic oligonucleotide
  Sense strand starting at position 1321 of SEQ ID NO: 588965
gggaucaagugacugucau

SEQ ID NO: 901635 - RNA, 19 nt, Artificial Sequence
  Description of Artificial Sequence: Synthetic oligonucleotide
  Antisense strand to SEQ ID NO: 901634
augacagucacuugauccc

SEQ ID NO: 901636 - RNA, 19 nt, Artificial Sequence
  Description of Artificial Sequence: Synthetic oligonucleotide
  Sense strand starting at position 1322 of SEQ ID NO: 588965
ggaucaagugacugucauu

SEQ ID NO: 901637 - RNA, 19 nt, Artificial Sequence
  Description of Artificial Sequence: Synthetic oligonucleotide
  Antisense strand to SEQ ID NO: 901636
aaugacagucacuugaucc

SEQ ID NO: 901638 - RNA, 19 nt, Artificial Sequence
  Description of Artificial Sequence: Synthetic oligonucleotide
  Sense strand starting at position 1374 of SEQ ID NO: 588965
cgguuugcuccacaguaaa

SEQ ID NO: 901639 - RNA, 19 nt, Artificial Sequence
  Description of Artificial Sequence: Synthetic oligonucleotide
  Antisense strand to SEQ ID NO: 901638
uuuacuguggagcaaaccg

SEQ ID NO: 901640 - RNA, 19 nt, Artificial Sequence
  Description of Artificial Sequence: Synthetic oligonucleotide
  Sense strand starting at position 1646 of SEQ ID NO: 588965
gugccuugauucucacuga

SEQ ID NO: 901641 - RNA, 19 nt, Artificial Sequence
  Description of Artificial Sequence: Synthetic oligonucleotide
  Antisense strand to SEQ ID NO: 901640
ucagugagaaucaaggcac

SEQ ID NO: 901642 - RNA, 19 nt, Artificial Sequence
  Description of Artificial Sequence: Synthetic oligonucleotide
  Sense strand starting at position 1671 of SEQ ID NO: 588965
ugaccaucugcguaauggu

SEQ ID NO: 901643 - RNA, 19 nt, Artificial Sequence
  Description of Artificial Sequence: Synthetic oligonucleotide
  Antisense strand to SEQ ID NO: 901642
accauuacgcagaugguca

SEQ ID NO: 901644 - RNA, 19 nt, Artificial Sequence
  Description of Artificial Sequence: Synthetic oligonucleotide
  Sense strand starting at position 1891 of SEQ ID NO: 588965
cgcagugauauaggacuca

SEQ ID NO: 901645 - RNA, 19 nt, Artificial Sequence
  Description of Artificial Sequence: Synthetic oligonucleotide
  Antisense strand to SEQ ID NO: 901644
ugaguccuauaucacugcg

SEQ ID NO: 901646 - RNA, 19 nt, Artificial Sequence
  Description of Artificial Sequence: Synthetic oligonucleotide
  Sense strand starting at position 2219 of SEQ ID NO: 588965
gaaauucuguaaucgcuac

SEQ ID NO: 901647 - RNA, 19 nt, Artificial Sequence
  Description of Artificial Sequence: Synthetic oligonucleotide
  Antisense strand to SEQ ID NO: 901646
guagcgauuacagaauuuc

SEQ ID NO: 901648 - RNA, 19 nt, Artificial Sequence
  Description of Artificial Sequence: Synthetic oligonucleotide
  Sense strand starting at position 2230 of SEQ ID NO: 588965
aucgcuacucacuaaauga

SEQ ID NO: 901649 - RNA, 19 nt, Artificial Sequence
  Description of Artificial Sequence: Synthetic oligonucleotide
  Antisense strand to SEQ ID NO: 901648
ucauuuagugaguagcgau

SEQ ID NO: 901650 - RNA, 19 nt, Artificial Sequence
  Description of Artificial Sequence: Synthetic oligonucleotide
  Sense strand starting at position 2268 of SEQ ID NO: 588965
aaagaagucuggcucucuu

SEQ ID NO: 901651 - RNA, 19 nt, Artificial Sequence
  Description of Artificial Sequence: Synthetic oligonucleotide
  Antisense strand to SEQ ID NO: 901650
aagagagccagacuucuuu

SEQ ID NO: 901652 - RNA, 19 nt, Artificial Sequence
  Description of Artificial Sequence: Synthetic oligonucleotide
  Sense strand starting at position 2313 of SEQ ID NO: 588965
agaccuugggcaugucaua

SEQ ID NO: 901653 - RNA, 19 nt, Artificial Sequence
  Description of Artificial Sequence: Synthetic oligonucleotide
  Antisense strand to SEQ ID NO: 901652
uaugacaugcccaaggucu

SEQ ID NO: 901654 - RNA, 19 nt, Artificial Sequence
  Description of Artificial Sequence: Synthetic oligonucleotide
  Sense strand starting at position 2337 of SEQ ID NO: 588965
uauccagaggccugugaau

SEQ ID NO: 901655 - RNA, 19 nt, Artificial Sequence
  Description of Artificial Sequence: Synthetic oligonucleotide
  Antisense strand to SEQ ID NO: 901654
auucacaggccucuggaua

SEQ ID NO: 901656 - RNA, 19 nt, Artificial Sequence
  Description of Artificial Sequence: Synthetic oligonucleotide
  Sense strand starting at position 2339 of SEQ ID NO: 588965
uccagaggccugugaauca

SEQ ID NO: 901657 - RNA, 19 nt, Artificial Sequence
  Description of Artificial Sequence: Synthetic oligonucleotide
  Antisense strand to SEQ ID NO: 901656
ugauucacaggccucugga

SEQ ID NO: 901658 - RNA, 19 nt, Artificial Sequence
  Description of Artificial Sequence: Synthetic oligonucleotide
  Sense strand starting at position 2352 of SEQ ID NO: 588965
gaaucaaggaguuggguuu

SEQ ID NO: 901659 - RNA, 19 nt, Artificial Sequence
  Description of Artificial Sequence: Synthetic oligonucleotide
  Antisense strand to SEQ ID NO: 901658
aaacccaacuccuugauuc

SEQ ID NO: 901660 - RNA, 19 nt, Artificial Sequence
  Description of Artificial Sequence: Synthetic oligonucleotide
  Sense strand starting at position 2378 of SEQ ID NO: 588965
gcauaaucaugugcuagau

SEQ ID NO: 901661 - RNA, 19 nt, Artificial Sequence
  Description of Artificial Sequence: Synthetic oligonucleotide
  Antisense strand to SEQ ID NO: 901660
aucuagcacaugauuaugc

SEQ ID NO: 901662 - RNA, 19 nt, Artificial Sequence
  Description of Artificial Sequence: Synthetic oligonucleotide
  Sense strand starting at position 2397 of SEQ ID NO: 588965
acagacauaccauagcgau

SEQ ID NO: 901663 - RNA, 19 nt, Artificial Sequence
  Description of Artificial Sequence: Synthetic oligonucleotide
  Antisense strand to SEQ ID NO: 901662
aucgcuaugguaugucugu

SEQ ID NO: 901664 - RNA, 19 nt, Artificial Sequence
  Description of Artificial Sequence: Synthetic oligonucleotide
  Sense strand starting at position 2598 of SEQ ID NO: 588965
aaugguaacgauuaccuua

SEQ ID NO: 901665 - RNA, 19 nt, Artificial Sequence
  Description of Artificial Sequence: Synthetic oligonucleotide
  Antisense strand to SEQ ID NO: 901664
uaagguaaucguuaccauu

SEQ ID NO: 901666 - RNA, 19 nt, Artificial Sequence
  Description of Artificial Sequence: Synthetic oligonucleotide
  Sense strand starting at position 3003 of SEQ ID NO: 588965
caagguagugguugcugaa

SEQ ID NO: 901667 - RNA, 19 nt, Artificial Sequence
  Description of Artificial Sequence: Synthetic oligonucleotide
  Antisense strand to SEQ ID NO: 901666
uucagcaaccacuaccuug

SEQ ID NO: 901668 - RNA, 19 nt, Artificial Sequence
  Description of Artificial Sequence: Synthetic oligonucleotide
  Sense strand starting at position 3168 of SEQ ID NO: 588965
auuggagcccuuuauccaa

SEQ ID NO: 901669 - RNA, 19 nt, Artificial Sequence
  Description of Artificial Sequence: Synthetic oligonucleotide
  Antisense strand to SEQ ID NO: 901668
uuggauaaagggcuccaau

SEQ ID NO: 901670 - RNA, 19 nt, Artificial Sequence
  Description of Artificial Sequence: Synthetic oligonucleotide
  Sense strand starting at position 3369 of SEQ ID NO: 588965
uguuacuucccucaucuga

SEQ ID NO: 901671 - RNA, 19 nt, Artificial Sequence
  Description of Artificial Sequence: Synthetic oligonucleotide
  Antisense strand to SEQ ID NO: 901670
ucagaugagggaaguaaca

SEQ ID NO: 901672 - RNA, 19 nt, Artificial Sequence
  Description of Artificial Sequence: Synthetic oligonucleotide
  Sense strand starting at position 3411 of SEQ ID NO: 588965
ucauaaagauuggaaucaa

SEQ ID NO: 901673 - RNA, 19 nt, Artificial Sequence
  Description of Artificial Sequence: Synthetic oligonucleotide
  Antisense strand to SEQ ID NO: 901672
uugauuccaaucuuuauga

SEQ ID NO: 901674 - RNA, 19 nt, Artificial Sequence
  Description of Artificial Sequence: Synthetic oligonucleotide
  Sense strand starting at position 3491 of SEQ ID NO: 588965
auggcaucagaauggugaa

SEQ ID NO: 901675 - RNA, 19 nt, Artificial Sequence
  Description of Artificial Sequence: Synthetic oligonucleotide
  Antisense strand to SEQ ID NO: 901674
uucaccauucugaugccau

SEQ ID NO: 901676 - RNA, 19 nt, Artificial Sequence
  Description of Artificial Sequence: Synthetic oligonucleotide
  Sense strand starting at position 3492 of SEQ ID NO: 588965
uggcaucagaauggugaau

SEQ ID NO: 901677 - RNA, 19 nt, Artificial Sequence
  Description of Artificial Sequence: Synthetic oligonucleotide
  Antisense strand to SEQ ID NO: 901676
auucaccauucugaugcca

SEQ ID NO: 901678 - RNA, 19 nt, Artificial Sequence
  Description of Artificial Sequence: Synthetic oligonucleotide
  Sense strand starting at position 3642 of SEQ ID NO: 588965
uuaucuauaggcugcagaa

SEQ ID NO: 901679 - RNA, 19 nt, Artificial Sequence
  Description of Artificial Sequence: Synthetic oligonucleotide
  Antisense strand to SEQ ID NO: 901678
uucugcagccuauagauaa

SEQ ID NO: 901680 - RNA, 19 nt, Artificial Sequence
  Description of Artificial Sequence: Synthetic oligonucleotide
  Sense strand starting at position 3711 of SEQ ID NO: 588965
auuaaagcucuugaguaac

SEQ ID NO: 901681 - RNA, 19 nt, Artificial Sequence
  Description of Artificial Sequence: Synthetic oligonucleotide
  Antisense strand to SEQ ID NO: 901680
guuacucaagagcuuuaau

SEQ ID NO: 901682 - RNA, 19 nt, Artificial Sequence
  Description of Artificial Sequence: Synthetic oligonucleotide
  Sense strand starting at position 3877 of SEQ ID NO: 588965
ggcagaguauccuuagcau

SEQ ID NO: 901683 - RNA, 19 nt, Artificial Sequence
  Description of Artificial Sequence: Synthetic oligonucleotide
  Antisense strand to SEQ ID NO: 901682
augcuaaggauacucugcc

SEQ ID NO: 901684 - RNA, 19 nt, Artificial Sequence
  Description of Artificial Sequence: Synthetic oligonucleotide
  Sense strand starting at position 3880 of SEQ ID NO: 588965
agaguauccuuagcauaau

SEQ ID NO: 901685 - RNA, 19 nt, Artificial Sequence
  Description of Artificial Sequence: Synthetic oligonucleotide
  Antisense strand to SEQ ID NO: 901684
auuaugcuaaggauacucu

SEQ ID NO: 901686 - RNA, 19 nt, Artificial Sequence
  Description of Artificial Sequence: Synthetic oligonucleotide
  Sense strand starting at position 3953 of SEQ ID NO: 588965
agucaucagcuauauuaga

SEQ ID NO: 901687 - RNA, 19 nt, Artificial Sequence
  Description of Artificial Sequence: Synthetic oligonucleotide
  Antisense strand to SEQ ID NO: 901686
ucuaauauagcugaugacu

SEQ ID NO: 901688 - RNA, 19 nt, Artificial Sequence
  Description of Artificial Sequence: Synthetic oligonucleotide
  Sense strand starting at position 3977 of SEQ ID NO: 588965
acaagaaagucagauuuga

SEQ ID NO: 901689 - RNA, 19 nt, Artificial Sequence
  Description of Artificial Sequence: Synthetic oligonucleotide
  Antisense strand to SEQ ID NO: 901688
ucaaaucugacuuucuugu

SEQ ID NO: 901690 - RNA, 19 nt, Artificial Sequence
  Description of Artificial Sequence: Synthetic oligonucleotide
  Sense strand starting at position 296 of SEQ ID NO: 588966
gaagaaucacacuguguac

SEQ ID NO: 901691 - RNA, 19 nt, Artificial Sequence
  Description of Artificial Sequence: Synthetic oligonucleotide
  Antisense strand to SEQ ID NO: 901690
guacacagugugauucuuc

SEQ ID NO: 901692 - RNA, 19 nt, Artificial Sequence
  Description of Artificial Sequence: Synthetic oligonucleotide
  Sense strand starting at position 298 of SEQ ID NO: 588966
agaaucacacuguguacau

SEQ ID NO: 901693 - RNA, 19 nt, Artificial Sequence
  Description of Artificial Sequence: Synthetic oligonucleotide
  Antisense strand to SEQ ID NO: 901692
auguacacagugugauucu

SEQ ID NO: 901694 - RNA, 19 nt, Artificial Sequence
  Description of Artificial Sequence: Synthetic oligonucleotide
  Sense strand starting at position 346 of SEQ ID NO: 588966
acuguuagauucucauauc

SEQ ID NO: 901695 - RNA, 19 nt, Artificial Sequence
  Description of Artificial Sequence: Synthetic oligonucleotide
  Antisense strand to SEQ ID NO: 901694
gauaugagaaucuaacagu

SEQ ID NO: 901696 - RNA, 19 nt, Artificial Sequence
  Description of Artificial Sequence: Synthetic oligonucleotide
  Sense strand starting at position 454 of SEQ ID NO: 588966
aucugcauauuauuacgaa

SEQ ID NO: 901697 - RNA, 19 nt, Artificial Sequence
  Description of Artificial Sequence: Synthetic oligonucleotide
  Antisense strand to SEQ ID NO: 901696
uucguaauaauaugcagau

SEQ ID NO: 901698 - RNA, 19 nt, Artificial Sequence
  Description of Artificial Sequence: Synthetic oligonucleotide
  Sense strand starting at position 767 of SEQ ID NO: 588966
caguaaguaguccauaaga

SEQ ID NO: 901699 - RNA, 19 nt, Artificial Sequence
  Description of Artificial Sequence: Synthetic oligonucleotide
  Antisense strand to SEQ ID NO: 901698
ucuuauggacuacuuacug

SEQ ID NO: 901700 - RNA, 19 nt, Artificial Sequence
  Description of Artificial Sequence: Synthetic oligonucleotide
  Sense strand starting at position 1072 of SEQ ID NO: 588966
gaaacuacgccagguaacu

SEQ ID NO: 901701 - RNA, 19 nt, Artificial Sequence
  Description of Artificial Sequence: Synthetic oligonucleotide
  Antisense strand to SEQ ID NO: 901700
aguuaccuggcguaguuuc

SEQ ID NO: 901702 - RNA, 19 nt, Artificial Sequence
  Description of Artificial Sequence: Synthetic oligonucleotide
  Sense strand starting at position 1242 of SEQ ID NO: 588966
gagaguaguccgcaaccau

SEQ ID NO: 901703 - RNA, 19 nt, Artificial Sequence
  Description of Artificial Sequence: Synthetic oligonucleotide
  Antisense strand to SEQ ID NO: 901702
augguugcggacuacucuc

SEQ ID NO: 901704 - RNA, 19 nt, Artificial Sequence
  Description of Artificial Sequence: Synthetic oligonucleotide
  Sense strand starting at position 1410 of SEQ ID NO: 588966
ggauaucugugguuccgaa

SEQ ID NO: 901705 - RNA, 19 nt, Artificial Sequence
  Description of Artificial Sequence: Synthetic oligonucleotide
  Antisense strand to SEQ ID NO: 901704
uucggaaccacagauaucc

SEQ ID NO: 901706 - RNA, 19 nt, Artificial Sequence
  Description of Artificial Sequence: Synthetic oligonucleotide
  Sense strand starting at position 1526 of SEQ ID NO: 588966
gccuccuuugaggaguacu

SEQ ID NO: 901707 - RNA, 19 nt, Artificial Sequence
  Description of Artificial Sequence: Synthetic oligonucleotide
  Antisense strand to SEQ ID NO: 901706
aguacuccucaaaggaggc

SEQ ID NO: 901708 - RNA, 19 nt, Artificial Sequence
  Description of Artificial Sequence: Synthetic oligonucleotide
  Sense strand starting at position 2201 of SEQ ID NO: 588966
gacgcucagaguuggauuu

SEQ ID NO: 901709 - RNA, 19 nt, Artificial Sequence
  Description of Artificial Sequence: Synthetic oligonucleotide
  Antisense strand to SEQ ID NO: 901708
aaauccaacucugagcguc

SEQ ID NO: 901710 - RNA, 19 nt, Artificial Sequence
  Description of Artificial Sequence: Synthetic oligonucleotide
  Sense strand starting at position 2278 of SEQ ID NO: 588966
cacugugacuuacuggaga

SEQ ID NO: 901711 - RNA, 19 nt, Artificial Sequence
  Description of Artificial Sequence: Synthetic oligonucleotide
  Antisense strand to SEQ ID NO: 901710
ucuccaguaagucacagug

SEQ ID NO: 901712 - RNA, 19 nt, Artificial Sequence
  Description of Artificial Sequence: Synthetic oligonucleotide
  Sense strand starting at position 2280 of SEQ ID NO: 588966
cugugacuuacuggagaua

SEQ ID NO: 901713 - RNA, 19 nt, Artificial Sequence
  Description of Artificial Sequence: Synthetic oligonucleotide
  Antisense strand to SEQ ID NO: 901712
uaucuccaguaagucacag

SEQ ID NO: 901714 - RNA, 19 nt, Artificial Sequence
  Description of Artificial Sequence: Synthetic oligonucleotide
  Sense strand starting at position 2398 of SEQ ID NO: 588966
gguacugagaaguauagcu

SEQ ID NO: 901715 - RNA, 19 nt, Artificial Sequence
  Description of Artificial Sequence: Synthetic oligonucleotide
  Antisense strand to SEQ ID NO: 901714
agcuauacuucucaguacc

SEQ ID NO: 901716 - RNA, 19 nt, Artificial Sequence
  Description of Artificial Sequence: Synthetic oligonucleotide
  Sense strand starting at position 2427 of SEQ ID NO: 588966
agcaguucgaaacgaagau

SEQ ID NO: 901717 - RNA, 19 nt, Artificial Sequence
  Description of Artificial Sequence: Synthetic oligonucleotide
  Antisense strand to SEQ ID NO: 901716
aucuucguuucgaacugcu

SEQ ID NO: 901718 - RNA, 19 nt, Artificial Sequence
  Description of Artificial Sequence: Synthetic oligonucleotide
  Sense strand starting at position 2428 of SEQ ID NO: 588966
gcaguucgaaacgaagauu

SEQ ID NO: 901719 - RNA, 19 nt, Artificial Sequence
  Description of Artificial Sequence: Synthetic oligonucleotide
  Antisense strand to SEQ ID NO: 901718
aaucuucguuucgaacugc

SEQ ID NO: 901720 - RNA, 19 nt, Artificial Sequence
  Description of Artificial Sequence: Synthetic oligonucleotide
  Sense strand starting at position 2431 of SEQ ID NO: 588966
guucgaaacgaagauuaca

SEQ ID NO: 901721 - RNA, 19 nt, Artificial Sequence
  Description of Artificial Sequence: Synthetic oligonucleotide
  Antisense strand to SEQ ID NO: 901720
uguaaucuucguuucgaac

SEQ ID NO: 901722 - RNA, 19 nt, Artificial Sequence
  Description of Artificial Sequence: Synthetic oligonucleotide
  Sense strand starting at position 2444 of SEQ ID NO: 588966
auuacaauucugggaagug

SEQ ID NO: 901723 - RNA, 19 nt, Artificial Sequence
  Description of Artificial Sequence: Synthetic oligonucleotide
  Antisense strand to SEQ ID NO: 901722
cacuucccagaauuguaau

SEQ ID NO: 901724 - RNA, 19 nt, Artificial Sequence
  Description of Artificial Sequence: Synthetic oligonucleotide
  Sense strand starting at position 2470 of SEQ ID NO: 588966
ugacaugugagcuggacuu

SEQ ID NO: 901725 - RNA, 19 nt, Artificial Sequence
  Description of Artificial Sequence: Synthetic oligonucleotide
  Antisense strand to SEQ ID NO: 901724
aaguccagcucacauguca

SEQ ID NO: 901726 - RNA, 19 nt, Artificial Sequence
  Description of Artificial Sequence: Synthetic oligonucleotide
  Sense strand starting at position 2472 of SEQ ID NO: 588966
acaugugagcuggacuuua

SEQ ID NO: 901727 - RNA, 19 nt, Artificial Sequence
  Description of Artificial Sequence: Synthetic oligonucleotide
  Antisense strand to SEQ ID NO: 901726
uaaaguccagcucacaugu

SEQ ID NO: 901728 - RNA, 19 nt, Artificial Sequence
  Description of Artificial Sequence: Synthetic oligonucleotide
  Sense strand starting at position 2606 of SEQ ID NO: 588966
uuuggcuccagagguuaaa

SEQ ID NO: 901729 - RNA, 19 nt, Artificial Sequence
  Description of Artificial Sequence: Synthetic oligonucleotide
  Antisense strand to SEQ ID NO: 901728
uuuaaccucuggagccaaa

SEQ ID NO: 901730 - RNA, 19 nt, Artificial Sequence
  Description of Artificial Sequence: Synthetic oligonucleotide
  Sense strand starting at position 2616 of SEQ ID NO: 588966
gagguuaaauucuugauca

SEQ ID NO: 901731 - RNA, 19 nt, Artificial Sequence
  Description of Artificial Sequence: Synthetic oligonucleotide
  Antisense strand to SEQ ID NO: 901730
ugaucaagaauuuaaccuc

SEQ ID NO: 901732 - RNA, 19 nt, Artificial Sequence
  Description of Artificial Sequence: Synthetic oligonucleotide
  Sense strand starting at position 2636 of SEQ ID NO: 588966
ucacuauguuaagcucaga

SEQ ID NO: 901733 - RNA, 19 nt, Artificial Sequence
  Description of Artificial Sequence: Synthetic oligonucleotide
  Antisense strand to SEQ ID NO: 901732
ucugagcuuaacauaguga

SEQ ID NO: 901734 - RNA, 19 nt, Artificial Sequence
  Description of Artificial Sequence: Synthetic oligonucleotide
  Sense strand starting at position 2864 of SEQ ID NO: 588966
gcagaauaucgucagugag

SEQ ID NO: 901735 - RNA, 19 nt, Artificial Sequence
  Description of Artificial Sequence: Synthetic oligonucleotide
  Antisense strand to SEQ ID NO: 901734
cucacugacgauauucugc

SEQ ID NO: 901736 - RNA, 19 nt, Artificial Sequence
  Description of Artificial Sequence: Synthetic oligonucleotide
  Sense strand starting at position 2866 of SEQ ID NO: 588966
agaauaucgucagugagug

SEQ ID NO: 901737 - RNA, 19 nt, Artificial Sequence
  Description of Artificial Sequence: Synthetic oligonucleotide
  Antisense strand to SEQ ID NO: 901736
cacucacugacgauauucu

SEQ ID NO: 901738 - RNA, 19 nt, Artificial Sequence
  Description of Artificial Sequence: Synthetic oligonucleotide
  Sense strand starting at position 2906 of SEQ ID NO: 588966
ggaagcauuugucaaauaa

SEQ ID NO: 901739 - RNA, 19 nt, Artificial Sequence
  Description of Artificial Sequence: Synthetic oligonucleotide
  Antisense strand to SEQ ID NO: 901738
uuauuugacaaaugcuucc

SEQ ID NO: 901740 - RNA, 19 nt, Artificial Sequence
  Description of Artificial Sequence: Synthetic oligonucleotide
  Sense strand starting at position 2962 of SEQ ID NO: 588966
ucugauaaauaggaaacaa

SEQ ID NO: 901741 - RNA, 19 nt, Artificial Sequence
  Description of Artificial Sequence: Synthetic oligonucleotide
  Antisense strand to SEQ ID NO: 901740
uuguuuccuauuuaucaga

SEQ ID NO: 901742 - RNA, 19 nt, Artificial Sequence
  Description of Artificial Sequence: Synthetic oligonucleotide
  Sense strand starting at position 2982 of SEQ ID NO: 588966
aaggaauagguuuggguaa

SEQ ID NO: 901743 - RNA, 19 nt, Artificial Sequence
  Description of Artificial Sequence: Synthetic oligonucleotide
  Antisense strand to SEQ ID NO: 901742
uuacccaaaccuauuccuu

SEQ ID NO: 901744 - RNA, 19 nt, Artificial Sequence
  Description of Artificial Sequence: Synthetic oligonucleotide
  Sense strand starting at position 3062 of SEQ ID NO: 588966
auuggagaaacgugauuag

SEQ ID NO: 901745 - RNA, 19 nt, Artificial Sequence
  Description of Artificial Sequence: Synthetic oligonucleotide
  Antisense strand to SEQ ID NO: 901744
cuaaucacguuucuccaau

SEQ ID NO: 901746 - RNA, 19 nt, Artificial Sequence
  Description of Artificial Sequence: Synthetic oligonucleotide
  Sense strand starting at position 3065 of SEQ ID NO: 588966
ggagaaacgugauuagcug

SEQ ID NO: 901747 - RNA, 19 nt, Artificial Sequence
  Description of Artificial Sequence: Synthetic oligonucleotide
  Antisense strand to SEQ ID NO: 901746
cagcuaaucacguuucucc

SEQ ID NO: 901748 - RNA, 19 nt, Artificial Sequence
  Description of Artificial Sequence: Synthetic oligonucleotide
  Sense strand starting at position 3235 of SEQ ID NO: 588966
ccuaaacacuaaguguuua

SEQ ID NO: 901749 - RNA, 19 nt, Artificial Sequence
  Description of Artificial Sequence: Synthetic oligonucleotide
  Antisense strand to SEQ ID NO: 901748
uaaacacuuaguguuuagg

SEQ ID NO: 901750 - RNA, 19 nt, Artificial Sequence
  Description of Artificial Sequence: Synthetic oligonucleotide
  Sense strand starting at position 3268 of SEQ ID NO: 588966
uguaguaaaucucuacacu

SEQ ID NO: 901751 - RNA, 19 nt, Artificial Sequence
  Description of Artificial Sequence: Synthetic oligonucleotide
  Antisense strand to SEQ ID NO: 901750
aguguagagauuuacuaca

SEQ ID NO: 901752 - RNA, 19 nt, Artificial Sequence
  Description of Artificial Sequence: Synthetic oligonucleotide
  Sense strand starting at position 3269 of SEQ ID NO: 588966
guaguaaaucucuacacuu

SEQ ID NO: 901753 - RNA, 19 nt, Artificial Sequence
  Description of Artificial Sequence: Synthetic oligonucleotide
  Antisense strand to SEQ ID NO: 901752
aaguguagagauuuacuac

SEQ ID NO: 901754 - RNA, 19 nt, Artificial Sequence
  Description of Artificial Sequence: Synthetic oligonucleotide
  Sense strand starting at position 3348 of SEQ ID NO: 588966
aagcacuucccguagagaa

SEQ ID NO: 901755 - RNA, 19 nt, Artificial Sequence
  Description of Artificial Sequence: Synthetic oligonucleotide
  Antisense strand to SEQ ID NO: 901754
uucucuacgggaagugcuu

SEQ ID NO: 901756 - RNA, 19 nt, Artificial Sequence
  Description of Artificial Sequence: Synthetic oligonucleotide
  Sense strand starting at position 3370 of SEQ ID NO: 588966
ucuuuagaccuguagcaca

SEQ ID NO: 901757 - RNA, 19 nt, Artificial Sequence
  Description of Artificial Sequence: Synthetic oligonucleotide
  Antisense strand to SEQ ID NO: 901756
ugugcuacaggucuaaaga

SEQ ID NO: 901758 - RNA, 19 nt, Artificial Sequence
  Description of Artificial Sequence: Synthetic oligonucleotide
  Sense strand starting at position 3501 of SEQ ID NO: 588966
uugcgaauuuaggcucaga

SEQ ID NO: 901759 - RNA, 19 nt, Artificial Sequence
  Description of Artificial Sequence: Synthetic oligonucleotide
  Antisense strand to SEQ ID NO: 901758
ucugagccuaaauucgcaa

SEQ ID NO: 901760 - RNA, 19 nt, Artificial Sequence
  Description of Artificial Sequence: Synthetic oligonucleotide
  Sense strand starting at position 3511 of SEQ ID NO: 588966
aggcucagaguuuggauau

SEQ ID NO: 901761 - RNA, 19 nt, Artificial Sequence
  Description of Artificial Sequence: Synthetic oligonucleotide
  Antisense strand to SEQ ID NO: 901760
auauccaaacucugagccu

SEQ ID NO: 901762 - RNA, 19 nt, Artificial Sequence
  Description of Artificial Sequence: Synthetic oligonucleotide
  Sense strand starting at position 3911 of SEQ ID NO: 588966
uaugguuagucuuuggacu

SEQ ID NO: 901763 - RNA, 19 nt, Artificial Sequence
  Description of Artificial Sequence: Synthetic oligonucleotide
  Antisense strand to SEQ ID NO: 901762
aguccaaagacuaaccaua

SEQ ID NO: 901764 - RNA, 19 nt, Artificial Sequence
  Description of Artificial Sequence: Synthetic oligonucleotide
  Sense strand starting at position 3912 of SEQ ID NO: 588966
augguuagucuuuggacuu

SEQ ID NO: 901765 - RNA, 19 nt, Artificial Sequence
  Description of Artificial Sequence: Synthetic oligonucleotide
  Antisense strand to SEQ ID NO: 901764
aaguccaaagacuaaccau

SEQ ID NO: 901766 - RNA, 19 nt, Artificial Sequence
  Description of Artificial Sequence: Synthetic oligonucleotide
  Sense strand starting at position 3963 of SEQ ID NO: 588966
acugaauugugugucuaua

SEQ ID NO: 901767 - RNA, 19 nt, Artificial Sequence
  Description of Artificial Sequence: Synthetic oligonucleotide
  Antisense strand to SEQ ID NO: 901766
uauagacacacaauucagu

SEQ ID NO: 901768 - RNA, 19 nt, Artificial Sequence
  Description of Artificial Sequence: Synthetic oligonucleotide
  Sense strand starting at position 3974 of SEQ ID NO: 588966
ugucuauaccaguauuauu

SEQ ID NO: 901769 - RNA, 19 nt, Artificial Sequence
  Description of Artificial Sequence: Synthetic oligonucleotide
  Antisense strand to SEQ ID NO: 901768
aauaauacugguauagaca

SEQ ID NO: 901770 - RNA, 19 nt, Artificial Sequence
  Description of Artificial Sequence: Synthetic oligonucleotide
  Sense strand starting at position 107 of SEQ ID NO: 588967
acgugcauucgucuccuua

SEQ ID NO: 901771 - RNA, 19 nt, Artificial Sequence
  Description of Artificial Sequence: Synthetic oligonucleotide
  Antisense strand to SEQ ID NO: 901770
uaaggagacgaaugcacgu

SEQ ID NO: 901772 - RNA, 19 nt, Artificial Sequence
  Description of Artificial Sequence: Synthetic oligonucleotide
  Sense strand starting at position 108 of SEQ ID NO: 588967
cgugcauucgucuccuuaa

SEQ ID NO: 901773 - RNA, 19 nt, Artificial Sequence
  Description of Artificial Sequence: Synthetic oligonucleotide
  Antisense strand to SEQ ID NO: 901772
uuaaggagacgaaugcacg

SEQ ID NO: 901774 - RNA, 19 nt, Artificial Sequence
  Description of Artificial Sequence: Synthetic oligonucleotide
  Sense strand starting at position 191 of SEQ ID NO: 588967
guuggcuguuauuuccaaa

SEQ ID NO: 901775 - RNA, 19 nt, Artificial Sequence
  Description of Artificial Sequence: Synthetic oligonucleotide
  Antisense strand to SEQ ID NO: 901774
uuuggaaauaacagccaac

SEQ ID NO: 901776 - RNA, 19 nt, Artificial Sequence
  Description of Artificial Sequence: Synthetic oligonucleotide
  Sense strand starting at position 194 of SEQ ID NO: 588967
ggcuguuauuuccaaagac

SEQ ID NO: 901777 - RNA, 19 nt, Artificial Sequence
  Description of Artificial Sequence: Synthetic oligonucleotide
  Antisense strand to SEQ ID NO: 901776
gucuuuggaaauaacagcc

SEQ ID NO: 901778 - RNA, 19 nt, Artificial Sequence
  Description of Artificial Sequence: Synthetic oligonucleotide
  Sense strand starting at position 226 of SEQ ID NO: 588967
ucuccauccuaucuagagu

SEQ ID NO: 901779 - RNA, 19 nt, Artificial Sequence
  Description of Artificial Sequence: Synthetic oligonucleotide
  Antisense strand to SEQ ID NO: 901778
acucuagauaggauggaga

SEQ ID NO: 901780 - RNA, 19 nt, Artificial Sequence
  Description of Artificial Sequence: Synthetic oligonucleotide
  Sense strand starting at position 267 of SEQ ID NO: 588967
agacuugggccaugaagac

SEQ ID NO: 901781 - RNA, 19 nt, Artificial Sequence
  Description of Artificial Sequence: Synthetic oligonucleotide
  Antisense strand to SEQ ID NO: 901780
gucuucauggcccaagucu

SEQ ID NO: 901782 - RNA, 19 nt, Artificial Sequence
  Description of Artificial Sequence: Synthetic oligonucleotide
  Sense strand starting at position 287 of SEQ ID NO: 588967
acagucacuccaugaugga

SEQ ID NO: 901783 - RNA, 19 nt, Artificial Sequence
  Description of Artificial Sequence: Synthetic oligonucleotide
  Antisense strand to SEQ ID NO: 901782
uccaucauggagugacugu

SEQ ID NO: 901784 - RNA, 19 nt, Artificial Sequence
  Description of Artificial Sequence: Synthetic oligonucleotide
  Sense strand starting at position 385 of SEQ ID NO: 588967
cucucuucuguccaaguca

SEQ ID NO: 901785 - RNA, 19 nt, Artificial Sequence
  Description of Artificial Sequence: Synthetic oligonucleotide
  Antisense strand to SEQ ID NO: 901784
ugacuuggacagaagagag

SEQ ID NO: 901786 - RNA, 19 nt, Artificial Sequence
  Description of Artificial Sequence: Synthetic oligonucleotide
  Sense strand starting at position 445 of SEQ ID NO: 588967
uaaggaacaguuuguggau

SEQ ID NO: 901787 - RNA, 19 nt, Artificial Sequence
  Description of Artificial Sequence: Synthetic oligonucleotide
  Antisense strand to SEQ ID NO: 901786
auccacaaacuguuccuua

SEQ ID NO: 901788 - RNA, 19 nt, Artificial Sequence
  Description of Artificial Sequence: Synthetic oligonucleotide
  Sense strand starting at position 446 of SEQ ID NO: 588967
aaggaacaguuuguggaua

SEQ ID NO: 901789 - RNA, 19 nt, Artificial Sequence
  Description of Artificial Sequence: Synthetic oligonucleotide
  Antisense strand to SEQ ID NO: 901788
uauccacaaacuguuccuu

SEQ ID NO: 901790 - RNA, 19 nt, Artificial Sequence
  Description of Artificial Sequence: Synthetic oligonucleotide
  Sense strand starting at position 451 of SEQ ID NO: 588967
acaguuuguggauaaagca

SEQ ID NO: 901791 - RNA, 19 nt, Artificial Sequence
  Description of Artificial Sequence: Synthetic oligonucleotide
  Antisense strand to SEQ ID NO: 901790
ugcuuuauccacaaacugu

SEQ ID NO: 901792 - RNA, 19 nt, Artificial Sequence
  Description of Artificial Sequence: Synthetic oligonucleotide
  Sense strand starting at position 496 of SEQ ID NO: 588967
gagguuaugcuuugagccu

SEQ ID NO: 901793 - RNA, 19 nt, Artificial Sequence
  Description of Artificial Sequence: Synthetic oligonucleotide
  Antisense strand to SEQ ID NO: 901792
aggcucaaagcauaaccuc

SEQ ID NO: 901794 - RNA, 19 nt, Artificial Sequence
  Description of Artificial Sequence: Synthetic oligonucleotide
  Sense strand starting at position 545 of SEQ ID NO: 588967
uauacauugcaguggauaa

SEQ ID NO: 901795 - RNA, 19 nt, Artificial Sequence
  Description of Artificial Sequence: Synthetic oligonucleotide
  Antisense strand to SEQ ID NO: 901794
uuauccacugcaauguaua

SEQ ID NO: 901796 - RNA, 19 nt, Artificial Sequence
  Description of Artificial Sequence: Synthetic oligonucleotide
  Sense strand starting at position 635 of SEQ ID NO: 588967
gcucucugacuuuggacaa

SEQ ID NO: 901797 - RNA, 19 nt, Artificial Sequence
  Description of Artificial Sequence: Synthetic oligonucleotide
  Antisense strand to SEQ ID NO: 901796
uuguccaaagucagagagc

SEQ ID NO: 901798 - RNA, 19 nt, Artificial Sequence
  Description of Artificial Sequence: Synthetic oligonucleotide
  Sense strand starting at position 861 of SEQ ID NO: 588967
uugaaugcaugcccaauau

SEQ ID NO: 901799 - RNA, 19 nt, Artificial Sequence
  Description of Artificial Sequence: Synthetic oligonucleotide
  Antisense strand to SEQ ID NO: 901798
auauugggcaugcauucaa

SEQ ID NO: 901800 - RNA, 19 nt, Artificial Sequence
  Description of Artificial Sequence: Synthetic oligonucleotide
  Sense strand starting at position 883 of SEQ ID NO: 588967
aaagguuugggcuauauau

SEQ ID NO: 901801 - RNA, 19 nt, Artificial Sequence
  Description of Artificial Sequence: Synthetic oligonucleotide
  Antisense strand to SEQ ID NO: 901800
auauauagcccaaaccuuu

SEQ ID NO: 901802 - RNA, 19 nt, Artificial Sequence
  Description of Artificial Sequence: Synthetic oligonucleotide
  Sense strand starting at position 885 of SEQ ID NO: 588967
agguuugggcuauauauuc

SEQ ID NO: 901803 - RNA, 19 nt, Artificial Sequence
  Description of Artificial Sequence: Synthetic oligonucleotide
  Antisense strand to SEQ ID NO: 901802
gaauauauagcccaaaccu

SEQ ID NO: 901804 - RNA, 19 nt, Artificial Sequence
  Description of Artificial Sequence: Synthetic oligonucleotide
  Sense strand starting at position 946 of SEQ ID NO: 588967
ccaucaaacuuugugagca

SEQ ID NO: 901805 - RNA, 19 nt, Artificial Sequence
  Description of Artificial Sequence: Synthetic oligonucleotide
  Antisense strand to SEQ ID NO: 901804
ugcucacaaaguuugaugg

SEQ ID NO: 901806 - RNA, 19 nt, Artificial Sequence
  Description of Artificial Sequence: Synthetic oligonucleotide
  Sense strand starting at position 954 of SEQ ID NO: 588967
cuuugugagcaggagcaaa

SEQ ID NO: 901807 - RNA, 19 nt, Artificial Sequence
  Description of Artificial Sequence: Synthetic oligonucleotide
  Antisense strand to SEQ ID NO: 901806
uuugcuccugcucacaaag

SEQ ID NO: 901808 - RNA, 19 nt, Artificial Sequence
  Description of Artificial Sequence: Synthetic oligonucleotide
  Sense strand starting at position 1039 of SEQ ID NO: 588967
uggagucucugugcuagaa

SEQ ID NO: 901809 - RNA, 19 nt, Artificial Sequence
  Description of Artificial Sequence: Synthetic oligonucleotide
  Antisense strand to SEQ ID NO: 901808
uucuagcacagagacucca

SEQ ID NO: 901810 - RNA, 19 nt, Artificial Sequence
  Description of Artificial Sequence: Synthetic oligonucleotide
  Sense strand starting at position 1043 of SEQ ID NO: 588967
gucucugugcuagaaacug

SEQ ID NO: 901811 - RNA, 19 nt, Artificial Sequence
  Description of Artificial Sequence: Synthetic oligonucleotide
  Antisense strand to SEQ ID NO: 901810
caguuucuagcacagagac

SEQ ID NO: 901812 - RNA, 19 nt, Artificial Sequence
  Description of Artificial Sequence: Synthetic oligonucleotide
  Sense strand starting at position 1185 of SEQ ID NO: 588967
ggucccaccucuccugaau

SEQ ID NO: 901813 - RNA, 19 nt, Artificial Sequence
  Description of Artificial Sequence: Synthetic oligonucleotide
  Antisense strand to SEQ ID NO: 901812
auucaggagaggugggacc

SEQ ID NO: 901814 - RNA, 19 nt, Artificial Sequence
  Description of Artificial Sequence: Synthetic oligonucleotide
  Sense strand starting at position 2567 of SEQ ID NO: 588967
ugcgaaguucugcagauau

SEQ ID NO: 901815 - RNA, 19 nt, Artificial Sequence
  Description of Artificial Sequence: Synthetic oligonucleotide
  Antisense strand to SEQ ID NO: 901814
auaucugcagaacuucgca

SEQ ID NO: 901816 - RNA, 19 nt, Artificial Sequence
  Description of Artificial Sequence: Synthetic oligonucleotide
  Sense strand starting at position 2671 of SEQ ID NO: 588967
gccuuuccucccugaggau

SEQ ID NO: 901817 - RNA, 19 nt, Artificial Sequence
  Description of Artificial Sequence: Synthetic oligonucleotide
  Antisense strand to SEQ ID NO: 901816
auccucagggaggaaaggc

SEQ ID NO: 901818 - RNA, 19 nt, Artificial Sequence
  Description of Artificial Sequence: Synthetic oligonucleotide
  Sense strand starting at position 2713 of SEQ ID NO: 588967
agucaaggucuugaccuaa

SEQ ID NO: 901819 - RNA, 19 nt, Artificial Sequence
  Description of Artificial Sequence: Synthetic oligonucleotide
  Antisense strand to SEQ ID NO: 901818
uuaggucaagaccuugacu

SEQ ID NO: 901820 - RNA, 19 nt, Artificial Sequence
  Description of Artificial Sequence: Synthetic oligonucleotide
  Sense strand starting at position 3334 of SEQ ID NO: 588967
agcugacucuggucaucuu

SEQ ID NO: 901821 - RNA, 19 nt, Artificial Sequence
  Description of Artificial Sequence: Synthetic oligonucleotide
  Antisense strand to SEQ ID NO: 901820
aagaugaccagagucagcu

SEQ ID NO: 901822 - RNA, 19 nt, Artificial Sequence
  Description of Artificial Sequence: Synthetic oligonucleotide
  Sense strand starting at position 3428 of SEQ ID NO: 588967
gagugauauaucuagcguc

SEQ ID NO: 901823 - RNA, 19 nt, Artificial Sequence
  Description of Artificial Sequence: Synthetic oligonucleotide
  Antisense strand to SEQ ID NO: 901822
gacgcuagauauaucacuc

SEQ ID NO: 901824 - RNA, 19 nt, Artificial Sequence
  Description of Artificial Sequence: Synthetic oligonucleotide
  Sense strand starting at position 3494 of SEQ ID NO: 588967
auccucaggcuguguugaa

SEQ ID NO: 901825 - RNA, 19 nt, Artificial Sequence
  Description of Artificial Sequence: Synthetic oligonucleotide
  Antisense strand to SEQ ID NO: 901824
uucaacacagccugaggau

SEQ ID NO: 901826 - RNA, 19 nt, Artificial Sequence
  Description of Artificial Sequence: Synthetic oligonucleotide
  Sense strand starting at position 3495 of SEQ ID NO: 588967
uccucaggcuguguugaaa

SEQ ID NO: 901827 - RNA, 19 nt, Artificial Sequence
  Description of Artificial Sequence: Synthetic oligonucleotide
  Antisense strand to SEQ ID NO: 901826
uuucaacacagccugagga

SEQ ID NO: 901828 - RNA, 19 nt, Artificial Sequence
  Description of Artificial Sequence: Synthetic oligonucleotide
  Sense strand starting at position 3540 of SEQ ID NO: 588967
ccaagaaauuuggacuuaa

SEQ ID NO: 901829 - RNA, 19 nt, Artificial Sequence
  Description of Artificial Sequence: Synthetic oligonucleotide
  Antisense strand to SEQ ID NO: 901828
uuaaguccaaauuucuugg

SEQ ID NO: 901830 - RNA, 19 nt, Artificial Sequence
  Description of Artificial Sequence: Synthetic oligonucleotide
  Sense strand starting at position 3550 of SEQ ID NO: 588967
uggacuuaauccuuuagac

SEQ ID NO: 901831 - RNA, 19 nt, Artificial Sequence
  Description of Artificial Sequence: Synthetic oligonucleotide
  Antisense strand to SEQ ID NO: 901830
gucuaaaggauuaagucca

SEQ ID NO: 901832 - RNA, 19 nt, Artificial Sequence
  Description of Artificial Sequence: Synthetic oligonucleotide
  Sense strand starting at position 3566 of SEQ ID NO: 588967
gacugagucauggaauguu

SEQ ID NO: 901833 - RNA, 19 nt, Artificial Sequence
  Description of Artificial Sequence: Synthetic oligonucleotide
  Antisense strand to SEQ ID NO: 901832
aacauuccaugacucaguc

SEQ ID NO: 901834 - RNA, 19 nt, Artificial Sequence
  Description of Artificial Sequence: Synthetic oligonucleotide
  Sense strand starting at position 3610 of SEQ ID NO: 588967
gggcuugcacuuuagaaag

SEQ ID NO: 901835 - RNA, 19 nt, Artificial Sequence
  Description of Artificial Sequence: Synthetic oligonucleotide
  Antisense strand to SEQ ID NO: 901834
cuuucuaaagugcaagccc

SEQ ID NO: 901836 - RNA, 19 nt, Artificial Sequence
  Description of Artificial Sequence: Synthetic oligonucleotide
  Sense strand starting at position 3624 of SEQ ID NO: 588967
gaaagauccugauuggguc

SEQ ID NO: 901837 - RNA, 19 nt, Artificial Sequence
  Description of Artificial Sequence: Synthetic oligonucleotide
  Antisense strand to SEQ ID NO: 901836
gacccaaucaggaucuuuc

SEQ ID NO: 901838 - RNA, 19 nt, Artificial Sequence
  Description of Artificial Sequence: Synthetic oligonucleotide
  Sense strand starting at position 3651 of SEQ ID NO: 588967
ggacuacauccuugcagga

SEQ ID NO: 901839 - RNA, 19 nt, Artificial Sequence
  Description of Artificial Sequence: Synthetic oligonucleotide
  Antisense strand to SEQ ID NO: 901838
uccugcaaggauguagucc

SEQ ID NO: 901840 - RNA, 19 nt, Artificial Sequence
  Description of Artificial Sequence: Synthetic oligonucleotide
  Sense strand starting at position 3737 of SEQ ID NO: 588967
auugccauuguugguuaau

SEQ ID NO: 901841 - RNA, 19 nt, Artificial Sequence
  Description of Artificial Sequence: Synthetic oligonucleotide
  Antisense strand to SEQ ID NO: 901840
auuaaccaacaauggcaau

SEQ ID NO: 901842 - RNA, 19 nt, Artificial Sequence
  Description of Artificial Sequence: Synthetic oligonucleotide
  Sense strand starting at position 3738 of SEQ ID NO: 588967
uugccauuguugguuaauc

SEQ ID NO: 901843 - RNA, 19 nt, Artificial Sequence
  Description of Artificial Sequence: Synthetic oligonucleotide
  Antisense strand to SEQ ID NO: 901842
gauuaaccaacaauggcaa

SEQ ID NO: 901844 - RNA, 19 nt, Artificial Sequence
  Description of Artificial Sequence: Synthetic oligonucleotide
  Sense strand starting at position 3812 of SEQ ID NO: 588967
gcaucagauuaggcucauu

SEQ ID NO: 901845 - RNA, 19 nt, Artificial Sequence
  Description of Artificial Sequence: Synthetic oligonucleotide
  Antisense strand to SEQ ID NO: 901844
aaugagccuaaucugaugc

SEQ ID NO: 901846 - RNA, 19 nt, Artificial Sequence
  Description of Artificial Sequence: Synthetic oligonucleotide
  Sense strand starting at position 3815 of SEQ ID NO: 588967
ucagauuaggcucauugua

SEQ ID NO: 901847 - RNA, 19 nt, Artificial Sequence
  Description of Artificial Sequence: Synthetic oligonucleotide
  Antisense strand to SEQ ID NO: 901846
uacaaugagccuaaucuga

SEQ ID NO: 901848 - RNA, 19 nt, Artificial Sequence
  Description of Artificial Sequence: Synthetic oligonucleotide
  Sense strand starting at position 3817 of SEQ ID NO: 588967
agauuaggcucauuguaaa

SEQ ID NO: 901849 - RNA, 19 nt, Artificial Sequence
  Description of Artificial Sequence: Synthetic oligonucleotide
  Antisense strand to SEQ ID NO: 901848
uuuacaaugagccuaaucu

SEQ ID NO: 901850 - RNA, 19 nt, Artificial Sequence
  Description of Artificial Sequence: Synthetic oligonucleotide
  Sense strand starting at position 44 of SEQ ID NO: 588968
acuuauauucguuauggga

SEQ ID NO: 901851 - RNA, 19 nt, Artificial Sequence
  Description of Artificial Sequence: Synthetic oligonucleotide
  Antisense strand to SEQ ID NO: 901850
ucccauaacgaauauaagu

SEQ ID NO: 901852 - RNA, 19 nt, Artificial Sequence
  Description of Artificial Sequence: Synthetic oligonucleotide
  Sense strand starting at position 128 of SEQ ID NO: 588968
cagugaucuguccauauga

SEQ ID NO: 901853 - RNA, 19 nt, Artificial Sequence
  Description of Artificial Sequence: Synthetic oligonucleotide
  Antisense strand to SEQ ID NO: 901852
ucauauggacagaucacug

SEQ ID NO: 901854 - RNA, 19 nt, Artificial Sequence
  Description of Artificial Sequence: Synthetic oligonucleotide
  Sense strand starting at position 159 of SEQ ID NO: 588968
gcugaagaggaauguacau

SEQ ID NO: 901855 - RNA, 19 nt, Artificial Sequence
  Description of Artificial Sequence: Synthetic oligonucleotide
  Antisense strand to SEQ ID NO: 901854
auguacauuccucuucagc

SEQ ID NO: 901856 - RNA, 19 nt, Artificial Sequence
  Description of Artificial Sequence: Synthetic oligonucleotide
  Sense strand starting at position 380 of SEQ ID NO: 588968
acgugcauucgucuccuua

SEQ ID NO: 901857 - RNA, 19 nt, Artificial Sequence
  Description of Artificial Sequence: Synthetic oligonucleotide
  Antisense strand to SEQ ID NO: 901856
uaaggagacgaaugcacgu

SEQ ID NO: 901858 - RNA, 19 nt, Artificial Sequence
  Description of Artificial Sequence: Synthetic oligonucleotide
  Sense strand starting at position 381 of SEQ ID NO: 588968
cgugcauucgucuccuuaa

SEQ ID NO: 901859 - RNA, 19 nt, Artificial Sequence
  Description of Artificial Sequence: Synthetic oligonucleotide
  Antisense strand to SEQ ID NO: 901858
uuaaggagacgaaugcacg

SEQ ID NO: 901860 - RNA, 19 nt, Artificial Sequence
  Description of Artificial Sequence: Synthetic oligonucleotide
  Sense strand starting at position 464 of SEQ ID NO: 588968
guuggcuguuauuuccaaa

SEQ ID NO: 901861 - RNA, 19 nt, Artificial Sequence
  Description of Artificial Sequence: Synthetic oligonucleotide
  Antisense strand to SEQ ID NO: 901860
uuuggaaauaacagccaac

SEQ ID NO: 901862 - RNA, 19 nt, Artificial Sequence
  Description of Artificial Sequence: Synthetic oligonucleotide
  Sense strand starting at position 467 of SEQ ID NO: 588968
ggcuguuauuuccaaagac

SEQ ID NO: 901863 - RNA, 19 nt, Artificial Sequence
  Description of Artificial Sequence: Synthetic oligonucleotide
  Antisense strand to SEQ ID NO: 901862
gucuuuggaaauaacagcc

SEQ ID NO: 901864 - RNA, 19 nt, Artificial Sequence
  Description of Artificial Sequence: Synthetic oligonucleotide
  Sense strand starting at position 499 of SEQ ID NO: 588968
ucuccauccuaucuagagu

SEQ ID NO: 901865 - RNA, 19 nt, Artificial Sequence
  Description of Artificial Sequence: Synthetic oligonucleotide
  Antisense strand to SEQ ID NO: 901864
acucuagauaggauggaga

SEQ ID NO: 901866 - RNA, 19 nt, Artificial Sequence
  Description of Artificial Sequence: Synthetic oligonucleotide
  Sense strand starting at position 540 of SEQ ID NO: 588968
agacuugggccaugaagac

SEQ ID NO: 901867 - RNA, 19 nt, Artificial Sequence
  Description of Artificial Sequence: Synthetic oligonucleotide
  Antisense strand to SEQ ID NO: 901866
gucuucauggcccaagucu

SEQ ID NO: 901868 - RNA, 19 nt, Artificial Sequence
  Description of Artificial Sequence: Synthetic oligonucleotide
  Sense strand starting at position 560 of SEQ ID NO: 588968
acagucacuccaugaugga

SEQ ID NO: 901869 - RNA, 19 nt, Artificial Sequence
  Description of Artificial Sequence: Synthetic oligonucleotide
  Antisense strand to SEQ ID NO: 901868
uccaucauggagugacugu

SEQ ID NO: 901870 - RNA, 19 nt, Artificial Sequence
  Description of Artificial Sequence: Synthetic oligonucleotide
  Sense strand starting at position 658 of SEQ ID NO: 588968
cucucuucuguccaaguca

SEQ ID NO: 901871 - RNA, 19 nt, Artificial Sequence
  Description of Artificial Sequence: Synthetic oligonucleotide
  Antisense strand to SEQ ID NO: 901870
ugacuuggacagaagagag

SEQ ID NO: 901872 - RNA, 19 nt, Artificial Sequence
  Description of Artificial Sequence: Synthetic oligonucleotide
  Sense strand starting at position 718 of SEQ ID NO: 588968
uaaggaacaguuuguggau

SEQ ID NO: 901873 - RNA, 19 nt, Artificial Sequence
  Description of Artificial Sequence: Synthetic oligonucleotide
  Antisense strand to SEQ ID NO: 901872
auccacaaacuguuccuua

SEQ ID NO: 901874 - RNA, 19 nt, Artificial Sequence
  Description of Artificial Sequence: Synthetic oligonucleotide
  Sense strand starting at position 719 of SEQ ID NO: 588968
aaggaacaguuuguggaua

SEQ ID NO: 901875 - RNA, 19 nt, Artificial Sequence
  Description of Artificial Sequence: Synthetic oligonucleotide
  Antisense strand to SEQ ID NO: 901874
uauccacaaacuguuccuu

SEQ ID NO: 901876 - RNA, 19 nt, Artificial Sequence
  Description of Artificial Sequence: Synthetic oligonucleotide
  Sense strand starting at position 724 of SEQ ID NO: 588968
acaguuuguggauaaagca

SEQ ID NO: 901877 - RNA, 19 nt, Artificial Sequence
  Description of Artificial Sequence: Synthetic oligonucleotide
  Antisense strand to SEQ ID NO: 901876
ugcuuuauccacaaacugu

SEQ ID NO: 901878 - RNA, 19 nt, Artificial Sequence
  Description of Artificial Sequence: Synthetic oligonucleotide
  Sense strand starting at position 769 of SEQ ID NO: 588968
gagguuaugcuuugagccu

SEQ ID NO: 901879 - RNA, 19 nt, Artificial Sequence
  Description of Artificial Sequence: Synthetic oligonucleotide
  Antisense strand to SEQ ID NO: 901878
aggcucaaagcauaaccuc

SEQ ID NO: 901880 - RNA, 19 nt, Artificial Sequence
  Description of Artificial Sequence: Synthetic oligonucleotide
  Sense strand starting at position 818 of SEQ ID NO: 588968
uauacauugcaguggauaa

SEQ ID NO: 901881 - RNA, 19 nt, Artificial Sequence
  Description of Artificial Sequence: Synthetic oligonucleotide
  Antisense strand to SEQ ID NO: 901880
uuauccacugcaauguaua

SEQ ID NO: 901882 - RNA, 19 nt, Artificial Sequence
  Description of Artificial Sequence: Synthetic oligonucleotide
  Sense strand starting at position 908 of SEQ ID NO: 588968
gcucucugacuuuggacaa

SEQ ID NO: 901883 - RNA, 19 nt, Artificial Sequence
  Description of Artificial Sequence: Synthetic oligonucleotide
  Antisense strand to SEQ ID NO: 901882
uuguccaaagucagagagc

SEQ ID NO: 901884 - RNA, 19 nt, Artificial Sequence
  Description of Artificial Sequence: Synthetic oligonucleotide
  Sense strand starting at position 1134 of SEQ ID NO: 588968
uugaaugcaugcccaauau

SEQ ID NO: 901885 - RNA, 19 nt, Artificial Sequence
  Description of Artificial Sequence: Synthetic oligonucleotide
  Antisense strand to SEQ ID NO: 901884
auauugggcaugcauucaa

SEQ ID NO: 901886 - RNA, 19 nt, Artificial Sequence
  Description of Artificial Sequence: Synthetic oligonucleotide
  Sense strand starting at position 1156 of SEQ ID NO: 588968
aaagguuugggcuauauau

SEQ ID NO: 901887 - RNA, 19 nt, Artificial Sequence
  Description of Artificial Sequence: Synthetic oligonucleotide
  Antisense strand to SEQ ID NO: 901886
auauauagcccaaaccuuu

SEQ ID NO: 901888 - RNA, 19 nt, Artificial Sequence
  Description of Artificial Sequence: Synthetic oligonucleotide
  Sense strand starting at position 1158 of SEQ ID NO: 588968
agguuugggcuauauauuc

SEQ ID NO: 901889 - RNA, 19 nt, Artificial Sequence
  Description of Artificial Sequence: Synthetic oligonucleotide
  Antisense strand to SEQ ID NO: 901888
gaauauauagcccaaaccu

SEQ ID NO: 901890 - RNA, 19 nt, Artificial Sequence
  Description of Artificial Sequence: Synthetic oligonucleotide
  Sense strand starting at position 1219 of SEQ ID NO: 588968
ccaucaaacuuugugagca

SEQ ID NO: 901891 - RNA, 19 nt, Artificial Sequence
  Description of Artificial Sequence: Synthetic oligonucleotide
  Antisense strand to SEQ ID NO: 901890
ugcucacaaaguuugaugg

SEQ ID NO: 901892 - RNA, 19 nt, Artificial Sequence
  Description of Artificial Sequence: Synthetic oligonucleotide
  Sense strand starting at position 1227 of SEQ ID NO: 588968
cuuugugagcaggagcaaa

SEQ ID NO: 901893 - RNA, 19 nt, Artificial Sequence
  Description of Artificial Sequence: Synthetic oligonucleotide
  Antisense strand to SEQ ID NO: 901892
uuugcuccugcucacaaag

SEQ ID NO: 901894 - RNA, 19 nt, Artificial Sequence
  Description of Artificial Sequence: Synthetic oligonucleotide
  Sense strand starting at position 1312 of SEQ ID NO: 588968
uggagucucugugcuagaa

SEQ ID NO: 901895 - RNA, 19 nt, Artificial Sequence
  Description of Artificial Sequence: Synthetic oligonucleotide
  Antisense strand to SEQ ID NO: 901894
uucuagcacagagacucca

SEQ ID NO: 901896 - RNA, 19 nt, Artificial Sequence
  Description of Artificial Sequence: Synthetic oligonucleotide
  Sense strand starting at position 1316 of SEQ ID NO: 588968
gucucugugcuagaaacug

SEQ ID NO: 901897 - RNA, 19 nt, Artificial Sequence
  Description of Artificial Sequence: Synthetic oligonucleotide
  Antisense strand to SEQ ID NO: 901896
caguuucuagcacagagac

SEQ ID NO: 901898 - RNA, 19 nt, Artificial Sequence
  Description of Artificial Sequence: Synthetic oligonucleotide
  Sense strand starting at position 1458 of SEQ ID NO: 588968
ggucccaccucuccugaau

SEQ ID NO: 901899 - RNA, 19 nt, Artificial Sequence
  Description of Artificial Sequence: Synthetic oligonucleotide
  Antisense strand to SEQ ID NO: 901898
auucaggagaggugggacc

SEQ ID NO: 901900 - RNA, 19 nt, Artificial Sequence
  Description of Artificial Sequence: Synthetic oligonucleotide
  Sense strand starting at position 2839 of SEQ ID NO: 588968
uugcgaaguucugcagaua

SEQ ID NO: 901901 - RNA, 19 nt, Artificial Sequence
  Description of Artificial Sequence: Synthetic oligonucleotide
  Antisense strand to SEQ ID NO: 901900
uaucugcagaacuucgcaa

SEQ ID NO: 901902 - RNA, 19 nt, Artificial Sequence
  Description of Artificial Sequence: Synthetic oligonucleotide
  Sense strand starting at position 2840 of SEQ ID NO: 588968
ugcgaaguucugcagauau

SEQ ID NO: 901903 - RNA, 19 nt, Artificial Sequence
  Description of Artificial Sequence: Synthetic oligonucleotide
  Antisense strand to SEQ ID NO: 901902
auaucugcagaacuucgca

SEQ ID NO: 901904 - RNA, 19 nt, Artificial Sequence
  Description of Artificial Sequence: Synthetic oligonucleotide
  Sense strand starting at position 2944 of SEQ ID NO: 588968
gccuuuccucccugaggau

SEQ ID NO: 901905 - RNA, 19 nt, Artificial Sequence
  Description of Artificial Sequence: Synthetic oligonucleotide
  Antisense strand to SEQ ID NO: 901904
auccucagggaggaaaggc

SEQ ID NO: 901906 - RNA, 19 nt, Artificial Sequence
  Description of Artificial Sequence: Synthetic oligonucleotide
  Sense strand starting at position 2986 of SEQ ID NO: 588968
agucaaggucuugaccuaa

SEQ ID NO: 901907 - RNA, 19 nt, Artificial Sequence
  Description of Artificial Sequence: Synthetic oligonucleotide
  Antisense strand to SEQ ID NO: 901906
uuaggucaagaccuugacu

SEQ ID NO: 901908 - RNA, 19 nt, Artificial Sequence
  Description of Artificial Sequence: Synthetic oligonucleotide
  Sense strand starting at position 3447 of SEQ ID NO: 588968
cccaaauucugggauuacu

SEQ ID NO: 901909 - RNA, 19 nt, Artificial Sequence
  Description of Artificial Sequence: Synthetic oligonucleotide
  Antisense strand to SEQ ID NO: 901908
aguaaucccagaauuuggg

SEQ ID NO: 901910 - RNA, 19 nt, Artificial Sequence
  Description of Artificial Sequence: Synthetic oligonucleotide
  Sense strand starting at position 3607 of SEQ ID NO: 588968
agcugacucuggucaucuu

SEQ ID NO: 901911 - RNA, 19 nt, Artificial Sequence
  Description of Artificial Sequence: Synthetic oligonucleotide
  Antisense strand to SEQ ID NO: 901910
aagaugaccagagucagcu

SEQ ID NO: 901912 - RNA, 19 nt, Artificial Sequence
  Description of Artificial Sequence: Synthetic oligonucleotide
  Sense strand starting at position 3701 of SEQ ID NO: 588968
gagugauauaucuagcguc

SEQ ID NO: 901913 - RNA, 19 nt, Artificial Sequence
  Description of Artificial Sequence: Synthetic oligonucleotide
  Antisense strand to SEQ ID NO: 901912
gacgcuagauauaucacuc

SEQ ID NO: 901914 - RNA, 19 nt, Artificial Sequence
  Description of Artificial Sequence: Synthetic oligonucleotide
  Sense strand starting at position 3767 of SEQ ID NO: 588968
auccucaggcuguguugaa

SEQ ID NO: 901915 - RNA, 19 nt, Artificial Sequence
  Description of Artificial Sequence: Synthetic oligonucleotide
  Antisense strand to SEQ ID NO: 901914
uucaacacagccugaggau

SEQ ID NO: 901916 - RNA, 19 nt, Artificial Sequence
  Description of Artificial Sequence: Synthetic oligonucleotide
  Sense strand starting at position 3768 of SEQ ID NO: 588968
uccucaggcuguguugaaa

SEQ ID NO: 901917 - RNA, 19 nt, Artificial Sequence
  Description of Artificial Sequence: Synthetic oligonucleotide
  Antisense strand to SEQ ID NO: 901916
uuucaacacagccugagga

SEQ ID NO: 901918 - RNA, 19 nt, Artificial Sequence
  Description of Artificial Sequence: Synthetic oligonucleotide
  Sense strand starting at position 3813 of SEQ ID NO: 588968
ccaagaaauuuggacuuaa

SEQ ID NO: 901919 - RNA, 19 nt, Artificial Sequence
  Description of Artificial Sequence: Synthetic oligonucleotide
  Antisense strand to SEQ ID NO: 901918
uuaaguccaaauuucuugg

SEQ ID NO: 901920 - RNA, 19 nt, Artificial Sequence
  Description of Artificial Sequence: Synthetic oligonucleotide
  Sense strand starting at position 3823 of SEQ ID NO: 588968
uggacuuaauccuuuagac

SEQ ID NO: 901921 - RNA, 19 nt, Artificial Sequence
  Description of Artificial Sequence: Synthetic oligonucleotide
  Antisense strand to SEQ ID NO: 901920
gucuaaaggauuaagucca

SEQ ID NO: 901922 - RNA, 19 nt, Artificial Sequence
  Description of Artificial Sequence: Synthetic oligonucleotide
  Sense strand starting at position 3839 of SEQ ID NO: 588968
gacugagucauggaauguu

SEQ ID NO: 901923 - RNA, 19 nt, Artificial Sequence
  Description of Artificial Sequence: Synthetic oligonucleotide
  Antisense strand to SEQ ID NO: 901922
aacauuccaugacucaguc

SEQ ID NO: 901924 - RNA, 19 nt, Artificial Sequence
  Description of Artificial Sequence: Synthetic oligonucleotide
  Sense strand starting at position 3883 of SEQ ID NO: 588968
gggcuugcacuuuagaaag

SEQ ID NO: 901925 - RNA, 19 nt, Artificial Sequence
  Description of Artificial Sequence: Synthetic oligonucleotide
  Antisense strand to SEQ ID NO: 901924
cuuucuaaagugcaagccc

SEQ ID NO: 901926 - RNA, 19 nt, Artificial Sequence
  Description of Artificial Sequence: Synthetic oligonucleotide
  Sense strand starting at position 3897 of SEQ ID NO: 588968
gaaagauccugauuggguc

SEQ ID NO: 901927 - RNA, 19 nt, Artificial Sequence
  Description of Artificial Sequence: Synthetic oligonucleotide
  Antisense strand to SEQ ID NO: 901926
gacccaaucaggaucuuuc

SEQ ID NO: 901928 - RNA, 19 nt, Artificial Sequence
  Description of Artificial Sequence: Synthetic oligonucleotide
  Sense strand starting at position 3924 of SEQ ID NO: 588968
ggacuacauccuugcagga

SEQ ID NO: 901929 - RNA, 19 nt, Artificial Sequence
  Description of Artificial Sequence: Synthetic oligonucleotide
  Antisense strand to SEQ ID NO: 901928
uccugcaaggauguagucc

SEQ ID NO: 901930 - RNA, 19 nt, Artificial Sequence
  Description of Artificial Sequence: Synthetic oligonucleotide
  Sense strand starting at position 270 of SEQ ID NO: 588969
gugaauauaugcuugcaaa

SEQ ID NO: 901931 - RNA, 19 nt, Artificial Sequence
  Description of Artificial Sequence: Synthetic oligonucleotide
  Antisense strand to SEQ ID NO: 901930
uuugcaagcauauauucac

SEQ ID NO: 901932 - RNA, 19 nt, Artificial Sequence
  Description of Artificial Sequence: Synthetic oligonucleotide
  Sense strand starting at position 271 of SEQ ID NO: 588969
ugaauauaugcuugcaaac

SEQ ID NO: 901933 - RNA, 19 nt, Artificial Sequence
  Description of Artificial Sequence: Synthetic oligonucleotide
  Antisense strand to SEQ ID NO: 901932
guuugcaagcauauauuca

SEQ ID NO: 901934 - RNA, 19 nt, Artificial Sequence
  Description of Artificial Sequence: Synthetic oligonucleotide
  Sense strand starting at position 350 of SEQ ID NO: 588969
uggcauucuugcccauaga

SEQ ID NO: 901935 - RNA, 19 nt, Artificial Sequence
  Description of Artificial Sequence: Synthetic oligonucleotide
  Antisense strand to SEQ ID NO: 901934
ucuaugggcaagaaugcca

SEQ ID NO: 901936 - RNA, 19 nt, Artificial Sequence
  Description of Artificial Sequence: Synthetic oligonucleotide
  Sense strand starting at position 351 of SEQ ID NO: 588969
ggcauucuugcccauagag

SEQ ID NO: 901937 - RNA, 19 nt, Artificial Sequence
  Description of Artificial Sequence: Synthetic oligonucleotide
  Antisense strand to SEQ ID NO: 901936
cucuaugggcaagaaugcc

SEQ ID NO: 901938 - RNA, 19 nt, Artificial Sequence
  Description of Artificial Sequence: Synthetic oligonucleotide
  Sense strand starting at position 498 of SEQ ID NO: 588969
uugggcugucagugaagga

SEQ ID NO: 901939 - RNA, 19 nt, Artificial Sequence
  Description of Artificial Sequence: Synthetic oligonucleotide
  Antisense strand to SEQ ID NO: 901938
uccuucacugacagcccaa

SEQ ID NO: 901940 - RNA, 19 nt, Artificial Sequence
  Description of Artificial Sequence: Synthetic oligonucleotide
  Sense strand starting at position 588 of SEQ ID NO: 588969
ggagugagggcauguuagu

SEQ ID NO: 901941 - RNA, 19 nt, Artificial Sequence
  Description of Artificial Sequence: Synthetic oligonucleotide
  Antisense strand to SEQ ID NO: 901940
acuaacaugcccucacucc

SEQ ID NO: 901942 - RNA, 19 nt, Artificial Sequence
  Description of Artificial Sequence: Synthetic oligonucleotide
  Sense strand starting at position 595 of SEQ ID NO: 588969
gggcauguuaguggagaaa

SEQ ID NO: 901943 - RNA, 19 nt, Artificial Sequence
  Description of Artificial Sequence: Synthetic oligonucleotide
  Antisense strand to SEQ ID NO: 901942
uuucuccacuaacaugccc

SEQ ID NO: 901944 - RNA, 19 nt, Artificial Sequence
  Description of Artificial Sequence: Synthetic oligonucleotide
  Sense strand starting at position 668 of SEQ ID NO: 588969
gcugaauggcgagauggua

SEQ ID NO: 901945 - RNA, 19 nt, Artificial Sequence
  Description of Artificial Sequence: Synthetic oligonucleotide
  Antisense strand to SEQ ID NO: 901944
uaccaucucgccauucagc

SEQ ID NO: 901946 - RNA, 19 nt, Artificial Sequence
  Description of Artificial Sequence: Synthetic oligonucleotide
  Sense strand starting at position 705 of SEQ ID NO: 588969
gguagauggaugcguagau

SEQ ID NO: 901947 - RNA, 19 nt, Artificial Sequence
  Description of Artificial Sequence: Synthetic oligonucleotide
  Antisense strand to SEQ ID NO: 901946
aucuacgcauccaucuacc

SEQ ID NO: 901948 - RNA, 19 nt, Artificial Sequence
  Description of Artificial Sequence: Synthetic oligonucleotide
  Sense strand starting at position 706 of SEQ ID NO: 588969
guagauggaugcguagaua

SEQ ID NO: 901949 - RNA, 19 nt, Artificial Sequence
  Description of Artificial Sequence: Synthetic oligonucleotide
  Antisense strand to SEQ ID NO: 901948
uaucuacgcauccaucuac

SEQ ID NO: 901950 - RNA, 19 nt, Artificial Sequence
  Description of Artificial Sequence: Synthetic oligonucleotide
  Sense strand starting at position 1093 of SEQ ID NO: 588969
cggauaagaucacccaaug

SEQ ID NO: 901951 - RNA, 19 nt, Artificial Sequence
  Description of Artificial Sequence: Synthetic oligonucleotide
  Antisense strand to SEQ ID NO: 901950
cauugggugaucuuauccg

SEQ ID NO: 901952 - RNA, 19 nt, Artificial Sequence
  Description of Artificial Sequence: Synthetic oligonucleotide
  Sense strand starting at position 1385 of SEQ ID NO: 588969
uggguagagcucgaagaga

SEQ ID NO: 901953 - RNA, 19 nt, Artificial Sequence
  Description of Artificial Sequence: Synthetic oligonucleotide
  Antisense strand to SEQ ID NO: 901952
ucucuucgagcucuaccca

SEQ ID NO: 901954 - RNA, 19 nt, Artificial Sequence
  Description of Artificial Sequence: Synthetic oligonucleotide
  Sense strand starting at position 1445 of SEQ ID NO: 588969
uugauuagcagcugagaaa

SEQ ID NO: 901955 - RNA, 19 nt, Artificial Sequence
  Description of Artificial Sequence: Synthetic oligonucleotide
  Antisense strand to SEQ ID NO: 901954
uuucucagcugcuaaucaa

SEQ ID NO: 901956 - RNA, 19 nt, Artificial Sequence
  Description of Artificial Sequence: Synthetic oligonucleotide
  Sense strand starting at position 1478 of SEQ ID NO: 588969
aggguuuauccucaacuca

SEQ ID NO: 901957 - RNA, 19 nt, Artificial Sequence
  Description of Artificial Sequence: Synthetic oligonucleotide
  Antisense strand to SEQ ID NO: 901956
ugaguugaggauaaacccu

SEQ ID NO: 901958 - RNA, 19 nt, Artificial Sequence
  Description of Artificial Sequence: Synthetic oligonucleotide
  Sense strand starting at position 2036 of SEQ ID NO: 588969
uuuaaaugcccuugacgga

SEQ ID NO: 901959 - RNA, 19 nt, Artificial Sequence
  Description of Artificial Sequence: Synthetic oligonucleotide
  Antisense strand to SEQ ID NO: 901958
uccgucaagggcauuuaaa

SEQ ID NO: 901960 - RNA, 19 nt, Artificial Sequence
  Description of Artificial Sequence: Synthetic oligonucleotide
  Sense strand starting at position 2120 of SEQ ID NO: 588969
accagcauuugucucugau

SEQ ID NO: 901961 - RNA, 19 nt, Artificial Sequence
  Description of Artificial Sequence: Synthetic oligonucleotide
  Antisense strand to SEQ ID NO: 901960
aucagagacaaaugcuggu

SEQ ID NO: 901962 - RNA, 19 nt, Artificial Sequence
  Description of Artificial Sequence: Synthetic oligonucleotide
  Sense strand starting at position 2261 of SEQ ID NO: 588969
uggaauaggugggaugaca

SEQ ID NO: 901963 - RNA, 19 nt, Artificial Sequence
  Description of Artificial Sequence: Synthetic oligonucleotide
  Antisense strand to SEQ ID NO: 901962
ugucaucccaccuauucca

SEQ ID NO: 901964 - RNA, 19 nt, Artificial Sequence
  Description of Artificial Sequence: Synthetic oligonucleotide
  Sense strand starting at position 2893 of SEQ ID NO: 588969
guguuucuucccucgucua

SEQ ID NO: 901965 - RNA, 19 nt, Artificial Sequence
  Description of Artificial Sequence: Synthetic oligonucleotide
  Antisense strand to SEQ ID NO: 901964
uagacgagggaagaaacac

SEQ ID NO: 901966 - RNA, 19 nt, Artificial Sequence
  Description of Artificial Sequence: Synthetic oligonucleotide
  Sense strand starting at position 2929 of SEQ ID NO: 588969
gcuggccuuccggaaauua

SEQ ID NO: 901967 - RNA, 19 nt, Artificial Sequence
  Description of Artificial Sequence: Synthetic oligonucleotide
  Antisense strand to SEQ ID NO: 901966
uaauuuccggaaggccagc

SEQ ID NO: 901968 - RNA, 19 nt, Artificial Sequence
  Description of Artificial Sequence: Synthetic oligonucleotide
  Sense strand starting at position 2947 of SEQ ID NO: 588969
accuucccucguuguaaga

SEQ ID NO: 901969 - RNA, 19 nt, Artificial Sequence
  Description of Artificial Sequence: Synthetic oligonucleotide
  Antisense strand to SEQ ID NO: 901968
ucuuacaacgagggaaggu

SEQ ID NO: 901970 - RNA, 19 nt, Artificial Sequence
  Description of Artificial Sequence: Synthetic oligonucleotide
  Sense strand starting at position 3052 of SEQ ID NO: 588969
cucucuuucccuggauuga

SEQ ID NO: 901971 - RNA, 19 nt, Artificial Sequence
  Description of Artificial Sequence: Synthetic oligonucleotide
  Antisense strand to SEQ ID NO: 901970
ucaauccagggaaagagag

SEQ ID NO: 901972 - RNA, 19 nt, Artificial Sequence
  Description of Artificial Sequence: Synthetic oligonucleotide
  Sense strand starting at position 3053 of SEQ ID NO: 588969
ucucuuucccuggauugau

SEQ ID NO: 901973 - RNA, 19 nt, Artificial Sequence
  Description of Artificial Sequence: Synthetic oligonucleotide
  Antisense strand to SEQ ID NO: 901972
aucaauccagggaaagaga

SEQ ID NO: 901974 - RNA, 19 nt, Artificial Sequence
  Description of Artificial Sequence: Synthetic oligonucleotide
  Sense strand starting at position 3074 of SEQ ID NO: 588969
auugauuuguuguuagcaa

SEQ ID NO: 901975 - RNA, 19 nt, Artificial Sequence
  Description of Artificial Sequence: Synthetic oligonucleotide
  Antisense strand to SEQ ID NO: 901974
uugcuaacaacaaaucaau

SEQ ID NO: 901976 - RNA, 19 nt, Artificial Sequence
  Description of Artificial Sequence: Synthetic oligonucleotide
  Sense strand starting at position 3165 of SEQ ID NO: 588969
accuguauagucugcugaa

SEQ ID NO: 901977 - RNA, 19 nt, Artificial Sequence
  Description of Artificial Sequence: Synthetic oligonucleotide
  Antisense strand to SEQ ID NO: 901976
uucagcagacuauacaggu

SEQ ID NO: 901978 - RNA, 19 nt, Artificial Sequence
  Description of Artificial Sequence: Synthetic oligonucleotide
  Sense strand starting at position 3166 of SEQ ID NO: 588969
ccuguauagucugcugaaa

SEQ ID NO: 901979 - RNA, 19 nt, Artificial Sequence
  Description of Artificial Sequence: Synthetic oligonucleotide
  Antisense strand to SEQ ID NO: 901978
uuucagcagacuauacagg

SEQ ID NO: 901980 - RNA, 19 nt, Artificial Sequence
  Description of Artificial Sequence: Synthetic oligonucleotide
  Sense strand starting at position 3227 of SEQ ID NO: 588969
ggauauucucuugagcccu

SEQ ID NO: 901981 - RNA, 19 nt, Artificial Sequence
  Description of Artificial Sequence: Synthetic oligonucleotide
  Antisense strand to SEQ ID NO: 901980
agggcucaagagaauaucc

SEQ ID NO: 901982 - RNA, 19 nt, Artificial Sequence
  Description of Artificial Sequence: Synthetic oligonucleotide
  Sense strand starting at position 3299 of SEQ ID NO: 588969
cugacugccuguccuagaa

SEQ ID NO: 901983 - RNA, 19 nt, Artificial Sequence
  Description of Artificial Sequence: Synthetic oligonucleotide
  Antisense strand to SEQ ID NO: 901982
uucuaggacaggcagucag

SEQ ID NO: 901984 - RNA, 19 nt, Artificial Sequence
  Description of Artificial Sequence: Synthetic oligonucleotide
  Sense strand starting at position 3370 of SEQ ID NO: 588969
ugucaugucugugcgauuu

SEQ ID NO: 901985 - RNA, 19 nt, Artificial Sequence
  Description of Artificial Sequence: Synthetic oligonucleotide
  Antisense strand to SEQ ID NO: 901984
aaaucgcacagacaugaca

SEQ ID NO: 901986 - RNA, 19 nt, Artificial Sequence
  Description of Artificial Sequence: Synthetic oligonucleotide
  Sense strand starting at position 3382 of SEQ ID NO: 588969
gcgauuugucccuguccua

SEQ ID NO: 901987 - RNA, 19 nt, Artificial Sequence
  Description of Artificial Sequence: Synthetic oligonucleotide
  Antisense strand to SEQ ID NO: 901986
uaggacagggacaaaucgc

SEQ ID NO: 901988 - RNA, 19 nt, Artificial Sequence
  Description of Artificial Sequence: Synthetic oligonucleotide
  Sense strand starting at position 3394 of SEQ ID NO: 588969
uguccuacucauggacagu

SEQ ID NO: 901989 - RNA, 19 nt, Artificial Sequence
  Description of Artificial Sequence: Synthetic oligonucleotide
  Antisense strand to SEQ ID NO: 901988
acuguccaugaguaggaca

SEQ ID NO: 901990 - RNA, 19 nt, Artificial Sequence
  Description of Artificial Sequence: Synthetic oligonucleotide
  Sense strand starting at position 3432 of SEQ ID NO: 588969
ugguguccaguguaguauu

SEQ ID NO: 901991 - RNA, 19 nt, Artificial Sequence
  Description of Artificial Sequence: Synthetic oligonucleotide
  Antisense strand to SEQ ID NO: 901990
aauacuacacuggacacca

SEQ ID NO: 901992 - RNA, 19 nt, Artificial Sequence
  Description of Artificial Sequence: Synthetic oligonucleotide
  Sense strand starting at position 3443 of SEQ ID NO: 588969
guaguauuccugcaccuuu

SEQ ID NO: 901993 - RNA, 19 nt, Artificial Sequence
  Description of Artificial Sequence: Synthetic oligonucleotide
  Antisense strand to SEQ ID NO: 901992
aaaggugcaggaauacuac

SEQ ID NO: 901994 - RNA, 19 nt, Artificial Sequence
  Description of Artificial Sequence: Synthetic oligonucleotide
  Sense strand starting at position 3458 of SEQ ID NO: 588969
cuuuguucuccuggaaauu

SEQ ID NO: 901995 - RNA, 19 nt, Artificial Sequence
  Description of Artificial Sequence: Synthetic oligonucleotide
  Antisense strand to SEQ ID NO: 901994
aauuuccaggagaacaaag

SEQ ID NO: 901996 - RNA, 19 nt, Artificial Sequence
  Description of Artificial Sequence: Synthetic oligonucleotide
  Sense strand starting at position 3459 of SEQ ID NO: 588969
uuuguucuccuggaaauua

SEQ ID NO: 901997 - RNA, 19 nt, Artificial Sequence
  Description of Artificial Sequence: Synthetic oligonucleotide
  Antisense strand to SEQ ID NO: 901996
uaauuuccaggagaacaaa

SEQ ID NO: 901998 - RNA, 19 nt, Artificial Sequence
  Description of Artificial Sequence: Synthetic oligonucleotide
  Sense strand starting at position 3654 of SEQ ID NO: 588969
caaugaaacgucugacuug

SEQ ID NO: 901999 - RNA, 19 nt, Artificial Sequence
  Description of Artificial Sequence: Synthetic oligonucleotide
  Antisense strand to SEQ ID NO: 901998
caagucagacguuucauug

SEQ ID NO: 902000 - RNA, 19 nt, Artificial Sequence
  Description of Artificial Sequence: Synthetic oligonucleotide
  Sense strand starting at position 3657 of SEQ ID NO: 588969
ugaaacgucugacuugaua

SEQ ID NO: 902001 - RNA, 19 nt, Artificial Sequence
  Description of Artificial Sequence: Synthetic oligonucleotide
  Antisense strand to SEQ ID NO: 902000
uaucaagucagacguuuca

SEQ ID NO: 902002 - RNA, 19 nt, Artificial Sequence
  Description of Artificial Sequence: Synthetic oligonucleotide
  Sense strand starting at position 3665 of SEQ ID NO: 588969
cugacuugauaugucucau

SEQ ID NO: 902003 - RNA, 19 nt, Artificial Sequence
  Description of Artificial Sequence: Synthetic oligonucleotide
  Antisense strand to SEQ ID NO: 902002
augagacauaucaagucag

SEQ ID NO: 902004 - RNA, 19 nt, Artificial Sequence
  Description of Artificial Sequence: Synthetic oligonucleotide
  Sense strand starting at position 3671 of SEQ ID NO: 588969
ugauaugucucauucugcu

SEQ ID NO: 902005 - RNA, 19 nt, Artificial Sequence
  Description of Artificial Sequence: Synthetic oligonucleotide
  Antisense strand to SEQ ID NO: 902004
agcagaaugagacauauca

SEQ ID NO: 902006 - RNA, 19 nt, Artificial Sequence
  Description of Artificial Sequence: Synthetic oligonucleotide
  Sense strand starting at position 3690 of SEQ ID NO: 588969
gcuuaagacucuucugagg

SEQ ID NO: 902007 - RNA, 19 nt, Artificial Sequence
  Description of Artificial Sequence: Synthetic oligonucleotide
  Antisense strand to SEQ ID NO: 902006
ccucagaagagucuuaagc

SEQ ID NO: 902008 - RNA, 19 nt, Artificial Sequence
  Description of Artificial Sequence: Synthetic oligonucleotide
  Sense strand starting at position 3922 of SEQ ID NO: 588969
gggaaagcuucugugauga

SEQ ID NO: 902009 - RNA, 19 nt, Artificial Sequence
  Description of Artificial Sequence: Synthetic oligonucleotide
  Antisense strand to SEQ ID NO: 902008
ucaucacagaagcuuuccc

SEQ ID NO: 902010 - RNA, 19 nt, Artificial Sequence
  Description of Artificial Sequence: Synthetic oligonucleotide
  Sense strand starting at position 187 of SEQ ID NO: 588972
cuugguugucuaggacuga

SEQ ID NO: 902011 - RNA, 19 nt, Artificial Sequence
  Description of Artificial Sequence: Synthetic oligonucleotide
  Antisense strand to SEQ ID NO: 902010
ucaguccuagacaaccaag

SEQ ID NO: 902012 - RNA, 19 nt, Artificial Sequence
  Description of Artificial Sequence: Synthetic oligonucleotide
  Sense strand starting at position 191 of SEQ ID NO: 588972
guugucuaggacugaauaa

SEQ ID NO: 902013 - RNA, 19 nt, Artificial Sequence
  Description of Artificial Sequence: Synthetic oligonucleotide
  Antisense strand to SEQ ID NO: 902012
uuauucaguccuagacaac

SEQ ID NO: 902014 - RNA, 19 nt, Artificial Sequence
  Description of Artificial Sequence: Synthetic oligonucleotide
  Sense strand starting at position 429 of SEQ ID NO: 588972
gcuuuagaaucugcagaug

SEQ ID NO: 902015 - RNA, 19 nt, Artificial Sequence
  Description of Artificial Sequence: Synthetic oligonucleotide
  Antisense strand to SEQ ID NO: 902014
caucugcagauucuaaagc

SEQ ID NO: 902016 - RNA, 19 nt, Artificial Sequence
  Description of Artificial Sequence: Synthetic oligonucleotide
  Sense strand starting at position 596 of SEQ ID NO: 588972
cccucagauugggugagau

SEQ ID NO: 902017 - RNA, 19 nt, Artificial Sequence
  Description of Artificial Sequence: Synthetic oligonucleotide
  Antisense strand to SEQ ID NO: 902016
aucucacccaaucugaggg

SEQ ID NO: 902018 - RNA, 19 nt, Artificial Sequence
  Description of Artificial Sequence: Synthetic oligonucleotide
  Sense strand starting at position 839 of SEQ ID NO: 588972
ggauuaaggaagugaugua

SEQ ID NO: 902019 - RNA, 19 nt, Artificial Sequence
  Description of Artificial Sequence: Synthetic oligonucleotide
  Antisense strand to SEQ ID NO: 902018
uacaucacuuccuuaaucc

SEQ ID NO: 902020 - RNA, 19 nt, Artificial Sequence
  Description of Artificial Sequence: Synthetic oligonucleotide
  Sense strand starting at position 1025 of SEQ ID NO: 588972
ucagaucuuucugugauga

SEQ ID NO: 902021 - RNA, 19 nt, Artificial Sequence
  Description of Artificial Sequence: Synthetic oligonucleotide
  Antisense strand to SEQ ID NO: 902020
ucaucacagaaagaucuga

SEQ ID NO: 902022 - RNA, 19 nt, Artificial Sequence
  Description of Artificial Sequence: Synthetic oligonucleotide
  Sense strand starting at position 1026 of SEQ ID NO: 588972
cagaucuuucugugaugag

SEQ ID NO: 902023 - RNA, 19 nt, Artificial Sequence
  Description of Artificial Sequence: Synthetic oligonucleotide
  Antisense strand to SEQ ID NO: 902022
cucaucacagaaagaucug

SEQ ID NO: 902024 - RNA, 19 nt, Artificial Sequence
  Description of Artificial Sequence: Synthetic oligonucleotide
  Sense strand starting at position 1060 of SEQ ID NO: 588972
ggugauucuagagacaugu

SEQ ID NO: 902025 - RNA, 19 nt, Artificial Sequence
  Description of Artificial Sequence: Synthetic oligonucleotide
  Antisense strand to SEQ ID NO: 902024
acaugucucuagaaucacc

SEQ ID NO: 902026 - RNA, 19 nt, Artificial Sequence
  Description of Artificial Sequence: Synthetic oligonucleotide
  Sense strand starting at position 1128 of SEQ ID NO: 588972
ucuagcugccugucaguua

SEQ ID NO: 902027 - RNA, 19 nt, Artificial Sequence
  Description of Artificial Sequence: Synthetic oligonucleotide
  Antisense strand to SEQ ID NO: 902026
uaacugacaggcagcuaga

SEQ ID NO: 902028 - RNA, 19 nt, Artificial Sequence
  Description of Artificial Sequence: Synthetic oligonucleotide
  Sense strand starting at position 1655 of SEQ ID NO: 588972
cucauuugguaccaggaau

SEQ ID NO: 902029 - RNA, 19 nt, Artificial Sequence
  Description of Artificial Sequence: Synthetic oligonucleotide
  Antisense strand to SEQ ID NO: 902028
auuccugguaccaaaugag

SEQ ID NO: 902030 - RNA, 19 nt, Artificial Sequence
  Description of Artificial Sequence: Synthetic oligonucleotide
  Sense strand starting at position 1686 of SEQ ID NO: 588972
ucauaaggaucucuaguga

SEQ ID NO: 902031 - RNA, 19 nt, Artificial Sequence
  Description of Artificial Sequence: Synthetic oligonucleotide
  Antisense strand to SEQ ID NO: 902030
ucacuagagauccuuauga

SEQ ID NO: 902032 - RNA, 19 nt, Artificial Sequence
  Description of Artificial Sequence: Synthetic oligonucleotide
  Sense strand starting at position 1742 of SEQ ID NO: 588972
gaccuagguccuuggaaga

SEQ ID NO: 902033 - RNA, 19 nt, Artificial Sequence
  Description of Artificial Sequence: Synthetic oligonucleotide
  Antisense strand to SEQ ID NO: 902032
ucuuccaaggaccuagguc

SEQ ID NO: 902034 - RNA, 19 nt, Artificial Sequence
  Description of Artificial Sequence: Synthetic oligonucleotide
  Sense strand starting at position 1756 of SEQ ID NO: 588972
gaagaaguaccuggagugu

SEQ ID NO: 902035 - RNA, 19 nt, Artificial Sequence
  Description of Artificial Sequence: Synthetic oligonucleotide
  Antisense strand to SEQ ID NO: 902034
acacuccagguacuucuuc

SEQ ID NO: 902036 - RNA, 19 nt, Artificial Sequence
  Description of Artificial Sequence: Synthetic oligonucleotide
  Sense strand starting at position 2344 of SEQ ID NO: 588972
agcccaguuccuggaaaga

SEQ ID NO: 902037 - RNA, 19 nt, Artificial Sequence
  Description of Artificial Sequence: Synthetic oligonucleotide
  Antisense strand to SEQ ID NO: 902036
ucuuuccaggaacugggcu

SEQ ID NO: 902038 - RNA, 19 nt, Artificial Sequence
  Description of Artificial Sequence: Synthetic oligonucleotide
  Sense strand starting at position 2772 of SEQ ID NO: 588972
cugagucauccguucguuu

SEQ ID NO: 902039 - RNA, 19 nt, Artificial Sequence
  Description of Artificial Sequence: Synthetic oligonucleotide
  Antisense strand to SEQ ID NO: 902038
aaacgaacggaugacucag

SEQ ID NO: 902040 - RNA, 19 nt, Artificial Sequence
  Description of Artificial Sequence: Synthetic oligonucleotide
  Sense strand starting at position 2773 of SEQ ID NO: 588972
ugagucauccguucguuug

SEQ ID NO: 902041 - RNA, 19 nt, Artificial Sequence
  Description of Artificial Sequence: Synthetic oligonucleotide
  Antisense strand to SEQ ID NO: 902040
caaacgaacggaugacuca

SEQ ID NO: 902042 - RNA, 19 nt, Artificial Sequence
  Description of Artificial Sequence: Synthetic oligonucleotide
  Sense strand starting at position 2783 of SEQ ID NO: 588972
guucguuuggugguuagca

SEQ ID NO: 902043 - RNA, 19 nt, Artificial Sequence
  Description of Artificial Sequence: Synthetic oligonucleotide
  Antisense strand to SEQ ID NO: 902042
ugcuaaccaccaaacgaac

SEQ ID NO: 902044 - RNA, 19 nt, Artificial Sequence
  Description of Artificial Sequence: Synthetic oligonucleotide
  Sense strand starting at position 2903 of SEQ ID NO: 588972
guuugugacagugaaguaa

SEQ ID NO: 902045 - RNA, 19 nt, Artificial Sequence
  Description of Artificial Sequence: Synthetic oligonucleotide
  Antisense strand to SEQ ID NO: 902044
uuacuucacugucacaaac

SEQ ID NO: 902046 - RNA, 19 nt, Artificial Sequence
  Description of Artificial Sequence: Synthetic oligonucleotide
  Sense strand starting at position 3040 of SEQ ID NO: 588972
auauccuuguaaccaguaa

SEQ ID NO: 902047 - RNA, 19 nt, Artificial Sequence
  Description of Artificial Sequence: Synthetic oligonucleotide
  Antisense strand to SEQ ID NO: 902046
uuacugguuacaaggauau

SEQ ID NO: 902048 - RNA, 19 nt, Artificial Sequence
  Description of Artificial Sequence: Synthetic oligonucleotide
  Sense strand starting at position 3044 of SEQ ID NO: 588972
ccuuguaaccaguaaguag

SEQ ID NO: 902049 - RNA, 19 nt, Artificial Sequence
  Description of Artificial Sequence: Synthetic oligonucleotide
  Antisense strand to SEQ ID NO: 902048
cuacuuacugguuacaagg

SEQ ID NO: 902050 - RNA, 19 nt, Artificial Sequence
  Description of Artificial Sequence: Synthetic oligonucleotide
  Sense strand starting at position 3059 of SEQ ID NO: 588972
guaggauagacacaagugu

SEQ ID NO: 902051 - RNA, 19 nt, Artificial Sequence
  Description of Artificial Sequence: Synthetic oligonucleotide
  Antisense strand to SEQ ID NO: 902050
acacuugugucuauccuac

SEQ ID NO: 902052 - RNA, 19 nt, Artificial Sequence
  Description of Artificial Sequence: Synthetic oligonucleotide
  Sense strand starting at position 3137 of SEQ ID NO: 588972
acaccugggaaguguuuau

SEQ ID NO: 902053 - RNA, 19 nt, Artificial Sequence
  Description of Artificial Sequence: Synthetic oligonucleotide
  Antisense strand to SEQ ID NO: 902052
auaaacacuucccaggugu

SEQ ID NO: 902054 - RNA, 19 nt, Artificial Sequence
  Description of Artificial Sequence: Synthetic oligonucleotide
  Sense strand starting at position 3141 of SEQ ID NO: 588972
cugggaaguguuuauauua

SEQ ID NO: 902055 - RNA, 19 nt, Artificial Sequence
  Description of Artificial Sequence: Synthetic oligonucleotide
  Antisense strand to SEQ ID NO: 902054
uaauauaaacacuucccag

SEQ ID NO: 902056 - RNA, 19 nt, Artificial Sequence
  Description of Artificial Sequence: Synthetic oligonucleotide
  Sense strand starting at position 3185 of SEQ ID NO: 588972
acacguuacuguuuaggaa

SEQ ID NO: 902057 - RNA, 19 nt, Artificial Sequence
  Description of Artificial Sequence: Synthetic oligonucleotide
  Antisense strand to SEQ ID NO: 902056
uuccuaaacaguaacgugu

SEQ ID NO: 902058 - RNA, 19 nt, Artificial Sequence
  Description of Artificial Sequence: Synthetic oligonucleotide
  Sense strand starting at position 3186 of SEQ ID NO: 588972
cacguuacuguuuaggaau

SEQ ID NO: 902059 - RNA, 19 nt, Artificial Sequence
  Description of Artificial Sequence: Synthetic oligonucleotide
  Antisense strand to SEQ ID NO: 902058
auuccuaaacaguaacgug

SEQ ID NO: 902060 - RNA, 19 nt, Artificial Sequence
  Description of Artificial Sequence: Synthetic oligonucleotide
  Sense strand starting at position 3205 of SEQ ID NO: 588972
aggguaugaugauauuuaa

SEQ ID NO: 902061 - RNA, 19 nt, Artificial Sequence
  Description of Artificial Sequence: Synthetic oligonucleotide
  Antisense strand to SEQ ID NO: 902060
uuaaauaucaucauacccu

SEQ ID NO: 902062 - RNA, 19 nt, Artificial Sequence
  Description of Artificial Sequence: Synthetic oligonucleotide
  Sense strand starting at position 3238 of SEQ ID NO: 588972
uguauuagauuguuaacac

SEQ ID NO: 902063 - RNA, 19 nt, Artificial Sequence
  Description of Artificial Sequence: Synthetic oligonucleotide
  Antisense strand to SEQ ID NO: 902062
guguuaacaaucuaauaca

SEQ ID NO: 902064 - RNA, 19 nt, Artificial Sequence
  Description of Artificial Sequence: Synthetic oligonucleotide
  Sense strand starting at position 3356 of SEQ ID NO: 588972
acuaauaauggaggucuca

SEQ ID NO: 902065 - RNA, 19 nt, Artificial Sequence
  Description of Artificial Sequence: Synthetic oligonucleotide
  Antisense strand to SEQ ID NO: 902064
ugagaccuccauuauuagu

SEQ ID NO: 902066 - RNA, 19 nt, Artificial Sequence
  Description of Artificial Sequence: Synthetic oligonucleotide
  Sense strand starting at position 3469 of SEQ ID NO: 588972
acacgauuaggucauccua

SEQ ID NO: 902067 - RNA, 19 nt, Artificial Sequence
  Description of Artificial Sequence: Synthetic oligonucleotide
  Antisense strand to SEQ ID NO: 902066
uaggaugaccuaaucgugu

SEQ ID NO: 902068 - RNA, 19 nt, Artificial Sequence
  Description of Artificial Sequence: Synthetic oligonucleotide
  Sense strand starting at position 3490 of SEQ ID NO: 588972
guugcuuuggcuguaguau

SEQ ID NO: 902069 - RNA, 19 nt, Artificial Sequence
  Description of Artificial Sequence: Synthetic oligonucleotide
  Antisense strand to SEQ ID NO: 902068
auacuacagccaaagcaac

SEQ ID NO: 902070 - RNA, 19 nt, Artificial Sequence
  Description of Artificial Sequence: Synthetic oligonucleotide
  Sense strand starting at position 3510 of SEQ ID NO: 588972
uuaggauucucugcuaaag

SEQ ID NO: 902071 - RNA, 19 nt, Artificial Sequence
  Description of Artificial Sequence: Synthetic oligonucleotide
  Antisense strand to SEQ ID NO: 902070
cuuuagcagagaauccuaa

SEQ ID NO: 902072 - RNA, 19 nt, Artificial Sequence
  Description of Artificial Sequence: Synthetic oligonucleotide
  Sense strand starting at position 3614 of SEQ ID NO: 588972
aaauguugguuguuuggga

SEQ ID NO: 902073 - RNA, 19 nt, Artificial Sequence
  Description of Artificial Sequence: Synthetic oligonucleotide
  Antisense strand to SEQ ID NO: 902072
ucccaaacaaccaacauuu

SEQ ID NO: 902074 - RNA, 19 nt, Artificial Sequence
  Description of Artificial Sequence: Synthetic oligonucleotide
  Sense strand starting at position 3615 of SEQ ID NO: 588972
aauguugguuguuugggaa

SEQ ID NO: 902075 - RNA, 19 nt, Artificial Sequence
  Description of Artificial Sequence: Synthetic oligonucleotide
  Antisense strand to SEQ ID NO: 902074
uucccaaacaaccaacauu

SEQ ID NO: 902076 - RNA, 19 nt, Artificial Sequence
  Description of Artificial Sequence: Synthetic oligonucleotide
  Sense strand starting at position 3702 of SEQ ID NO: 588972
gugguuccuacugaguuaa

SEQ ID NO: 902077 - RNA, 19 nt, Artificial Sequence
  Description of Artificial Sequence: Synthetic oligonucleotide
  Antisense strand to SEQ ID NO: 902076
uuaacucaguaggaaccac

SEQ ID NO: 902078 - RNA, 19 nt, Artificial Sequence
  Description of Artificial Sequence: Synthetic oligonucleotide
  Sense strand starting at position 3765 of SEQ ID NO: 588972
ugucauaugguauauaaac

SEQ ID NO: 902079 - RNA, 19 nt, Artificial Sequence
  Description of Artificial Sequence: Synthetic oligonucleotide
  Antisense strand to SEQ ID NO: 902078
guuuauauaccauaugaca

SEQ ID NO: 902080 - RNA, 19 nt, Artificial Sequence
  Description of Artificial Sequence: Synthetic oligonucleotide
  Sense strand starting at position 3927 of SEQ ID NO: 588972
ggauucuacaaucguugau

SEQ ID NO: 902081 - RNA, 19 nt, Artificial Sequence
  Description of Artificial Sequence: Synthetic oligonucleotide
  Antisense strand to SEQ ID NO: 902080
aucaacgauuguagaaucc

SEQ ID NO: 902082 - RNA, 19 nt, Artificial Sequence
  Description of Artificial Sequence: Synthetic oligonucleotide
  Sense strand starting at position 3929 of SEQ ID NO: 588972
auucuacaaucguugauua

SEQ ID NO: 902083 - RNA, 19 nt, Artificial Sequence
  Description of Artificial Sequence: Synthetic oligonucleotide
  Antisense strand to SEQ ID NO: 902082
uaaucaacgauuguagaau

SEQ ID NO: 902084 - RNA, 19 nt, Artificial Sequence
  Description of Artificial Sequence: Synthetic oligonucleotide
  Sense strand starting at position 3931 of SEQ ID NO: 588972
ucuacaaucguugauuagu

SEQ ID NO: 902085 - RNA, 19 nt, Artificial Sequence
  Description of Artificial Sequence: Synthetic oligonucleotide
  Antisense strand to SEQ ID NO: 902084
acuaaucaacgauuguaga

SEQ ID NO: 902086 - RNA, 19 nt, Artificial Sequence
  Description of Artificial Sequence: Synthetic oligonucleotide
  Sense strand starting at position 3941 of SEQ ID NO: 588972
uugauuagugucuaccaca

SEQ ID NO: 902087 - RNA, 19 nt, Artificial Sequence
  Description of Artificial Sequence: Synthetic oligonucleotide
  Antisense strand to SEQ ID NO: 902086
ugugguagacacuaaucaa

SEQ ID NO: 902088 - RNA, 19 nt, Artificial Sequence
  Description of Artificial Sequence: Synthetic oligonucleotide
  Sense strand starting at position 3955 of SEQ ID NO: 588972
ccacaagugguauggucaa

SEQ ID NO: 902089 - RNA, 19 nt, Artificial Sequence
  Description of Artificial Sequence: Synthetic oligonucleotide
  Antisense strand to SEQ ID NO: 902088
uugaccauaccacuugugg

SEQ ID NO: 902090 - RNA, 19 nt, Artificial Sequence
  Description of Artificial Sequence: Synthetic oligonucleotide
  Sense strand starting at position 131 of SEQ ID NO: 588973
uggugaugaccacagugau

SEQ ID NO: 902091 - RNA, 19 nt, Artificial Sequence
  Description of Artificial Sequence: Synthetic oligonucleotide
  Antisense strand to SEQ ID NO: 902090
aucacuguggucaucacca

SEQ ID NO: 902092 - RNA, 19 nt, Artificial Sequence
  Description of Artificial Sequence: Synthetic oligonucleotide
  Sense strand starting at position 213 of SEQ ID NO: 588973
gaaugugaccugggaguaa

SEQ ID NO: 902093 - RNA, 19 nt, Artificial Sequence
  Description of Artificial Sequence: Synthetic oligonucleotide
  Antisense strand to SEQ ID NO: 902092
uuacucccaggucacauuc

SEQ ID NO: 902094 - RNA, 19 nt, Artificial Sequence
  Description of Artificial Sequence: Synthetic oligonucleotide
  Sense strand starting at position 462 of SEQ ID NO: 588973
gacuaaagugaucgaauau

SEQ ID NO: 902095 - RNA, 19 nt, Artificial Sequence
  Description of Artificial Sequence: Synthetic oligonucleotide
  Antisense strand to SEQ ID NO: 902094
auauucgaucacuuuaguc

SEQ ID NO: 902096 - RNA, 19 nt, Artificial Sequence
  Description of Artificial Sequence: Synthetic oligonucleotide
  Sense strand starting at position 640 of SEQ ID NO: 588973
accugagaccuaugauccu

SEQ ID NO: 902097 - RNA, 19 nt, Artificial Sequence
  Description of Artificial Sequence: Synthetic oligonucleotide
  Antisense strand to SEQ ID NO: 902096
aggaucauaggucucaggu

SEQ ID NO: 902098 - RNA, 19 nt, Artificial Sequence
  Description of Artificial Sequence: Synthetic oligonucleotide
  Sense strand starting at position 690 of SEQ ID NO: 588973
uucuucuguguuuaggaaa

SEQ ID NO: 902099 - RNA, 19 nt, Artificial Sequence
  Description of Artificial Sequence: Synthetic oligonucleotide
  Antisense strand to SEQ ID NO: 902098
uuuccuaaacacagaagaa

SEQ ID NO: 902100 - RNA, 19 nt, Artificial Sequence
  Description of Artificial Sequence: Synthetic oligonucleotide
  Sense strand starting at position 826 of SEQ ID NO: 588973
ccauaagugauuggcugaa

SEQ ID NO: 902101 - RNA, 19 nt, Artificial Sequence
  Description of Artificial Sequence: Synthetic oligonucleotide
  Antisense strand to SEQ ID NO: 902100
uucagccaaucacuuaugg

SEQ ID NO: 902102 - RNA, 19 nt, Artificial Sequence
  Description of Artificial Sequence: Synthetic oligonucleotide
  Sense strand starting at position 828 of SEQ ID NO: 588973
auaagugauuggcugaacu

SEQ ID NO: 902103 - RNA, 19 nt, Artificial Sequence
  Description of Artificial Sequence: Synthetic oligonucleotide
  Antisense strand to SEQ ID NO: 902102
aguucagccaaucacuuau

SEQ ID NO: 902104 - RNA, 19 nt, Artificial Sequence
  Description of Artificial Sequence: Synthetic oligonucleotide
  Sense strand starting at position 830 of SEQ ID NO: 588973
aagugauuggcugaacugu

SEQ ID NO: 902105 - RNA, 19 nt, Artificial Sequence
  Description of Artificial Sequence: Synthetic oligonucleotide
  Antisense strand to SEQ ID NO: 902104
acaguucagccaaucacuu

SEQ ID NO: 902106 - RNA, 19 nt, Artificial Sequence
  Description of Artificial Sequence: Synthetic oligonucleotide
  Sense strand starting at position 892 of SEQ ID NO: 588973
gcaugagguaagugauaga

SEQ ID NO: 902107 - RNA, 19 nt, Artificial Sequence
  Description of Artificial Sequence: Synthetic oligonucleotide
  Antisense strand to SEQ ID NO: 902106
ucuaucacuuaccucaugc

SEQ ID NO: 902108 - RNA, 19 nt, Artificial Sequence
  Description of Artificial Sequence: Synthetic oligonucleotide
  Sense strand starting at position 903 of SEQ ID NO: 588973
gugauagaaacuuggcauc

SEQ ID NO: 902109 - RNA, 19 nt, Artificial Sequence
  Description of Artificial Sequence: Synthetic oligonucleotide
  Antisense strand to SEQ ID NO: 902108
gaugccaaguuucuaucac

SEQ ID NO: 902110 - RNA, 19 nt, Artificial Sequence
  Description of Artificial Sequence: Synthetic oligonucleotide
  Sense strand starting at position 990 of SEQ ID NO: 588973
ugucuugggccacaaggau

SEQ ID NO: 902111 - RNA, 19 nt, Artificial Sequence
  Description of Artificial Sequence: Synthetic oligonucleotide
  Antisense strand to SEQ ID NO: 902110
auccuuguggcccaagaca

SEQ ID NO: 902112 - RNA, 19 nt, Artificial Sequence
  Description of Artificial Sequence: Synthetic oligonucleotide
  Sense strand starting at position 1124 of SEQ ID NO: 588973
uggagucucagagguauag

SEQ ID NO: 902113 - RNA, 19 nt, Artificial Sequence
  Description of Artificial Sequence: Synthetic oligonucleotide
  Antisense strand to SEQ ID NO: 902112
cuauaccucugagacucca

SEQ ID NO: 902114 - RNA, 19 nt, Artificial Sequence
  Description of Artificial Sequence: Synthetic oligonucleotide
  Sense strand starting at position 1139 of SEQ ID NO: 588973
auaggaacucuagguguga

SEQ ID NO: 902115 - RNA, 19 nt, Artificial Sequence
  Description of Artificial Sequence: Synthetic oligonucleotide
  Antisense strand to SEQ ID NO: 902114
ucacaccuagaguuccuau

SEQ ID NO: 902116 - RNA, 19 nt, Artificial Sequence
  Description of Artificial Sequence: Synthetic oligonucleotide
  Sense strand starting at position 1173 of SEQ ID NO: 588973
ugcacuagacuuggaaagu

SEQ ID NO: 902117 - RNA, 19 nt, Artificial Sequence
  Description of Artificial Sequence: Synthetic oligonucleotide
  Antisense strand to SEQ ID NO: 902116
acuuuccaagucuagugca

SEQ ID NO: 902118 - RNA, 19 nt, Artificial Sequence
  Description of Artificial Sequence: Synthetic oligonucleotide
  Sense strand starting at position 1192 of SEQ ID NO: 588973
uggccaacuggugauagua

SEQ ID NO: 902119 - RNA, 19 nt, Artificial Sequence
  Description of Artificial Sequence: Synthetic oligonucleotide
  Antisense strand to SEQ ID NO: 902118
uacuaucaccaguuggcca

SEQ ID NO: 902120 - RNA, 19 nt, Artificial Sequence
  Description of Artificial Sequence: Synthetic oligonucleotide
  Sense strand starting at position 1211 of SEQ ID NO: 588973
uggaauuucucuugauuug

SEQ ID NO: 902121 - RNA, 19 nt, Artificial Sequence
  Description of Artificial Sequence: Synthetic oligonucleotide
  Antisense strand to SEQ ID NO: 902120
caaaucaagagaaauucca

SEQ ID NO: 902122 - RNA, 19 nt, Artificial Sequence
  Description of Artificial Sequence: Synthetic oligonucleotide
  Sense strand starting at position 1239 of SEQ ID NO: 588973
uggaauuucucuugauuuc

SEQ ID NO: 902123 - RNA, 19 nt, Artificial Sequence
  Description of Artificial Sequence: Synthetic oligonucleotide
  Antisense strand to SEQ ID NO: 902122
gaaaucaagagaaauucca

SEQ ID NO: 902124 - RNA, 19 nt, Artificial Sequence
  Description of Artificial Sequence: Synthetic oligonucleotide
  Sense strand starting at position 1281 of SEQ ID NO: 588973
gaaacaccucccugaaggu

SEQ ID NO: 902125 - RNA, 19 nt, Artificial Sequence
  Description of Artificial Sequence: Synthetic oligonucleotide
  Antisense strand to SEQ ID NO: 902124
accuucagggagguguuuc

SEQ ID NO: 902126 - RNA, 19 nt, Artificial Sequence
  Description of Artificial Sequence: Synthetic oligonucleotide
  Sense strand starting at position 1294 of SEQ ID NO: 588973
gaagguaaauguuuaguua

SEQ ID NO: 902127 - RNA, 19 nt, Artificial Sequence
  Description of Artificial Sequence: Synthetic oligonucleotide
  Antisense strand to SEQ ID NO: 902126
uaacuaaacauuuaccuuc

SEQ ID NO: 902128 - RNA, 19 nt, Artificial Sequence
  Description of Artificial Sequence: Synthetic oligonucleotide
  Sense strand starting at position 1425 of SEQ ID NO: 588973
cugaaugacucaguguaug

SEQ ID NO: 902129 - RNA, 19 nt, Artificial Sequence
  Description of Artificial Sequence: Synthetic oligonucleotide
  Antisense strand to SEQ ID NO: 902128
cauacacugagucauucag

SEQ ID NO: 902130 - RNA, 19 nt, Artificial Sequence
  Description of Artificial Sequence: Synthetic oligonucleotide
  Sense strand starting at position 1430 of SEQ ID NO: 588973
ugacucaguguaugaauga

SEQ ID NO: 902131 - RNA, 19 nt, Artificial Sequence
  Description of Artificial Sequence: Synthetic oligonucleotide
  Antisense strand to SEQ ID NO: 902130
ucauucauacacugaguca

SEQ ID NO: 902132 - RNA, 19 nt, Artificial Sequence
  Description of Artificial Sequence: Synthetic oligonucleotide
  Sense strand starting at position 1752 of SEQ ID NO: 588973
aggagucucuuaccaagga

SEQ ID NO: 902133 - RNA, 19 nt, Artificial Sequence
  Description of Artificial Sequence: Synthetic oligonucleotide
  Antisense strand to SEQ ID NO: 902132
uccuugguaagagacuccu

SEQ ID NO: 902134 - RNA, 19 nt, Artificial Sequence
  Description of Artificial Sequence: Synthetic oligonucleotide
  Sense strand starting at position 1994 of SEQ ID NO: 588973
guugcauggcgccuaugau

SEQ ID NO: 902135 - RNA, 19 nt, Artificial Sequence
  Description of Artificial Sequence: Synthetic oligonucleotide
  Antisense strand to SEQ ID NO: 902134
aucauaggcgccaugcaac

SEQ ID NO: 902136 - RNA, 19 nt, Artificial Sequence
  Description of Artificial Sequence: Synthetic oligonucleotide
  Sense strand starting at position 2236 of SEQ ID NO: 588973
aggugcuuagcaugaauuu

SEQ ID NO: 902137 - RNA, 19 nt, Artificial Sequence
  Description of Artificial Sequence: Synthetic oligonucleotide
  Antisense strand to SEQ ID NO: 902136
aaauucaugcuaagcaccu

SEQ ID NO: 902138 - RNA, 19 nt, Artificial Sequence
  Description of Artificial Sequence: Synthetic oligonucleotide
  Sense strand starting at position 2260 of SEQ ID NO: 588973
auggccaaugcucaauaaa

SEQ ID NO: 902139 - RNA, 19 nt, Artificial Sequence
  Description of Artificial Sequence: Synthetic oligonucleotide
  Antisense strand to SEQ ID NO: 902138
uuuauugagcauuggccau

SEQ ID NO: 902140 - RNA, 19 nt, Artificial Sequence
  Description of Artificial Sequence: Synthetic oligonucleotide
  Sense strand starting at position 2263 of SEQ ID NO: 588973
gccaaugcucaauaaagca

SEQ ID NO: 902141 - RNA, 19 nt, Artificial Sequence
  Description of Artificial Sequence: Synthetic oligonucleotide
  Antisense strand to SEQ ID NO: 902140
ugcuuuauugagcauuggc

SEQ ID NO: 902142 - RNA, 19 nt, Artificial Sequence
  Description of Artificial Sequence: Synthetic oligonucleotide
  Sense strand starting at position 2407 of SEQ ID NO: 588973
gggaacuauucuuuagcua

SEQ ID NO: 902143 - RNA, 19 nt, Artificial Sequence
  Description of Artificial Sequence: Synthetic oligonucleotide
  Antisense strand to SEQ ID NO: 902142
uagcuaaagaauaguuccc

SEQ ID NO: 902144 - RNA, 19 nt, Artificial Sequence
  Description of Artificial Sequence: Synthetic oligonucleotide
  Sense strand starting at position 2408 of SEQ ID NO: 588973
ggaacuauucuuuagcuau

SEQ ID NO: 902145 - RNA, 19 nt, Artificial Sequence
  Description of Artificial Sequence: Synthetic oligonucleotide
  Antisense strand to SEQ ID NO: 902144
auagcuaaagaauaguucc

SEQ ID NO: 902146 - RNA, 19 nt, Artificial Sequence
  Description of Artificial Sequence: Synthetic oligonucleotide
  Sense strand starting at position 2512 of SEQ ID NO: 588973
cagaaauauuauguuggau

SEQ ID NO: 902147 - RNA, 19 nt, Artificial Sequence
  Description of Artificial Sequence: Synthetic oligonucleotide
  Antisense strand to SEQ ID NO: 902146
auccaacauaauauuucug

SEQ ID NO: 902148 - RNA, 19 nt, Artificial Sequence
  Description of Artificial Sequence: Synthetic oligonucleotide
  Sense strand starting at position 2558 of SEQ ID NO: 588973
uauggugguguugaugaua

SEQ ID NO: 902149 - RNA, 19 nt, Artificial Sequence
  Description of Artificial Sequence: Synthetic oligonucleotide
  Antisense strand to SEQ ID NO: 902148
uaucaucaacaccaccaua

SEQ ID NO: 902150 - RNA, 19 nt, Artificial Sequence
  Description of Artificial Sequence: Synthetic oligonucleotide
  Sense strand starting at position 2561 of SEQ ID NO: 588973
ggugguguugaugauaaua

SEQ ID NO: 902151 - RNA, 19 nt, Artificial Sequence
  Description of Artificial Sequence: Synthetic oligonucleotide
  Antisense strand to SEQ ID NO: 902150
uauuaucaucaacaccacc

SEQ ID NO: 902152 - RNA, 19 nt, Artificial Sequence
  Description of Artificial Sequence: Synthetic oligonucleotide
  Sense strand starting at position 2716 of SEQ ID NO: 588973
ggcagagacaggugagauu

SEQ ID NO: 902153 - RNA, 19 nt, Artificial Sequence
  Description of Artificial Sequence: Synthetic oligonucleotide
  Antisense strand to SEQ ID NO: 902152
aaucucaccugucucugcc

SEQ ID NO: 902154 - RNA, 19 nt, Artificial Sequence
  Description of Artificial Sequence: Synthetic oligonucleotide
  Sense strand starting at position 2892 of SEQ ID NO: 588973
agcaacuuguacuuaaaga

SEQ ID NO: 902155 - RNA, 19 nt, Artificial Sequence
  Description of Artificial Sequence: Synthetic oligonucleotide
  Antisense strand to SEQ ID NO: 902154
ucuuuaaguacaaguugcu

SEQ ID NO: 902156 - RNA, 19 nt, Artificial Sequence
  Description of Artificial Sequence: Synthetic oligonucleotide
  Sense strand starting at position 2965 of SEQ ID NO: 588973
gaggaaaggcguugaagau

SEQ ID NO: 902157 - RNA, 19 nt, Artificial Sequence
  Description of Artificial Sequence: Synthetic oligonucleotide
  Antisense strand to SEQ ID NO: 902156
aucuucaacgccuuuccuc

SEQ ID NO: 902158 - RNA, 19 nt, Artificial Sequence
  Description of Artificial Sequence: Synthetic oligonucleotide
  Sense strand starting at position 3151 of SEQ ID NO: 588973
cucugugaugagggaaaug

SEQ ID NO: 902159 - RNA, 19 nt, Artificial Sequence
  Description of Artificial Sequence: Synthetic oligonucleotide
  Antisense strand to SEQ ID NO: 902158
cauuucccucaucacagag

SEQ ID NO: 902160 - RNA, 19 nt, Artificial Sequence
  Description of Artificial Sequence: Synthetic oligonucleotide
  Sense strand starting at position 3531 of SEQ ID NO: 588973
ccuaguuugugagcuauuu

SEQ ID NO: 902161 - RNA, 19 nt, Artificial Sequence
  Description of Artificial Sequence: Synthetic oligonucleotide
  Antisense strand to SEQ ID NO: 902160
aaauagcucacaaacuagg

SEQ ID NO: 902162 - RNA, 19 nt, Artificial Sequence
  Description of Artificial Sequence: Synthetic oligonucleotide
  Sense strand starting at position 3570 of SEQ ID NO: 588973
aagaguaacugccuuagag

SEQ ID NO: 902163 - RNA, 19 nt, Artificial Sequence
  Description of Artificial Sequence: Synthetic oligonucleotide
  Antisense strand to SEQ ID NO: 902162
cucuaaggcaguuacucuu

SEQ ID NO: 902164 - RNA, 19 nt, Artificial Sequence
  Description of Artificial Sequence: Synthetic oligonucleotide
  Sense strand starting at position 3580 of SEQ ID NO: 588973
gccuuagaggcagacagau

SEQ ID NO: 902165 - RNA, 19 nt, Artificial Sequence
  Description of Artificial Sequence: Synthetic oligonucleotide
  Antisense strand to SEQ ID NO: 902164
aucugucugccucuaaggc

SEQ ID NO: 902166 - RNA, 19 nt, Artificial Sequence
  Description of Artificial Sequence: Synthetic oligonucleotide
  Sense strand starting at position 3589 of SEQ ID NO: 588973
gcagacagaucugaauuua

SEQ ID NO: 902167 - RNA, 19 nt, Artificial Sequence
  Description of Artificial Sequence: Synthetic oligonucleotide
  Antisense strand to SEQ ID NO: 902166
uaaauucagaucugucugc

SEQ ID NO: 902168 - RNA, 19 nt, Artificial Sequence
  Description of Artificial Sequence: Synthetic oligonucleotide
  Sense strand starting at position 3671 of SEQ ID NO: 588973
gugucuuuauuucuaaagu

SEQ ID NO: 902169 - RNA, 19 nt, Artificial Sequence
  Description of Artificial Sequence: Synthetic oligonucleotide
  Antisense strand to SEQ ID NO: 902168
acuuuagaaauaaagacac

SEQ ID NO: 902170 - RNA, 19 nt, Artificial Sequence
  Description of Artificial Sequence: Synthetic oligonucleotide
  Sense strand starting at position 11 of SEQ ID NO: 588974
aucugcucuccaggaagau

SEQ ID NO: 902171 - RNA, 19 nt, Artificial Sequence
  Description of Artificial Sequence: Synthetic oligonucleotide
  Antisense strand to SEQ ID NO: 902170
aucuuccuggagagcagau

SEQ ID NO: 902172 - RNA, 19 nt, Artificial Sequence
  Description of Artificial Sequence: Synthetic oligonucleotide
  Sense strand starting at position 162 of SEQ ID NO: 588974
cgagcuucccgucuaguga

SEQ ID NO: 902173 - RNA, 19 nt, Artificial Sequence
  Description of Artificial Sequence: Synthetic oligonucleotide
  Antisense strand to SEQ ID NO: 902172
ucacuagacgggaagcucg

SEQ ID NO: 902174 - RNA, 19 nt, Artificial Sequence
  Description of Artificial Sequence: Synthetic oligonucleotide
  Sense strand starting at position 252 of SEQ ID NO: 588974
gcuggucuucuagauagac

SEQ ID NO: 902175 - RNA, 19 nt, Artificial Sequence
  Description of Artificial Sequence: Synthetic oligonucleotide
  Antisense strand to SEQ ID NO: 902174
gucuaucuagaagaccagc

SEQ ID NO: 902176 - RNA, 19 nt, Artificial Sequence
  Description of Artificial Sequence: Synthetic oligonucleotide
  Sense strand starting at position 409 of SEQ ID NO: 588974
aucuccuucuggcuaaaga

SEQ ID NO: 902177 - RNA, 19 nt, Artificial Sequence
  Description of Artificial Sequence: Synthetic oligonucleotide
  Antisense strand to SEQ ID NO: 902176
ucuuuagccagaaggagau

SEQ ID NO: 902178 - RNA, 19 nt, Artificial Sequence
  Description of Artificial Sequence: Synthetic oligonucleotide
  Sense strand starting at position 558 of SEQ ID NO: 588974
ccgguuugucugcauauuu

SEQ ID NO: 902179 - RNA, 19 nt, Artificial Sequence
  Description of Artificial Sequence: Synthetic oligonucleotide
  Antisense strand to SEQ ID NO: 902178
aaauaugcagacaaaccgg

SEQ ID NO: 902180 - RNA, 19 nt, Artificial Sequence
  Description of Artificial Sequence: Synthetic oligonucleotide
  Sense strand starting at position 565 of SEQ ID NO: 588974
gucugcauauuucuacauu

SEQ ID NO: 902181 - RNA, 19 nt, Artificial Sequence
  Description of Artificial Sequence: Synthetic oligonucleotide
  Antisense strand to SEQ ID NO: 902180
aauguagaaauaugcagac

SEQ ID NO: 902182 - RNA, 19 nt, Artificial Sequence
  Description of Artificial Sequence: Synthetic oligonucleotide
  Sense strand starting at position 652 of SEQ ID NO: 588974
ggcagcgagaauuacagau

SEQ ID NO: 902183 - RNA, 19 nt, Artificial Sequence
  Description of Artificial Sequence: Synthetic oligonucleotide
  Antisense strand to SEQ ID NO: 902182
aucuguaauucucgcugcc

SEQ ID NO: 902184 - RNA, 19 nt, Artificial Sequence
  Description of Artificial Sequence: Synthetic oligonucleotide
  Sense strand starting at position 853 of SEQ ID NO: 588974
agacucauuccuuagguuu

SEQ ID NO: 902185 - RNA, 19 nt, Artificial Sequence
  Description of Artificial Sequence: Synthetic oligonucleotide
  Antisense strand to SEQ ID NO: 902184
aaaccuaaggaaugagucu

SEQ ID NO: 902186 - RNA, 19 nt, Artificial Sequence
  Description of Artificial Sequence: Synthetic oligonucleotide
  Sense strand starting at position 889 of SEQ ID NO: 588974
guucccagccaagaauuau

SEQ ID NO: 902187 - RNA, 19 nt, Artificial Sequence
  Description of Artificial Sequence: Synthetic oligonucleotide
  Antisense strand to SEQ ID NO: 902186
auaauucuuggcugggaac

SEQ ID NO: 902188 - RNA, 19 nt, Artificial Sequence
  Description of Artificial Sequence: Synthetic oligonucleotide
  Sense strand starting at position 1103 of SEQ ID NO: 588974
cacauauaggaauguguau

SEQ ID NO: 902189 - RNA, 19 nt, Artificial Sequence
  Description of Artificial Sequence: Synthetic oligonucleotide
  Antisense strand to SEQ ID NO: 902188
auacacauuccuauaugug

SEQ ID NO: 902190 - RNA, 19 nt, Artificial Sequence
  Description of Artificial Sequence: Synthetic oligonucleotide
  Sense strand starting at position 1227 of SEQ ID NO: 588974
gcauauaauucuguacaga

SEQ ID NO: 902191 - RNA, 19 nt, Artificial Sequence
  Description of Artificial Sequence: Synthetic oligonucleotide
  Antisense strand to SEQ ID NO: 902190
ucuguacagaauuauaugc

SEQ ID NO: 902192 - RNA, 19 nt, Artificial Sequence
  Description of Artificial Sequence: Synthetic oligonucleotide
  Sense strand starting at position 1269 of SEQ ID NO: 588974
aguggucagcuauaagagu

SEQ ID NO: 902193 - RNA, 19 nt, Artificial Sequence
  Description of Artificial Sequence: Synthetic oligonucleotide
  Antisense strand to SEQ ID NO: 902192
acucuuauagcugaccacu

SEQ ID NO: 902194 - RNA, 19 nt, Artificial Sequence
  Description of Artificial Sequence: Synthetic oligonucleotide
  Sense strand starting at position 1276 of SEQ ID NO: 588974
agcuauaagaguuaugggu

SEQ ID NO: 902195 - RNA, 19 nt, Artificial Sequence
  Description of Artificial Sequence: Synthetic oligonucleotide
  Antisense strand to SEQ ID NO: 902194
acccauaacucuuauagcu

SEQ ID NO: 902196 - RNA, 19 nt, Artificial Sequence
  Description of Artificial Sequence: Synthetic oligonucleotide
  Sense strand starting at position 1280 of SEQ ID NO: 588974
auaagaguuauggguaaug

SEQ ID NO: 902197 - RNA, 19 nt, Artificial Sequence
  Description of Artificial Sequence: Synthetic oligonucleotide
  Antisense strand to SEQ ID NO: 902196
cauuacccauaacucuuau

SEQ ID NO: 902198 - RNA, 19 nt, Artificial Sequence
  Description of Artificial Sequence: Synthetic oligonucleotide
  Sense strand starting at position 1291 of SEQ ID NO: 588974
ggguaaugaugacuuucuu

SEQ ID NO: 902199 - RNA, 19 nt, Artificial Sequence
  Description of Artificial Sequence: Synthetic oligonucleotide
  Antisense strand to SEQ ID NO: 902198
aagaaagucaucauuaccc

SEQ ID NO: 902200 - RNA, 19 nt, Artificial Sequence
  Description of Artificial Sequence: Synthetic oligonucleotide
  Sense strand starting at position 1405 of SEQ ID NO: 588974
accaguauacuaugauuau

SEQ ID NO: 902201 - RNA, 19 nt, Artificial Sequence
  Description of Artificial Sequence: Synthetic oligonucleotide
  Antisense strand to SEQ ID NO: 902200
auaaucauaguauacuggu

SEQ ID NO: 902202 - RNA, 19 nt, Artificial Sequence
  Description of Artificial Sequence: Synthetic oligonucleotide
  Sense strand starting at position 1538 of SEQ ID NO: 588974
cuacauuuccucugcaugu

SEQ ID NO: 902203 - RNA, 19 nt, Artificial Sequence
  Description of Artificial Sequence: Synthetic oligonucleotide
  Antisense strand to SEQ ID NO: 902202
acaugcagaggaaauguag

SEQ ID NO: 902204 - RNA, 19 nt, Artificial Sequence
  Description of Artificial Sequence: Synthetic oligonucleotide
  Sense strand starting at position 1731 of SEQ ID NO: 588974
uggugaguccugcaaggaa

SEQ ID NO: 902205 - RNA, 19 nt, Artificial Sequence
  Description of Artificial Sequence: Synthetic oligonucleotide
  Antisense strand to SEQ ID NO: 902204
uuccuugcaggacucacca

SEQ ID NO: 902206 - RNA, 19 nt, Artificial Sequence
  Description of Artificial Sequence: Synthetic oligonucleotide
  Sense strand starting at position 2071 of SEQ ID NO: 588974
ccaaguuugguuugaggaa

SEQ ID NO: 902207 - RNA, 19 nt, Artificial Sequence
  Description of Artificial Sequence: Synthetic oligonucleotide
  Antisense strand to SEQ ID NO: 902206
uuccucaaaccaaacuugg

SEQ ID NO: 902208 - RNA, 19 nt, Artificial Sequence
  Description of Artificial Sequence: Synthetic oligonucleotide
  Sense strand starting at position 2172 of SEQ ID NO: 588974
ccuuccuucguuuacagaa

SEQ ID NO: 902209 - RNA, 19 nt, Artificial Sequence
  Description of Artificial Sequence: Synthetic oligonucleotide
  Antisense strand to SEQ ID NO: 902208
uucuguaaacgaaggaagg

SEQ ID NO: 902210 - RNA, 19 nt, Artificial Sequence
  Description of Artificial Sequence: Synthetic oligonucleotide
  Sense strand starting at position 2348 of SEQ ID NO: 588974
ugguuugcagauugggaaa

SEQ ID NO: 902211 - RNA, 19 nt, Artificial Sequence
  Description of Artificial Sequence: Synthetic oligonucleotide
  Antisense strand to SEQ ID NO: 902210
uuucccaaucugcaaacca

SEQ ID NO: 902212 - RNA, 19 nt, Artificial Sequence
  Description of Artificial Sequence: Synthetic oligonucleotide
  Sense strand starting at position 2439 of SEQ ID NO: 588974
ucauucucaguguacagau

SEQ ID NO: 902213 - RNA, 19 nt, Artificial Sequence
  Description of Artificial Sequence: Synthetic oligonucleotide
  Antisense strand to SEQ ID NO: 902212
aucuguacacugagaauga

SEQ ID NO: 902214 - RNA, 19 nt, Artificial Sequence
  Description of Artificial Sequence: Synthetic oligonucleotide
  Sense strand starting at position 2446 of SEQ ID NO: 588974
caguguacagaugggaaua

SEQ ID NO: 902215 - RNA, 19 nt, Artificial Sequence
  Description of Artificial Sequence: Synthetic oligonucleotide
  Antisense strand to SEQ ID NO: 902214
uauucccaucuguacacug

SEQ ID NO: 902216 - RNA, 19 nt, Artificial Sequence
  Description of Artificial Sequence: Synthetic oligonucleotide
  Sense strand starting at position 2560 of SEQ ID NO: 588974
aguuguaaccucuagcaca

SEQ ID NO: 902217 - RNA, 19 nt, Artificial Sequence
  Description of Artificial Sequence: Synthetic oligonucleotide
  Antisense strand to SEQ ID NO: 902216
ugugcuagagguuacaacu

SEQ ID NO: 902218 - RNA, 19 nt, Artificial Sequence
  Description of Artificial Sequence: Synthetic oligonucleotide
  Sense strand starting at position 2618 of SEQ ID NO: 588974
accauuguuuaaucagagu

SEQ ID NO: 902219 - RNA, 19 nt, Artificial Sequence
  Description of Artificial Sequence: Synthetic oligonucleotide
  Antisense strand to SEQ ID NO: 902218
acucugauuaaacaauggu

SEQ ID NO: 902220 - RNA, 19 nt, Artificial Sequence
  Description of Artificial Sequence: Synthetic oligonucleotide
  Sense strand starting at position 2658 of SEQ ID NO: 588974
acugucugugaggguagaa

SEQ ID NO: 902221 - RNA, 19 nt, Artificial Sequence
  Description of Artificial Sequence: Synthetic oligonucleotide
  Antisense strand to SEQ ID NO: 902220
uucuacccucacagacagu

SEQ ID NO: 902222 - RNA, 19 nt, Artificial Sequence
  Description of Artificial Sequence: Synthetic oligonucleotide
  Sense strand starting at position 2683 of SEQ ID NO: 588974
ccacuacucccugauuagu

SEQ ID NO: 902223 - RNA, 19 nt, Artificial Sequence
  Description of Artificial Sequence: Synthetic oligonucleotide
  Antisense strand to SEQ ID NO: 902222
acuaaucagggaguagugg

SEQ ID NO: 902224 - RNA, 19 nt, Artificial Sequence
  Description of Artificial Sequence: Synthetic oligonucleotide
  Sense strand starting at position 2689 of SEQ ID NO: 588974
cucccugauuagucuaaag

SEQ ID NO: 902225 - RNA, 19 nt, Artificial Sequence
  Description of Artificial Sequence: Synthetic oligonucleotide
  Antisense strand to SEQ ID NO: 902224
cuuuagacuaaucagggag

SEQ ID NO: 902226 - RNA, 19 nt, Artificial Sequence
  Description of Artificial Sequence: Synthetic oligonucleotide
  Sense strand starting at position 2691 of SEQ ID NO: 588974
cccugauuagucuaaaguu

SEQ ID NO: 902227 - RNA, 19 nt, Artificial Sequence
  Description of Artificial Sequence: Synthetic oligonucleotide
  Antisense strand to SEQ ID NO: 902226
aacuuuagacuaaucaggg

SEQ ID NO: 902228 - RNA, 19 nt, Artificial Sequence
  Description of Artificial Sequence: Synthetic oligonucleotide
  Sense strand starting at position 2700 of SEQ ID NO: 588974
gucuaaaguuaauugauca

SEQ ID NO: 902229 - RNA, 19 nt, Artificial Sequence
  Description of Artificial Sequence: Synthetic oligonucleotide
  Antisense strand to SEQ ID NO: 902228
ugaucaauuaacuuuagac

SEQ ID NO: 902230 - RNA, 19 nt, Artificial Sequence
  Description of Artificial Sequence: Synthetic oligonucleotide
  Sense strand starting at position 3124 of SEQ ID NO: 588974
guugaucucagaggaaagu

SEQ ID NO: 902231 - RNA, 19 nt, Artificial Sequence
  Description of Artificial Sequence: Synthetic oligonucleotide
  Antisense strand to SEQ ID NO: 902230
acuuuccucugagaucaac

SEQ ID NO: 902232 - RNA, 19 nt, Artificial Sequence
  Description of Artificial Sequence: Synthetic oligonucleotide
  Sense strand starting at position 3188 of SEQ ID NO: 588974
uaaggaauggccugugaug

SEQ ID NO: 902233 - RNA, 19 nt, Artificial Sequence
  Description of Artificial Sequence: Synthetic oligonucleotide
  Antisense strand to SEQ ID NO: 902232
caucacaggccauuccuua

SEQ ID NO: 902234 - RNA, 19 nt, Artificial Sequence
  Description of Artificial Sequence: Synthetic oligonucleotide
  Sense strand starting at position 3531 of SEQ ID NO: 588974
ugucuuugagacuaaccua

SEQ ID NO: 902235 - RNA, 19 nt, Artificial Sequence
  Description of Artificial Sequence: Synthetic oligonucleotide
  Antisense strand to SEQ ID NO: 902234
uagguuagucucaaagaca

SEQ ID NO: 902236 - RNA, 19 nt, Artificial Sequence
  Description of Artificial Sequence: Synthetic oligonucleotide
  Sense strand starting at position 3596 of SEQ ID NO: 588974
cuuaauuguguguagaaac

SEQ ID NO: 902237 - RNA, 19 nt, Artificial Sequence
  Description of Artificial Sequence: Synthetic oligonucleotide
  Antisense strand to SEQ ID NO: 902236
guuucuacacacaauuaag

SEQ ID NO: 902238 - RNA, 19 nt, Artificial Sequence
  Description of Artificial Sequence: Synthetic oligonucleotide
  Sense strand starting at position 3634 of SEQ ID NO: 588974
cuccaagauuggguaagau

SEQ ID NO: 902239 - RNA, 19 nt, Artificial Sequence
  Description of Artificial Sequence: Synthetic oligonucleotide
  Antisense strand to SEQ ID NO: 902238
aucuuacccaaucuuggag

SEQ ID NO: 902240 - RNA, 19 nt, Artificial Sequence
  Description of Artificial Sequence: Synthetic oligonucleotide
  Sense strand starting at position 3643 of SEQ ID NO: 588974
uggguaagaugaucauauu

SEQ ID NO: 902241 - RNA, 19 nt, Artificial Sequence
  Description of Artificial Sequence: Synthetic oligonucleotide
  Antisense strand to SEQ ID NO: 902240
aauaugaucaucuuaccca

SEQ ID NO: 902242 - RNA, 19 nt, Artificial Sequence
  Description of Artificial Sequence: Synthetic oligonucleotide
  Sense strand starting at position 3706 of SEQ ID NO: 588974
ccuacuagacuauguuuga

SEQ ID NO: 902243 - RNA, 19 nt, Artificial Sequence
  Description of Artificial Sequence: Synthetic oligonucleotide
  Antisense strand to SEQ ID NO: 902242
ucaaacauagucuaguagg

SEQ ID NO: 902244 - RNA, 19 nt, Artificial Sequence
  Description of Artificial Sequence: Synthetic oligonucleotide
  Sense strand starting at position 3710 of SEQ ID NO: 588974
cuagacuauguuugaccau

SEQ ID NO: 902245 - RNA, 19 nt, Artificial Sequence
  Description of Artificial Sequence: Synthetic oligonucleotide
  Antisense strand to SEQ ID NO: 902244
auggucaaacauagucuag

SEQ ID NO: 902246 - RNA, 19 nt, Artificial Sequence
  Description of Artificial Sequence: Synthetic oligonucleotide
  Sense strand starting at position 3900 of SEQ ID NO: 588974
caugguuacucauucugga

SEQ ID NO: 902247 - RNA, 19 nt, Artificial Sequence
  Description of Artificial Sequence: Synthetic oligonucleotide
  Antisense strand to SEQ ID NO: 902246
uccagaaugaguaaccaug

SEQ ID NO: 902248 - RNA, 19 nt, Artificial Sequence
  Description of Artificial Sequence: Synthetic oligonucleotide
  Sense strand starting at position 3908 of SEQ ID NO: 588974
cucauucuggauugaacaa

SEQ ID NO: 902249 - RNA, 19 nt, Artificial Sequence
  Description of Artificial Sequence: Synthetic oligonucleotide
  Antisense strand to SEQ ID NO: 902248
uuguucaauccagaaugag

SEQ ID NO: 902250 - RNA, 19 nt, Artificial Sequence
  Description of Artificial Sequence: Synthetic oligonucleotide
  Sense strand starting at position 126 of SEQ ID NO: 588975
agauguagauaagccauua

SEQ ID NO: 902251 - RNA, 19 nt, Artificial Sequence
  Description of Artificial Sequence: Synthetic oligonucleotide
  Antisense strand to SEQ ID NO: 902250
uaauggcuuaucuacaucu

SEQ ID NO: 902252 - RNA, 19 nt, Artificial Sequence
  Description of Artificial Sequence: Synthetic oligonucleotide
  Sense strand starting at position 293 of SEQ ID NO: 588975
aguucuuuccagcaauuga

SEQ ID NO: 902253 - RNA, 19 nt, Artificial Sequence
  Description of Artificial Sequence: Synthetic oligonucleotide
  Antisense strand to SEQ ID NO: 902252
ucaauugcuggaaagaacu

SEQ ID NO: 902254 - RNA, 19 nt, Artificial Sequence
  Description of Artificial Sequence: Synthetic oligonucleotide
  Sense strand starting at position 317 of SEQ ID NO: 588975
uauagaguacuuggccuaa

SEQ ID NO: 902255 - RNA, 19 nt, Artificial Sequence
  Description of Artificial Sequence: Synthetic oligonucleotide
  Antisense strand to SEQ ID NO: 902254
uuaggccaaguacucuaua

SEQ ID NO: 902256 - RNA, 19 nt, Artificial Sequence
  Description of Artificial Sequence: Synthetic oligonucleotide
  Sense strand starting at position 319 of SEQ ID NO: 588975
uagaguacuuggccuaaga

SEQ ID NO: 902257 - RNA, 19 nt, Artificial Sequence
  Description of Artificial Sequence: Synthetic oligonucleotide
  Antisense strand to SEQ ID NO: 902256
ucuuaggccaaguacucua

SEQ ID NO: 902258 - RNA, 19 nt, Artificial Sequence
  Description of Artificial Sequence: Synthetic oligonucleotide
  Sense strand starting at position 536 of SEQ ID NO: 588975
acugguagauucucuguaa

SEQ ID NO: 902259 - RNA, 19 nt, Artificial Sequence
  Description of Artificial Sequence: Synthetic oligonucleotide
  Antisense strand to SEQ ID NO: 902258
uuacagagaaucuaccagu

SEQ ID NO: 902260 - RNA, 19 nt, Artificial Sequence
  Description of Artificial Sequence: Synthetic oligonucleotide
  Sense strand starting at position 537 of SEQ ID NO: 588975
cugguagauucucuguaaa

SEQ ID NO: 902261 - RNA, 19 nt, Artificial Sequence
  Description of Artificial Sequence: Synthetic oligonucleotide
  Antisense strand to SEQ ID NO: 902260
uuuacagagaaucuaccag

SEQ ID NO: 902262 - RNA, 19 nt, Artificial Sequence
  Description of Artificial Sequence: Synthetic oligonucleotide
  Sense strand starting at position 539 of SEQ ID NO: 588975
gguagauucucuguaaaca

SEQ ID NO: 902263 - RNA, 19 nt, Artificial Sequence
  Description of Artificial Sequence: Synthetic oligonucleotide
  Antisense strand to SEQ ID NO: 902262
uguuuacagagaaucuacc

SEQ ID NO: 902264 - RNA, 19 nt, Artificial Sequence
  Description of Artificial Sequence: Synthetic oligonucleotide
  Sense strand starting at position 540 of SEQ ID NO: 588975
guagauucucuguaaacac

SEQ ID NO: 902265 - RNA, 19 nt, Artificial Sequence
  Description of Artificial Sequence: Synthetic oligonucleotide
  Antisense strand to SEQ ID NO: 902264
guguuuacagagaaucuac

SEQ ID NO: 902266 - RNA, 19 nt, Artificial Sequence
  Description of Artificial Sequence: Synthetic oligonucleotide
  Sense strand starting at position 699 of SEQ ID NO: 588975
ugaggaacaucagagagaa

SEQ ID NO: 902267 - RNA, 19 nt, Artificial Sequence
  Description of Artificial Sequence: Synthetic oligonucleotide
  Antisense strand to SEQ ID NO: 902266
uucucucugauguuccuca

SEQ ID NO: 902268 - RNA, 19 nt, Artificial Sequence
  Description of Artificial Sequence: Synthetic oligonucleotide
  Sense strand starting at position 1176 of SEQ ID NO: 588975
ucagacagaucugcaaagu

SEQ ID NO: 902269 - RNA, 19 nt, Artificial Sequence
  Description of Artificial Sequence: Synthetic oligonucleotide
  Antisense strand to SEQ ID NO: 902268
acuuugcagaucugucuga

SEQ ID NO: 902270 - RNA, 19 nt, Artificial Sequence
  Description of Artificial Sequence: Synthetic oligonucleotide
  Sense strand starting at position 1177 of SEQ ID NO: 588975
cagacagaucugcaaaguu

SEQ ID NO: 902271 - RNA, 19 nt, Artificial Sequence
  Description of Artificial Sequence: Synthetic oligonucleotide
  Antisense strand to SEQ ID NO: 902270
aacuuugcagaucugucug

SEQ ID NO: 902272 - RNA, 19 nt, Artificial Sequence
  Description of Artificial Sequence: Synthetic oligonucleotide
  Sense strand starting at position 1196 of SEQ ID NO: 588975
uuaagaugauggucuaaca

SEQ ID NO: 902273 - RNA, 19 nt, Artificial Sequence
  Description of Artificial Sequence: Synthetic oligonucleotide
  Antisense strand to SEQ ID NO: 902272
uguuagaccaucaucuuaa

SEQ ID NO: 902274 - RNA, 19 nt, Artificial Sequence
  Description of Artificial Sequence: Synthetic oligonucleotide
  Sense strand starting at position 1346 of SEQ ID NO: 588975
cguuauacaguauauacua

SEQ ID NO: 902275 - RNA, 19 nt, Artificial Sequence
  Description of Artificial Sequence: Synthetic oligonucleotide
  Antisense strand to SEQ ID NO: 902274
uaguauauacuguauaacg

SEQ ID NO: 902276 - RNA, 19 nt, Artificial Sequence
  Description of Artificial Sequence: Synthetic oligonucleotide
  Sense strand starting at position 1700 of SEQ ID NO: 588975
uggguccauucuuuauaua

SEQ ID NO: 902277 - RNA, 19 nt, Artificial Sequence
  Description of Artificial Sequence: Synthetic oligonucleotide
  Antisense strand to SEQ ID NO: 902276
uauauaaagaauggaccca

SEQ ID NO: 902278 - RNA, 19 nt, Artificial Sequence
  Description of Artificial Sequence: Synthetic oligonucleotide
  Sense strand starting at position 1701 of SEQ ID NO: 588975
ggguccauucuuuauauag

SEQ ID NO: 902279 - RNA, 19 nt, Artificial Sequence
  Description of Artificial Sequence: Synthetic oligonucleotide
  Antisense strand to SEQ ID NO: 902278
cuauauaaagaauggaccc

SEQ ID NO: 902280 - RNA, 19 nt, Artificial Sequence
  Description of Artificial Sequence: Synthetic oligonucleotide
  Sense strand starting at position 1806 of SEQ ID NO: 588975
ugaaucaugugacuuggaa

SEQ ID NO: 902281 - RNA, 19 nt, Artificial Sequence
  Description of Artificial Sequence: Synthetic oligonucleotide
  Antisense strand to SEQ ID NO: 902280
uuccaagucacaugauuca

SEQ ID NO: 902282 - RNA, 19 nt, Artificial Sequence
  Description of Artificial Sequence: Synthetic oligonucleotide
  Sense strand starting at position 1928 of SEQ ID NO: 588975
uuaaguugugugcagagaa

SEQ ID NO: 902283 - RNA, 19 nt, Artificial Sequence
  Description of Artificial Sequence: Synthetic oligonucleotide
  Antisense strand to SEQ ID NO: 902282
uucucugcacacaacuuaa

SEQ ID NO: 902284 - RNA, 19 nt, Artificial Sequence
  Description of Artificial Sequence: Synthetic oligonucleotide
  Sense strand starting at position 2137 of SEQ ID NO: 588975
aggccuguggcucagaaga

SEQ ID NO: 902285 - RNA, 19 nt, Artificial Sequence
  Description of Artificial Sequence: Synthetic oligonucleotide
  Antisense strand to SEQ ID NO: 902284
ucuucugagccacaggccu

SEQ ID NO: 902286 - RNA, 19 nt, Artificial Sequence
  Description of Artificial Sequence: Synthetic oligonucleotide
  Sense strand starting at position 2485 of SEQ ID NO: 588975
aggaauuggcagugagaug

SEQ ID NO: 902287 - RNA, 19 nt, Artificial Sequence
  Description of Artificial Sequence: Synthetic oligonucleotide
  Antisense strand to SEQ ID NO: 902286
caucucacugccaauuccu

SEQ ID NO: 902288 - RNA, 19 nt, Artificial Sequence
  Description of Artificial Sequence: Synthetic oligonucleotide
  Sense strand starting at position 2588 of SEQ ID NO: 588975
agguguuguguguucucua

SEQ ID NO: 902289 - RNA, 19 nt, Artificial Sequence
  Description of Artificial Sequence: Synthetic oligonucleotide
  Antisense strand to SEQ ID NO: 902288
uagagaacacacaacaccu

SEQ ID NO: 902290 - RNA, 19 nt, Artificial Sequence
  Description of Artificial Sequence: Synthetic oligonucleotide
  Sense strand starting at position 2600 of SEQ ID NO: 588975
uucucuaugguauauguau

SEQ ID NO: 902291 - RNA, 19 nt, Artificial Sequence
  Description of Artificial Sequence: Synthetic oligonucleotide
  Antisense strand to SEQ ID NO: 902290
auacauauaccauagagaa

SEQ ID NO: 902292 - RNA, 19 nt, Artificial Sequence
  Description of Artificial Sequence: Synthetic oligonucleotide
  Sense strand starting at position 2635 of SEQ ID NO: 588975
gugcauuugugaucugcaa

SEQ ID NO: 902293 - RNA, 19 nt, Artificial Sequence
  Description of Artificial Sequence: Synthetic oligonucleotide
  Antisense strand to SEQ ID NO: 902292
uugcagaucacaaaugcac

SEQ ID NO: 902294 - RNA, 19 nt, Artificial Sequence
  Description of Artificial Sequence: Synthetic oligonucleotide
  Sense strand starting at position 2637 of SEQ ID NO: 588975
gcauuugugaucugcaaug

SEQ ID NO: 902295 - RNA, 19 nt, Artificial Sequence
  Description of Artificial Sequence: Synthetic oligonucleotide
  Antisense strand to SEQ ID NO: 902294
cauugcagaucacaaaugc

SEQ ID NO: 902296 - RNA, 19 nt, Artificial Sequence
  Description of Artificial Sequence: Synthetic oligonucleotide
  Sense strand starting at position 2717 of SEQ ID NO: 588975
guguguugugucuugugua

SEQ ID NO: 902297 - RNA, 19 nt, Artificial Sequence
  Description of Artificial Sequence: Synthetic oligonucleotide
  Antisense strand to SEQ ID NO: 902296
uacacaagacacaacacac

SEQ ID NO: 902298 - RNA, 19 nt, Artificial Sequence
  Description of Artificial Sequence: Synthetic oligonucleotide
  Sense strand starting at position 2749 of SEQ ID NO: 588975
uguguaugugacuacuaua

SEQ ID NO: 902299 - RNA, 19 nt, Artificial Sequence
  Description of Artificial Sequence: Synthetic oligonucleotide
  Antisense strand to SEQ ID NO: 902298
uauaguagucacauacaca

SEQ ID NO: 902300 - RNA, 19 nt, Artificial Sequence
  Description of Artificial Sequence: Synthetic oligonucleotide
  Sense strand starting at position 2921 of SEQ ID NO: 588975
agugucgaucacugaaaga

SEQ ID NO: 902301 - RNA, 19 nt, Artificial Sequence
  Description of Artificial Sequence: Synthetic oligonucleotide
  Antisense strand to SEQ ID NO: 902300
ucuuucagugaucgacacu

SEQ ID NO: 902302 - RNA, 19 nt, Artificial Sequence
  Description of Artificial Sequence: Synthetic oligonucleotide
  Sense strand starting at position 3049 of SEQ ID NO: 588975
uuagccuugggccaucaua

SEQ ID NO: 902303 - RNA, 19 nt, Artificial Sequence
  Description of Artificial Sequence: Synthetic oligonucleotide
  Antisense strand to SEQ ID NO: 902302
uaugauggcccaaggcuaa

SEQ ID NO: 902304 - RNA, 19 nt, Artificial Sequence
  Description of Artificial Sequence: Synthetic oligonucleotide
  Sense strand starting at position 3100 of SEQ ID NO: 588975
gcauuacagucaucaggaa

SEQ ID NO: 902305 - RNA, 19 nt, Artificial Sequence
  Description of Artificial Sequence: Synthetic oligonucleotide
  Antisense strand to SEQ ID NO: 902304
uuccugaugacuguaaugc

SEQ ID NO: 902306 - RNA, 19 nt, Artificial Sequence
  Description of Artificial Sequence: Synthetic oligonucleotide
  Sense strand starting at position 3133 of SEQ ID NO: 588975
augucagaguacuccauga

SEQ ID NO: 902307 - RNA, 19 nt, Artificial Sequence
  Description of Artificial Sequence: Synthetic oligonucleotide
  Antisense strand to SEQ ID NO: 902306
ucauggaguacucugacau

SEQ ID NO: 902308 - RNA, 19 nt, Artificial Sequence
  Description of Artificial Sequence: Synthetic oligonucleotide
  Sense strand starting at position 3135 of SEQ ID NO: 588975
gucagaguacuccaugaau

SEQ ID NO: 902309 - RNA, 19 nt, Artificial Sequence
  Description of Artificial Sequence: Synthetic oligonucleotide
  Antisense strand to SEQ ID NO: 902308
auucauggaguacucugac

SEQ ID NO: 902310 - RNA, 19 nt, Artificial Sequence
  Description of Artificial Sequence: Synthetic oligonucleotide
  Sense strand starting at position 3175 of SEQ ID NO: 588975
guuggacaauuccuguuaa

SEQ ID NO: 902311 - RNA, 19 nt, Artificial Sequence
  Description of Artificial Sequence: Synthetic oligonucleotide
  Antisense strand to SEQ ID NO: 902310
uuaacaggaauuguccaac

SEQ ID NO: 902312 - RNA, 19 nt, Artificial Sequence
  Description of Artificial Sequence: Synthetic oligonucleotide
  Sense strand starting at position 3265 of SEQ ID NO: 588975
cagaucacaucugugguua

SEQ ID NO: 902313 - RNA, 19 nt, Artificial Sequence
  Description of Artificial Sequence: Synthetic oligonucleotide
  Antisense strand to SEQ ID NO: 902312
uaaccacagaugugaucug

SEQ ID NO: 902314 - RNA, 19 nt, Artificial Sequence
  Description of Artificial Sequence: Synthetic oligonucleotide
  Sense strand starting at position 3279 of SEQ ID NO: 588975
gguuacuaaugaucuccau

SEQ ID NO: 902315 - RNA, 19 nt, Artificial Sequence
  Description of Artificial Sequence: Synthetic oligonucleotide
  Antisense strand to SEQ ID NO: 902314
auggagaucauuaguaacc

SEQ ID NO: 902316 - RNA, 19 nt, Artificial Sequence
  Description of Artificial Sequence: Synthetic oligonucleotide
  Sense strand starting at position 3371 of SEQ ID NO: 588975
ugguaucaccguggaagaa

SEQ ID NO: 902317 - RNA, 19 nt, Artificial Sequence
  Description of Artificial Sequence: Synthetic oligonucleotide
  Antisense strand to SEQ ID NO: 902316
uucuuccacggugauacca

SEQ ID NO: 902318 - RNA, 19 nt, Artificial Sequence
  Description of Artificial Sequence: Synthetic oligonucleotide
  Sense strand starting at position 3383 of SEQ ID NO: 588975
ggaagaagcucauucugca

SEQ ID NO: 902319 - RNA, 19 nt, Artificial Sequence
  Description of Artificial Sequence: Synthetic oligonucleotide
  Antisense strand to SEQ ID NO: 902318
ugcagaaugagcuucuucc

SEQ ID NO: 902320 - RNA, 19 nt, Artificial Sequence
  Description of Artificial Sequence: Synthetic oligonucleotide
  Sense strand starting at position 3560 of SEQ ID NO: 588975
cccaaauuagaucaggcuu

SEQ ID NO: 902321 - RNA, 19 nt, Artificial Sequence
  Description of Artificial Sequence: Synthetic oligonucleotide
  Antisense strand to SEQ ID NO: 902320
aagccugaucuaauuuggg

SEQ ID NO: 902322 - RNA, 19 nt, Artificial Sequence
  Description of Artificial Sequence: Synthetic oligonucleotide
  Sense strand starting at position 3769 of SEQ ID NO: 588975
cguucguuugguccgguaa

SEQ ID NO: 902323 - RNA, 19 nt, Artificial Sequence
  Description of Artificial Sequence: Synthetic oligonucleotide
  Antisense strand to SEQ ID NO: 902322
uuaccggaccaaacgaacg

SEQ ID NO: 902324 - RNA, 19 nt, Artificial Sequence
  Description of Artificial Sequence: Synthetic oligonucleotide
  Sense strand starting at position 3782 of SEQ ID NO: 588975
cgguaauuaaggugggaac

SEQ ID NO: 902325 - RNA, 19 nt, Artificial Sequence
  Description of Artificial Sequence: Synthetic oligonucleotide
  Antisense strand to SEQ ID NO: 902324
guucccaccuuaauuaccg

SEQ ID NO: 902326 - RNA, 19 nt, Artificial Sequence
  Description of Artificial Sequence: Synthetic oligonucleotide
  Sense strand starting at position 3784 of SEQ ID NO: 588975
guaauuaaggugggaacga

SEQ ID NO: 902327 - RNA, 19 nt, Artificial Sequence
  Description of Artificial Sequence: Synthetic oligonucleotide
  Antisense strand to SEQ ID NO: 902326
ucguucccaccuuaauuac

SEQ ID NO: 902328 - RNA, 19 nt, Artificial Sequence
  Description of Artificial Sequence: Synthetic oligonucleotide
  Sense strand starting at position 3824 of SEQ ID NO: 588975
gcauguaccuggcugauuu

SEQ ID NO: 902329 - RNA, 19 nt, Artificial Sequence
  Description of Artificial Sequence: Synthetic oligonucleotide
  Antisense strand to SEQ ID NO: 902328
aaaucagccagguacaugc

SEQ ID NO: 902330 - RNA, 19 nt, Artificial Sequence
  Description of Artificial Sequence: Synthetic oligonucleotide
  Sense strand starting at position 128 of SEQ ID NO: 588976
gcuguugaacuaggaugau

SEQ ID NO: 902331 - RNA, 19 nt, Artificial Sequence
  Description of Artificial Sequence: Synthetic oligonucleotide
  Antisense strand to SEQ ID NO: 902330
aucauccuaguucaacagc

SEQ ID NO: 902332 - RNA, 19 nt, Artificial Sequence
  Description of Artificial Sequence: Synthetic oligonucleotide
  Sense strand starting at position 227 of SEQ ID NO: 588976
gggacaucucaguaucagu

SEQ ID NO: 902333 - RNA, 19 nt, Artificial Sequence
  Description of Artificial Sequence: Synthetic oligonucleotide
  Antisense strand to SEQ ID NO: 902332
acugauacugagauguccc

SEQ ID NO: 902334 - RNA, 19 nt, Artificial Sequence
  Description of Artificial Sequence: Synthetic oligonucleotide
  Sense strand starting at position 278 of SEQ ID NO: 588976
auaggaugacuuugguaug

SEQ ID NO: 902335 - RNA, 19 nt, Artificial Sequence
  Description of Artificial Sequence: Synthetic oligonucleotide
  Antisense strand to SEQ ID NO: 902334
cauaccaaagucauccuau

SEQ ID NO: 902336 - RNA, 19 nt, Artificial Sequence
  Description of Artificial Sequence: Synthetic oligonucleotide
  Sense strand starting at position 337 of SEQ ID NO: 588976
cuggcuggccaauaauaua

SEQ ID NO: 902337 - RNA, 19 nt, Artificial Sequence
  Description of Artificial Sequence: Synthetic oligonucleotide
  Antisense strand to SEQ ID NO: 902336
uauauuauuggccagccag

SEQ ID NO: 902338 - RNA, 19 nt, Artificial Sequence
  Description of Artificial Sequence: Synthetic oligonucleotide
  Sense strand starting at position 404 of SEQ ID NO: 588976
gcauucgagaacugaucau

SEQ ID NO: 902339 - RNA, 19 nt, Artificial Sequence
  Description of Artificial Sequence: Synthetic oligonucleotide
  Antisense strand to SEQ ID NO: 902338
augaucaguucucgaaugc

SEQ ID NO: 902340 - RNA, 19 nt, Artificial Sequence
  Description of Artificial Sequence: Synthetic oligonucleotide
  Sense strand starting at position 556 of SEQ ID NO: 588976
guccacugucaagacuaua

SEQ ID NO: 902341 - RNA, 19 nt, Artificial Sequence
  Description of Artificial Sequence: Synthetic oligonucleotide
  Antisense strand to SEQ ID NO: 902340
uauagucuugacaguggac

SEQ ID NO: 902342 - RNA, 19 nt, Artificial Sequence
  Description of Artificial Sequence: Synthetic oligonucleotide
  Sense strand starting at position 579 of SEQ ID NO: 588976
gggaguaacuuccugucaa

SEQ ID NO: 902343 - RNA, 19 nt, Artificial Sequence
  Description of Artificial Sequence: Synthetic oligonucleotide
  Antisense strand to SEQ ID NO: 902342
uugacaggaaguuacuccc

SEQ ID NO: 902344 - RNA, 19 nt, Artificial Sequence
  Description of Artificial Sequence: Synthetic oligonucleotide
  Sense strand starting at position 1095 of SEQ ID NO: 588976
cugguacugaguuaagagu

SEQ ID NO: 902345 - RNA, 19 nt, Artificial Sequence
  Description of Artificial Sequence: Synthetic oligonucleotide
  Antisense strand to SEQ ID NO: 902344
acucuuaacucaguaccag

SEQ ID NO: 902346 - RNA, 19 nt, Artificial Sequence
  Description of Artificial Sequence: Synthetic oligonucleotide
  Sense strand starting at position 1241 of SEQ ID NO: 588976
ggaguuccucuagggauaa

SEQ ID NO: 902347 - RNA, 19 nt, Artificial Sequence
  Description of Artificial Sequence: Synthetic oligonucleotide
  Antisense strand to SEQ ID NO: 902346
uuaucccuagaggaacucc

SEQ ID NO: 902348 - RNA, 19 nt, Artificial Sequence
  Description of Artificial Sequence: Synthetic oligonucleotide
  Sense strand starting at position 1252 of SEQ ID NO: 588976
agggauaauuacuugagcu

SEQ ID NO: 902349 - RNA, 19 nt, Artificial Sequence
  Description of Artificial Sequence: Synthetic oligonucleotide
  Antisense strand to SEQ ID NO: 902348
agcucaaguaauuaucccu

SEQ ID NO: 902350 - RNA, 19 nt, Artificial Sequence
  Description of Artificial Sequence: Synthetic oligonucleotide
  Sense strand starting at position 1253 of SEQ ID NO: 588976
gggauaauuacuugagcuc

SEQ ID NO: 902351 - RNA, 19 nt, Artificial Sequence
  Description of Artificial Sequence: Synthetic oligonucleotide
  Antisense strand to SEQ ID NO: 902350
gagcucaaguaauuauccc

SEQ ID NO: 902352 - RNA, 19 nt, Artificial Sequence
  Description of Artificial Sequence: Synthetic oligonucleotide
  Sense strand starting at position 1254 of SEQ ID NO: 588976
ggauaauuacuugagcucu

SEQ ID NO: 902353 - RNA, 19 nt, Artificial Sequence
  Description of Artificial Sequence: Synthetic oligonucleotide
  Antisense strand to SEQ ID NO: 902352
agagcucaaguaauuaucc

SEQ ID NO: 902354 - RNA, 19 nt, Artificial Sequence
  Description of Artificial Sequence: Synthetic oligonucleotide
  Sense strand starting at position 1785 of SEQ ID NO: 588976
gggccacguagaugagaaa

SEQ ID NO: 902355 - RNA, 19 nt, Artificial Sequence
  Description of Artificial Sequence: Synthetic oligonucleotide
  Antisense strand to SEQ ID NO: 902354
uuucucaucuacguggccc

SEQ ID NO: 902356 - RNA, 19 nt, Artificial Sequence
  Description of Artificial Sequence: Synthetic oligonucleotide
  Sense strand starting at position 1797 of SEQ ID NO: 588976
ugagaaaguuccguaugga

SEQ ID NO: 902357 - RNA, 19 nt, Artificial Sequence
  Description of Artificial Sequence: Synthetic oligonucleotide
  Antisense strand to SEQ ID NO: 902356
uccauacggaacuuucuca

SEQ ID NO: 902358 - RNA, 19 nt, Artificial Sequence
  Description of Artificial Sequence: Synthetic oligonucleotide
  Sense strand starting at position 1798 of SEQ ID NO: 588976
gagaaaguuccguauggag

SEQ ID NO: 902359 - RNA, 19 nt, Artificial Sequence
  Description of Artificial Sequence: Synthetic oligonucleotide
  Antisense strand to SEQ ID NO: 902358
cuccauacggaacuuucuc

SEQ ID NO: 902360 - RNA, 19 nt, Artificial Sequence
  Description of Artificial Sequence: Synthetic oligonucleotide
  Sense strand starting at position 1800 of SEQ ID NO: 588976
gaaaguuccguauggagga

SEQ ID NO: 902361 - RNA, 19 nt, Artificial Sequence
  Description of Artificial Sequence: Synthetic oligonucleotide
  Antisense strand to SEQ ID NO: 902360
uccuccauacggaacuuuc

SEQ ID NO: 902362 - RNA, 19 nt, Artificial Sequence
  Description of Artificial Sequence: Synthetic oligonucleotide
  Sense strand starting at position 2467 of SEQ ID NO: 588976
ccgugaauucgauauuaua

SEQ ID NO: 902363 - RNA, 19 nt, Artificial Sequence
  Description of Artificial Sequence: Synthetic oligonucleotide
  Antisense strand to SEQ ID NO: 902362
uauaauaucgaauucacgg

SEQ ID NO: 902364 - RNA, 19 nt, Artificial Sequence
  Description of Artificial Sequence: Synthetic oligonucleotide
  Sense strand starting at position 2488 of SEQ ID NO: 588976
cuucguuuccuagauuaga

SEQ ID NO: 902365 - RNA, 19 nt, Artificial Sequence
  Description of Artificial Sequence: Synthetic oligonucleotide
  Antisense strand to SEQ ID NO: 902364
ucuaaucuaggaaacgaag

SEQ ID NO: 902366 - RNA, 19 nt, Artificial Sequence
  Description of Artificial Sequence: Synthetic oligonucleotide
  Sense strand starting at position 2491 of SEQ ID NO: 588976
cguuuccuagauuagacaa

SEQ ID NO: 902367 - RNA, 19 nt, Artificial Sequence
  Description of Artificial Sequence: Synthetic oligonucleotide
  Antisense strand to SEQ ID NO: 902366
uugucuaaucuaggaaacg

SEQ ID NO: 902368 - RNA, 19 nt, Artificial Sequence
  Description of Artificial Sequence: Synthetic oligonucleotide
  Sense strand starting at position 2588 of SEQ ID NO: 588976
gguugagacuguucuggaa

SEQ ID NO: 902369 - RNA, 19 nt, Artificial Sequence
  Description of Artificial Sequence: Synthetic oligonucleotide
  Antisense strand to SEQ ID NO: 902368
uuccagaacagucucaacc

SEQ ID NO: 902370 - RNA, 19 nt, Artificial Sequence
  Description of Artificial Sequence: Synthetic oligonucleotide
  Sense strand starting at position 2806 of SEQ ID NO: 588976
cuagucuuucuugaguaug

SEQ ID NO: 902371 - RNA, 19 nt, Artificial Sequence
  Description of Artificial Sequence: Synthetic oligonucleotide
  Antisense strand to SEQ ID NO: 902370
cauacucaagaaagacuag

SEQ ID NO: 902372 - RNA, 19 nt, Artificial Sequence
  Description of Artificial Sequence: Synthetic oligonucleotide
  Sense strand starting at position 2814 of SEQ ID NO: 588976
ucuugaguauguuugaaac

SEQ ID NO: 902373 - RNA, 19 nt, Artificial Sequence
  Description of Artificial Sequence: Synthetic oligonucleotide
  Antisense strand to SEQ ID NO: 902372
guuucaaacauacucaaga

SEQ ID NO: 902374 - RNA, 19 nt, Artificial Sequence
  Description of Artificial Sequence: Synthetic oligonucleotide
  Sense strand starting at position 3084 of SEQ ID NO: 588976
caggcuggucuuggaaacu

SEQ ID NO: 902375 - RNA, 19 nt, Artificial Sequence
  Description of Artificial Sequence: Synthetic oligonucleotide
  Antisense strand to SEQ ID NO: 902374
aguuuccaagaccagccug

SEQ ID NO: 902376 - RNA, 19 nt, Artificial Sequence
  Description of Artificial Sequence: Synthetic oligonucleotide
  Sense strand starting at position 3321 of SEQ ID NO: 588976
gcccuuuaucuggaacauc

SEQ ID NO: 902377 - RNA, 19 nt, Artificial Sequence
  Description of Artificial Sequence: Synthetic oligonucleotide
  Antisense strand to SEQ ID NO: 902376
gauguuccagauaaagggc

SEQ ID NO: 902378 - RNA, 19 nt, Artificial Sequence
  Description of Artificial Sequence: Synthetic oligonucleotide
  Sense strand starting at position 3357 of SEQ ID NO: 588976
ugcacuaaagucuagucau

SEQ ID NO: 902379 - RNA, 19 nt, Artificial Sequence
  Description of Artificial Sequence: Synthetic oligonucleotide
  Antisense strand to SEQ ID NO: 902378
augacuagacuuuagugca

SEQ ID NO: 902380 - RNA, 19 nt, Artificial Sequence
  Description of Artificial Sequence: Synthetic oligonucleotide
  Sense strand starting at position 3360 of SEQ ID NO: 588976
acuaaagucuagucauucu

SEQ ID NO: 902381 - RNA, 19 nt, Artificial Sequence
  Description of Artificial Sequence: Synthetic oligonucleotide
  Antisense strand to SEQ ID NO: 902380
agaaugacuagacuuuagu

SEQ ID NO: 902382 - RNA, 19 nt, Artificial Sequence
  Description of Artificial Sequence: Synthetic oligonucleotide
  Sense strand starting at position 3398 of SEQ ID NO: 588976
gguucuaaugcagauaauu

SEQ ID NO: 902383 - RNA, 19 nt, Artificial Sequence
  Description of Artificial Sequence: Synthetic oligonucleotide
  Antisense strand to SEQ ID NO: 902382
aauuaucugcauuagaacc

SEQ ID NO: 902384 - RNA, 19 nt, Artificial Sequence
  Description of Artificial Sequence: Synthetic oligonucleotide
  Sense strand starting at position 3418 of SEQ ID NO: 588976
ucaugucaaguugaauuau

SEQ ID NO: 902385 - RNA, 19 nt, Artificial Sequence
  Description of Artificial Sequence: Synthetic oligonucleotide
  Antisense strand to SEQ ID NO: 902384
auaauucaacuugacauga

SEQ ID NO: 902386 - RNA, 19 nt, Artificial Sequence
  Description of Artificial Sequence: Synthetic oligonucleotide
  Sense strand starting at position 3460 of SEQ ID NO: 588976
aucuguuagucuuuaacag

SEQ ID NO: 902387 - RNA, 19 nt, Artificial Sequence
  Description of Artificial Sequence: Synthetic oligonucleotide
  Antisense strand to SEQ ID NO: 902386
cuguuaaagacuaacagau

SEQ ID NO: 902388 - RNA, 19 nt, Artificial Sequence
  Description of Artificial Sequence: Synthetic oligonucleotide
  Sense strand starting at position 3495 of SEQ ID NO: 588976
uggacaucgcuagagucaa

SEQ ID NO: 902389 - RNA, 19 nt, Artificial Sequence
  Description of Artificial Sequence: Synthetic oligonucleotide
  Antisense strand to SEQ ID NO: 902388
uugacucuagcgaugucca

SEQ ID NO: 902390 - RNA, 19 nt, Artificial Sequence
  Description of Artificial Sequence: Synthetic oligonucleotide
  Sense strand starting at position 3499 of SEQ ID NO: 588976
caucgcuagagucaagagu

SEQ ID NO: 902391 - RNA, 19 nt, Artificial Sequence
  Description of Artificial Sequence: Synthetic oligonucleotide
  Antisense strand to SEQ ID NO: 902390
acucuugacucuagcgaug

SEQ ID NO: 902392 - RNA, 19 nt, Artificial Sequence
  Description of Artificial Sequence: Synthetic oligonucleotide
  Sense strand starting at position 3507 of SEQ ID NO: 588976
gagucaagaguuugaugca

SEQ ID NO: 902393 - RNA, 19 nt, Artificial Sequence
  Description of Artificial Sequence: Synthetic oligonucleotide
  Antisense strand to SEQ ID NO: 902392
ugcaucaaacucuugacuc

SEQ ID NO: 902394 - RNA, 19 nt, Artificial Sequence
  Description of Artificial Sequence: Synthetic oligonucleotide
  Sense strand starting at position 3655 of SEQ ID NO: 588976
ccagaauguuccuucuuga

SEQ ID NO: 902395 - RNA, 19 nt, Artificial Sequence
  Description of Artificial Sequence: Synthetic oligonucleotide
  Antisense strand to SEQ ID NO: 902394
ucaagaaggaacauucugg

SEQ ID NO: 902396 - RNA, 19 nt, Artificial Sequence
  Description of Artificial Sequence: Synthetic oligonucleotide
  Sense strand starting at position 3658 of SEQ ID NO: 588976
gaauguuccuucuugacug

SEQ ID NO: 902397 - RNA, 19 nt, Artificial Sequence
  Description of Artificial Sequence: Synthetic oligonucleotide
  Antisense strand to SEQ ID NO: 902396
cagucaagaaggaacauuc

SEQ ID NO: 902398 - RNA, 19 nt, Artificial Sequence
  Description of Artificial Sequence: Synthetic oligonucleotide
  Sense strand starting at position 3718 of SEQ ID NO: 588976
auaauuuacuaugagagca

SEQ ID NO: 902399 - RNA, 19 nt, Artificial Sequence
  Description of Artificial Sequence: Synthetic oligonucleotide
  Antisense strand to SEQ ID NO: 902398
ugcucucauaguaaauuau

SEQ ID NO: 902400 - RNA, 19 nt, Artificial Sequence
  Description of Artificial Sequence: Synthetic oligonucleotide
  Sense strand starting at position 3757 of SEQ ID NO: 588976
ucaacuuucugguugacag

SEQ ID NO: 902401 - RNA, 19 nt, Artificial Sequence
  Description of Artificial Sequence: Synthetic oligonucleotide
  Antisense strand to SEQ ID NO: 902400
cugucaaccagaaaguuga

SEQ ID NO: 902402 - RNA, 19 nt, Artificial Sequence
  Description of Artificial Sequence: Synthetic oligonucleotide
  Sense strand starting at position 3800 of SEQ ID NO: 588976
gggaacucaucugcuuauu

SEQ ID NO: 902403 - RNA, 19 nt, Artificial Sequence
  Description of Artificial Sequence: Synthetic oligonucleotide
  Antisense strand to SEQ ID NO: 902402
aauaagcagaugaguuccc

SEQ ID NO: 902404 - RNA, 19 nt, Artificial Sequence
  Description of Artificial Sequence: Synthetic oligonucleotide
  Sense strand starting at position 3922 of SEQ ID NO: 588976
cuuggugaguguuuagaaa

SEQ ID NO: 902405 - RNA, 19 nt, Artificial Sequence
  Description of Artificial Sequence: Synthetic oligonucleotide
  Antisense strand to SEQ ID NO: 902404
uuucuaaacacucaccaag

SEQ ID NO: 902406 - RNA, 19 nt, Artificial Sequence
  Description of Artificial Sequence: Synthetic oligonucleotide
  Sense strand starting at position 3934 of SEQ ID NO: 588976
uuagaaagccugcagugau

SEQ ID NO: 902407 - RNA, 19 nt, Artificial Sequence
  Description of Artificial Sequence: Synthetic oligonucleotide
  Antisense strand to SEQ ID NO: 902406
aucacugcaggcuuucuaa

SEQ ID NO: 902408 - RNA, 19 nt, Artificial Sequence
  Description of Artificial Sequence: Synthetic oligonucleotide
  Sense strand starting at position 3944 of SEQ ID NO: 588976
ugcagugauguugaaagca

SEQ ID NO: 902409 - RNA, 19 nt, Artificial Sequence
  Description of Artificial Sequence: Synthetic oligonucleotide
  Antisense strand to SEQ ID NO: 902408
ugcuuucaacaucacugca

SEQ ID NO: 902410 - RNA, 19 nt, Artificial Sequence
  Description of Artificial Sequence: Synthetic oligonucleotide
  Sense strand starting at position 1193 of SEQ ID NO: 588977
cguauuucuucuuagagau

SEQ ID NO: 902411 - RNA, 19 nt, Artificial Sequence
  Description of Artificial Sequence: Synthetic oligonucleotide
  Antisense strand to SEQ ID NO: 902410
aucucuaagaagaaauacg

SEQ ID NO: 902412 - RNA, 19 nt, Artificial Sequence
  Description of Artificial Sequence: Synthetic oligonucleotide
  Sense strand starting at position 1206 of SEQ ID NO: 588977
agagauauacauuacgcua

SEQ ID NO: 902413 - RNA, 19 nt, Artificial Sequence
  Description of Artificial Sequence: Synthetic oligonucleotide
  Antisense strand to SEQ ID NO: 902412
uagcguaauguauaucucu

SEQ ID NO: 902414 - RNA, 19 nt, Artificial Sequence
  Description of Artificial Sequence: Synthetic oligonucleotide
  Sense strand starting at position 1231 of SEQ ID NO: 588977
ucugaagaauggcucgauu

SEQ ID NO: 902415 - RNA, 19 nt, Artificial Sequence
  Description of Artificial Sequence: Synthetic oligonucleotide
  Antisense strand to SEQ ID NO: 902414
aaucgagccauucuucaga

SEQ ID NO: 902416 - RNA, 19 nt, Artificial Sequence
  Description of Artificial Sequence: Synthetic oligonucleotide
  Sense strand starting at position 1330 of SEQ ID NO: 588977
aucuaaaucgugugguauc

SEQ ID NO: 902417 - RNA, 19 nt, Artificial Sequence
  Description of Artificial Sequence: Synthetic oligonucleotide
  Antisense strand to SEQ ID NO: 902416
gauaccacacgauuuagau

SEQ ID NO: 902418 - RNA, 19 nt, Artificial Sequence
  Description of Artificial Sequence: Synthetic oligonucleotide
  Sense strand starting at position 1379 of SEQ ID NO: 588977
gggagaaagcguuaauucu

SEQ ID NO: 902419 - RNA, 19 nt, Artificial Sequence
  Description of Artificial Sequence: Synthetic oligonucleotide
  Antisense strand to SEQ ID NO: 902418
agaauuaacgcuuucuccc

SEQ ID NO: 902420 - RNA, 19 nt, Artificial Sequence
  Description of Artificial Sequence: Synthetic oligonucleotide
  Sense strand starting at position 1387 of SEQ ID NO: 588977
gcguuaauucuuccagcuu

SEQ ID NO: 902421 - RNA, 19 nt, Artificial Sequence
  Description of Artificial Sequence: Synthetic oligonucleotide
  Antisense strand to SEQ ID NO: 902420
aagcuggaagaauuaacgc

SEQ ID NO: 902422 - RNA, 19 nt, Artificial Sequence
  Description of Artificial Sequence: Synthetic oligonucleotide
  Sense strand starting at position 1402 of SEQ ID NO: 588977
gcuuuagagccagacguaa

SEQ ID NO: 902423 - RNA, 19 nt, Artificial Sequence
  Description of Artificial Sequence: Synthetic oligonucleotide
  Antisense strand to SEQ ID NO: 902422
uuacgucuggcucuaaagc

SEQ ID NO: 902424 - RNA, 19 nt, Artificial Sequence
  Description of Artificial Sequence: Synthetic oligonucleotide
  Sense strand starting at position 1404 of SEQ ID NO: 588977
uuuagagccagacguaaua

SEQ ID NO: 902425 - RNA, 19 nt, Artificial Sequence
  Description of Artificial Sequence: Synthetic oligonucleotide
  Antisense strand to SEQ ID NO: 902424
uauuacgucuggcucuaaa

SEQ ID NO: 902426 - RNA, 19 nt, Artificial Sequence
  Description of Artificial Sequence: Synthetic oligonucleotide
  Sense strand starting at position 1985 of SEQ ID NO: 588977
ccgccucuuccuggaggau

SEQ ID NO: 902427 - RNA, 19 nt, Artificial Sequence
  Description of Artificial Sequence: Synthetic oligonucleotide
  Antisense strand to SEQ ID NO: 902426
auccuccaggaagaggcgg

SEQ ID NO: 902428 - RNA, 19 nt, Artificial Sequence
  Description of Artificial Sequence: Synthetic oligonucleotide
  Sense strand starting at position 1986 of SEQ ID NO: 588977
cgccucuuccuggaggaua

SEQ ID NO: 902429 - RNA, 19 nt, Artificial Sequence
  Description of Artificial Sequence: Synthetic oligonucleotide
  Antisense strand to SEQ ID NO: 902428
uauccuccaggaagaggcg

SEQ ID NO: 902430 - RNA, 19 nt, Artificial Sequence
  Description of Artificial Sequence: Synthetic oligonucleotide
  Sense strand starting at position 2065 of SEQ ID NO: 588977
ucgacuuuguuacuuuaau

SEQ ID NO: 902431 - RNA, 19 nt, Artificial Sequence
  Description of Artificial Sequence: Synthetic oligonucleotide
  Antisense strand to SEQ ID NO: 902430
auuaaaguaacaaagucga

SEQ ID NO: 902432 - RNA, 19 nt, Artificial Sequence
  Description of Artificial Sequence: Synthetic oligonucleotide
  Sense strand starting at position 2066 of SEQ ID NO: 588977
cgacuuuguuacuuuaauu

SEQ ID NO: 902433 - RNA, 19 nt, Artificial Sequence
  Description of Artificial Sequence: Synthetic oligonucleotide
  Antisense strand to SEQ ID NO: 902432
aauuaaaguaacaaagucg

SEQ ID NO: 902434 - RNA, 19 nt, Artificial Sequence
  Description of Artificial Sequence: Synthetic oligonucleotide
  Sense strand starting at position 2492 of SEQ ID NO: 588977
gacagucuugagugucaga

SEQ ID NO: 902435 - RNA, 19 nt, Artificial Sequence
  Description of Artificial Sequence: Synthetic oligonucleotide
  Antisense strand to SEQ ID NO: 902434
ucugacacucaagacuguc

SEQ ID NO: 902436 - RNA, 19 nt, Artificial Sequence
  Description of Artificial Sequence: Synthetic oligonucleotide
  Sense strand starting at position 2505 of SEQ ID NO: 588977
gucagaucauaguuggaau

SEQ ID NO: 902437 - RNA, 19 nt, Artificial Sequence
  Description of Artificial Sequence: Synthetic oligonucleotide
  Antisense strand to SEQ ID NO: 902436
auuccaacuaugaucugac

SEQ ID NO: 902438 - RNA, 19 nt, Artificial Sequence
  Description of Artificial Sequence: Synthetic oligonucleotide
  Sense strand starting at position 2508 of SEQ ID NO: 588977
agaucauaguuggaauaag

SEQ ID NO: 902439 - RNA, 19 nt, Artificial Sequence
  Description of Artificial Sequence: Synthetic oligonucleotide
  Antisense strand to SEQ ID NO: 902438
cuuauuccaacuaugaucu

SEQ ID NO: 902440 - RNA, 19 nt, Artificial Sequence
  Description of Artificial Sequence: Synthetic oligonucleotide
  Sense strand starting at position 2851 of SEQ ID NO: 588977
gcgccuggccggaaagauu

SEQ ID NO: 902441 - RNA, 19 nt, Artificial Sequence
  Description of Artificial Sequence: Synthetic oligonucleotide
  Antisense strand to SEQ ID NO: 902440
aaucuuuccggccaggcgc

SEQ ID NO: 902442 - RNA, 19 nt, Artificial Sequence
  Description of Artificial Sequence: Synthetic oligonucleotide
  Sense strand starting at position 2889 of SEQ ID NO: 588977
uggaauugcuguucuuaca

SEQ ID NO: 902443 - RNA, 19 nt, Artificial Sequence
  Description of Artificial Sequence: Synthetic oligonucleotide
  Antisense strand to SEQ ID NO: 902442
uguaagaacagcaauucca

SEQ ID NO: 902444 - RNA, 19 nt, Artificial Sequence
  Description of Artificial Sequence: Synthetic oligonucleotide
  Sense strand starting at position 2928 of SEQ ID NO: 588977
acuguugcauacccugaua

SEQ ID NO: 902445 - RNA, 19 nt, Artificial Sequence
  Description of Artificial Sequence: Synthetic oligonucleotide
  Antisense strand to SEQ ID NO: 902444
uaucaggguaugcaacagu

SEQ ID NO: 902446 - RNA, 19 nt, Artificial Sequence
  Description of Artificial Sequence: Synthetic oligonucleotide
  Sense strand starting at position 2931 of SEQ ID NO: 588977
guugcauacccugauacca

SEQ ID NO: 902447 - RNA, 19 nt, Artificial Sequence
  Description of Artificial Sequence: Synthetic oligonucleotide
  Antisense strand to SEQ ID NO: 902446
ugguaucaggguaugcaac

SEQ ID NO: 902448 - RNA, 19 nt, Artificial Sequence
  Description of Artificial Sequence: Synthetic oligonucleotide
  Sense strand starting at position 2946 of SEQ ID NO: 588977
accaaauuaguguaaguac

SEQ ID NO: 902449 - RNA, 19 nt, Artificial Sequence
  Description of Artificial Sequence: Synthetic oligonucleotide
  Antisense strand to SEQ ID NO: 902448
guacuuacacuaauuuggu

SEQ ID NO: 902450 - RNA, 19 nt, Artificial Sequence
  Description of Artificial Sequence: Synthetic oligonucleotide
  Sense strand starting at position 2957 of SEQ ID NO: 588977
guaaguacuguguaagaaa

SEQ ID NO: 902451 - RNA, 19 nt, Artificial Sequence
  Description of Artificial Sequence: Synthetic oligonucleotide
  Antisense strand to SEQ ID NO: 902450
uuucuuacacaguacuuac

SEQ ID NO: 902452 - RNA, 19 nt, Artificial Sequence
  Description of Artificial Sequence: Synthetic oligonucleotide
  Sense strand starting at position 3052 of SEQ ID NO: 588977
cucucauauuuguuuagca

SEQ ID NO: 902453 - RNA, 19 nt, Artificial Sequence
  Description of Artificial Sequence: Synthetic oligonucleotide
  Antisense strand to SEQ ID NO: 902452
ugcuaaacaaauaugagag

SEQ ID NO: 902454 - RNA, 19 nt, Artificial Sequence
  Description of Artificial Sequence: Synthetic oligonucleotide
  Sense strand starting at position 3053 of SEQ ID NO: 588977
ucucauauuuguuuagcau

SEQ ID NO: 902455 - RNA, 19 nt, Artificial Sequence
  Description of Artificial Sequence: Synthetic oligonucleotide
  Antisense strand to SEQ ID NO: 902454
augcuaaacaaauaugaga

SEQ ID NO: 902456 - RNA, 19 nt, Artificial Sequence
  Description of Artificial Sequence: Synthetic oligonucleotide
  Sense strand starting at position 3134 of SEQ ID NO: 588977
augacaauuucugagauua

SEQ ID NO: 902457 - RNA, 19 nt, Artificial Sequence
  Description of Artificial Sequence: Synthetic oligonucleotide
  Antisense strand to SEQ ID NO: 902456
uaaucucagaaauugucau

SEQ ID NO: 902458 - RNA, 19 nt, Artificial Sequence
  Description of Artificial Sequence: Synthetic oligonucleotide
  Sense strand starting at position 3192 of SEQ ID NO: 588977
augguaauauaggaacaaa

SEQ ID NO: 902459 - RNA, 19 nt, Artificial Sequence
  Description of Artificial Sequence: Synthetic oligonucleotide
  Antisense strand to SEQ ID NO: 902458
uuuguuccuauauuaccau

SEQ ID NO: 902460 - RNA, 19 nt, Artificial Sequence
  Description of Artificial Sequence: Synthetic oligonucleotide
  Sense strand starting at position 3281 of SEQ ID NO: 588977
uggaauuacuucuccaguc

SEQ ID NO: 902461 - RNA, 19 nt, Artificial Sequence
  Description of Artificial Sequence: Synthetic oligonucleotide
  Antisense strand to SEQ ID NO: 902460
gacuggagaaguaauucca

SEQ ID NO: 902462 - RNA, 19 nt, Artificial Sequence
  Description of Artificial Sequence: Synthetic oligonucleotide
  Sense strand starting at position 3282 of SEQ ID NO: 588977
ggaauuacuucuccagucu

SEQ ID NO: 902463 - RNA, 19 nt, Artificial Sequence
  Description of Artificial Sequence: Synthetic oligonucleotide
  Antisense strand to SEQ ID NO: 902462
agacuggagaaguaauucc

SEQ ID NO: 902464 - RNA, 19 nt, Artificial Sequence
  Description of Artificial Sequence: Synthetic oligonucleotide
  Sense strand starting at position 3348 of SEQ ID NO: 588977
aucuuaagucuacagaggu

SEQ ID NO: 902465 - RNA, 19 nt, Artificial Sequence
  Description of Artificial Sequence: Synthetic oligonucleotide
  Antisense strand to SEQ ID NO: 902464
accucuguagacuuaagau

SEQ ID NO: 902466 - RNA, 19 nt, Artificial Sequence
  Description of Artificial Sequence: Synthetic oligonucleotide
  Sense strand starting at position 3354 of SEQ ID NO: 588977
agucuacagaggugauagu

SEQ ID NO: 902467 - RNA, 19 nt, Artificial Sequence
  Description of Artificial Sequence: Synthetic oligonucleotide
  Antisense strand to SEQ ID NO: 902466
acuaucaccucuguagacu

SEQ ID NO: 902468 - RNA, 19 nt, Artificial Sequence
  Description of Artificial Sequence: Synthetic oligonucleotide
  Sense strand starting at position 3455 of SEQ ID NO: 588977
aguagaagcugacuaaauc

SEQ ID NO: 902469 - RNA, 19 nt, Artificial Sequence
  Description of Artificial Sequence: Synthetic oligonucleotide
  Antisense strand to SEQ ID NO: 902468
gauuuagucagcuucuacu

SEQ ID NO: 902470 - RNA, 19 nt, Artificial Sequence
  Description of Artificial Sequence: Synthetic oligonucleotide
  Sense strand starting at position 3456 of SEQ ID NO: 588977
guagaagcugacuaaaucu

SEQ ID NO: 902471 - RNA, 19 nt, Artificial Sequence
  Description of Artificial Sequence: Synthetic oligonucleotide
  Antisense strand to SEQ ID NO: 902470
agauuuagucagcuucuac

SEQ ID NO: 902472 - RNA, 19 nt, Artificial Sequence
  Description of Artificial Sequence: Synthetic oligonucleotide
  Sense strand starting at position 3561 of SEQ ID NO: 588977
aauuguguucucuaaguga

SEQ ID NO: 902473 - RNA, 19 nt, Artificial Sequence
  Description of Artificial Sequence: Synthetic oligonucleotide
  Antisense strand to SEQ ID NO: 902472
ucacuuagagaacacaauu

SEQ ID NO: 902474 - RNA, 19 nt, Artificial Sequence
  Description of Artificial Sequence: Synthetic oligonucleotide
  Sense strand starting at position 3564 of SEQ ID NO: 588977
uguguucucuaagugauaa

SEQ ID NO: 902475 - RNA, 19 nt, Artificial Sequence
  Description of Artificial Sequence: Synthetic oligonucleotide
  Antisense strand to SEQ ID NO: 902474
uuaucacuuagagaacaca

SEQ ID NO: 902476 - RNA, 19 nt, Artificial Sequence
  Description of Artificial Sequence: Synthetic oligonucleotide
  Sense strand starting at position 3682 of SEQ ID NO: 588977
ccagcaacugaauguguua

SEQ ID NO: 902477 - RNA, 19 nt, Artificial Sequence
  Description of Artificial Sequence: Synthetic oligonucleotide
  Antisense strand to SEQ ID NO: 902476
uaacacauucaguugcugg

SEQ ID NO: 902478 - RNA, 19 nt, Artificial Sequence
  Description of Artificial Sequence: Synthetic oligonucleotide
  Sense strand starting at position 3789 of SEQ ID NO: 588977
uugauauagaugugggcaa

SEQ ID NO: 902479 - RNA, 19 nt, Artificial Sequence
  Description of Artificial Sequence: Synthetic oligonucleotide
  Antisense strand to SEQ ID NO: 902478
uugcccacaucuauaucaa

SEQ ID NO: 902480 - RNA, 19 nt, Artificial Sequence
  Description of Artificial Sequence: Synthetic oligonucleotide
  Sense strand starting at position 3860 of SEQ ID NO: 588977
acugacaagcuguauaguu

SEQ ID NO: 902481 - RNA, 19 nt, Artificial Sequence
  Description of Artificial Sequence: Synthetic oligonucleotide
  Antisense strand to SEQ ID NO: 902480
aacuauacagcuugucagu

SEQ ID NO: 902482 - RNA, 19 nt, Artificial Sequence
  Description of Artificial Sequence: Synthetic oligonucleotide
  Sense strand starting at position 3905 of SEQ ID NO: 588977
ucagccauguguuuaagau

SEQ ID NO: 902483 - RNA, 19 nt, Artificial Sequence
  Description of Artificial Sequence: Synthetic oligonucleotide
  Antisense strand to SEQ ID NO: 902482
aucuuaaacacauggcuga

SEQ ID NO: 902484 - RNA, 19 nt, Artificial Sequence
  Description of Artificial Sequence: Synthetic oligonucleotide
  Sense strand starting at position 3906 of SEQ ID NO: 588977
cagccauguguuuaagaua

SEQ ID NO: 902485 - RNA, 19 nt, Artificial Sequence
  Description of Artificial Sequence: Synthetic oligonucleotide
  Antisense strand to SEQ ID NO: 902484
uaucuuaaacacauggcug

SEQ ID NO: 902486 - RNA, 19 nt, Artificial Sequence
  Description of Artificial Sequence: Synthetic oligonucleotide
  Sense strand starting at position 3936 of SEQ ID NO: 588977
ccugccagucccugaauga

SEQ ID NO: 902487 - RNA, 19 nt, Artificial Sequence
  Description of Artificial Sequence: Synthetic oligonucleotide
  Antisense strand to SEQ ID NO: 902486
ucauucagggacuggcagg

SEQ ID NO: 902488 - RNA, 19 nt, Artificial Sequence
  Description of Artificial Sequence: Synthetic oligonucleotide
  Sense strand starting at position 3947 of SEQ ID NO: 588977
cugaaugacugggaagagu

SEQ ID NO: 902489 - RNA, 19 nt, Artificial Sequence
  Description of Artificial Sequence: Synthetic oligonucleotide
  Antisense strand to SEQ ID NO: 902488
acucuucccagucauucag

SEQ ID NO: 902490 - RNA, 19 nt, Artificial Sequence
  Description of Artificial Sequence: Synthetic oligonucleotide
  Sense strand starting at position 125 of SEQ ID NO: 588978
aaaugagugagauguguug

SEQ ID NO: 902491 - RNA, 19 nt, Artificial Sequence
  Description of Artificial Sequence: Synthetic oligonucleotide
  Antisense strand to SEQ ID NO: 902490
caacacaucucacucauuu

SEQ ID NO: 902492 - RNA, 19 nt, Artificial Sequence
  Description of Artificial Sequence: Synthetic oligonucleotide
  Sense strand starting at position 127 of SEQ ID NO: 588978
augagugagauguguugau

SEQ ID NO: 902493 - RNA, 19 nt, Artificial Sequence
  Description of Artificial Sequence: Synthetic oligonucleotide
  Antisense strand to SEQ ID NO: 902492
aucaacacaucucacucau

SEQ ID NO: 902494 - RNA, 19 nt, Artificial Sequence
  Description of Artificial Sequence: Synthetic oligonucleotide
  Sense strand starting at position 131 of SEQ ID NO: 588978
gugagauguguugaucucu

SEQ ID NO: 902495 - RNA, 19 nt, Artificial Sequence
  Description of Artificial Sequence: Synthetic oligonucleotide
  Antisense strand to SEQ ID NO: 902494
agagaucaacacaucucac

SEQ ID NO: 902496 - RNA, 19 nt, Artificial Sequence
  Description of Artificial Sequence: Synthetic oligonucleotide
  Sense strand starting at position 136 of SEQ ID NO: 588978
auguguugaucucuaagau

SEQ ID NO: 902497 - RNA, 19 nt, Artificial Sequence
  Description of Artificial Sequence: Synthetic oligonucleotide
  Antisense strand to SEQ ID NO: 902496
aucuuagagaucaacacau

SEQ ID NO: 902498 - RNA, 19 nt, Artificial Sequence
  Description of Artificial Sequence: Synthetic oligonucleotide
  Sense strand starting at position 137 of SEQ ID NO: 588978
uguguugaucucuaagaug

SEQ ID NO: 902499 - RNA, 19 nt, Artificial Sequence
  Description of Artificial Sequence: Synthetic oligonucleotide
  Antisense strand to SEQ ID NO: 902498
caucuuagagaucaacaca

SEQ ID NO: 902500 - RNA, 19 nt, Artificial Sequence
  Description of Artificial Sequence: Synthetic oligonucleotide
  Sense strand starting at position 154 of SEQ ID NO: 588978
uggauuugaucauguccac

SEQ ID NO: 902501 - RNA, 19 nt, Artificial Sequence
  Description of Artificial Sequence: Synthetic oligonucleotide
  Antisense strand to SEQ ID NO: 902500
guggacaugaucaaaucca

SEQ ID NO: 902502 - RNA, 19 nt, Artificial Sequence
  Description of Artificial Sequence: Synthetic oligonucleotide
  Sense strand starting at position 227 of SEQ ID NO: 588978
caaagcuuugaugguauua

SEQ ID NO: 902503 - RNA, 19 nt, Artificial Sequence
  Description of Artificial Sequence: Synthetic oligonucleotide
  Antisense strand to SEQ ID NO: 902502
uaauaccaucaaagcuuug

SEQ ID NO: 902504 - RNA, 19 nt, Artificial Sequence
  Description of Artificial Sequence: Synthetic oligonucleotide
  Sense strand starting at position 432 of SEQ ID NO: 588978
auguuugaagcauguggaa

SEQ ID NO: 902505 - RNA, 19 nt, Artificial Sequence
  Description of Artificial Sequence: Synthetic oligonucleotide
  Antisense strand to SEQ ID NO: 902504
uuccacaugcuucaaacau

SEQ ID NO: 902506 - RNA, 19 nt, Artificial Sequence
  Description of Artificial Sequence: Synthetic oligonucleotide
  Sense strand starting at position 434 of SEQ ID NO: 588978
guuugaagcauguggaaag

SEQ ID NO: 902507 - RNA, 19 nt, Artificial Sequence
  Description of Artificial Sequence: Synthetic oligonucleotide
  Antisense strand to SEQ ID NO: 902506
cuuuccacaugcuucaaac

SEQ ID NO: 902508 - RNA, 19 nt, Artificial Sequence
  Description of Artificial Sequence: Synthetic oligonucleotide
  Sense strand starting at position 451 of SEQ ID NO: 588978
agugcaauguggccacaaa

SEQ ID NO: 902509 - RNA, 19 nt, Artificial Sequence
  Description of Artificial Sequence: Synthetic oligonucleotide
  Antisense strand to SEQ ID NO: 902508
uuuguggccacauugcacu

SEQ ID NO: 902510 - RNA, 19 nt, Artificial Sequence
  Description of Artificial Sequence: Synthetic oligonucleotide
  Sense strand starting at position 490 of SEQ ID NO: 588978
ucagaccacccucguaaau

SEQ ID NO: 902511 - RNA, 19 nt, Artificial Sequence
  Description of Artificial Sequence: Synthetic oligonucleotide
  Antisense strand to SEQ ID NO: 902510
auuuacgaggguggucuga

SEQ ID NO: 902512 - RNA, 19 nt, Artificial Sequence
  Description of Artificial Sequence: Synthetic oligonucleotide
  Sense strand starting at position 503 of SEQ ID NO: 588978
guaaauauucucugcgaug

SEQ ID NO: 902513 - RNA, 19 nt, Artificial Sequence
  Description of Artificial Sequence: Synthetic oligonucleotide
  Antisense strand to SEQ ID NO: 902512
caucgcagagaauauuuac

SEQ ID NO: 902514 - RNA, 19 nt, Artificial Sequence
  Description of Artificial Sequence: Synthetic oligonucleotide
  Sense strand starting at position 508 of SEQ ID NO: 588978
uauucucugcgaugaucuu

SEQ ID NO: 902515 - RNA, 19 nt, Artificial Sequence
  Description of Artificial Sequence: Synthetic oligonucleotide
  Antisense strand to SEQ ID NO: 902514
aagaucaucgcagagaaua

SEQ ID NO: 902516 - RNA, 19 nt, Artificial Sequence
  Description of Artificial Sequence: Synthetic oligonucleotide
  Sense strand starting at position 518 of SEQ ID NO: 588978
gaugaucuugcugacgaaa

SEQ ID NO: 902517 - RNA, 19 nt, Artificial Sequence
  Description of Artificial Sequence: Synthetic oligonucleotide
  Antisense strand to SEQ ID NO: 902516
uuucgucagcaagaucauc

SEQ ID NO: 902518 - RNA, 19 nt, Artificial Sequence
  Description of Artificial Sequence: Synthetic oligonucleotide
  Sense strand starting at position 588 of SEQ ID NO: 588978
ggcuuuggguuguuuauga

SEQ ID NO: 902519 - RNA, 19 nt, Artificial Sequence
  Description of Artificial Sequence: Synthetic oligonucleotide
  Antisense strand to SEQ ID NO: 902518
ucauaaacaacccaaagcc

SEQ ID NO: 902520 - RNA, 19 nt, Artificial Sequence
  Description of Artificial Sequence: Synthetic oligonucleotide
  Sense strand starting at position 614 of SEQ ID NO: 588978
cacggcauuuaagaugauu

SEQ ID NO: 902521 - RNA, 19 nt, Artificial Sequence
  Description of Artificial Sequence: Synthetic oligonucleotide
  Antisense strand to SEQ ID NO: 902520
aaucaucuuaaaugccgug

SEQ ID NO: 902522 - RNA, 19 nt, Artificial Sequence
  Description of Artificial Sequence: Synthetic oligonucleotide
  Sense strand starting at position 639 of SEQ ID NO: 588978
gcaagaugcuguccaaaga

SEQ ID NO: 902523 - RNA, 19 nt, Artificial Sequence
  Description of Artificial Sequence: Synthetic oligonucleotide
  Antisense strand to SEQ ID NO: 902522
ucuuuggacagcaucuugc

SEQ ID NO: 902524 - RNA, 19 nt, Artificial Sequence
  Description of Artificial Sequence: Synthetic oligonucleotide
  Sense strand starting at position 658 of SEQ ID NO: 588978
gguugucguccagauccuu

SEQ ID NO: 902525 - RNA, 19 nt, Artificial Sequence
  Description of Artificial Sequence: Synthetic oligonucleotide
  Antisense strand to SEQ ID NO: 902524
aaggaucuggacgacaacc

SEQ ID NO: 902526 - RNA, 19 nt, Artificial Sequence
  Description of Artificial Sequence: Synthetic oligonucleotide
  Sense strand starting at position 676 of SEQ ID NO: 588978
ucugcagugcugggaaaga

SEQ ID NO: 902527 - RNA, 19 nt, Artificial Sequence
  Description of Artificial Sequence: Synthetic oligonucleotide
  Antisense strand to SEQ ID NO: 902526
ucuuucccagcacugcaga

SEQ ID NO: 902528 - RNA, 19 nt, Artificial Sequence
  Description of Artificial Sequence: Synthetic oligonucleotide
  Sense strand starting at position 872 of SEQ ID NO: 588978
gguccugccuauucuaaag

SEQ ID NO: 902529 - RNA, 19 nt, Artificial Sequence
  Description of Artificial Sequence: Synthetic oligonucleotide
  Antisense strand to SEQ ID NO: 902528
cuuuagaauaggcaggacc

SEQ ID NO: 902530 - RNA, 19 nt, Artificial Sequence
  Description of Artificial Sequence: Synthetic oligonucleotide
  Sense strand starting at position 1029 of SEQ ID NO: 588978
gcggaagaguccucaccau

SEQ ID NO: 902531 - RNA, 19 nt, Artificial Sequence
  Description of Artificial Sequence: Synthetic oligonucleotide
  Antisense strand to SEQ ID NO: 902530
auggugaggacucuuccgc

SEQ ID NO: 902532 - RNA, 19 nt, Artificial Sequence
  Description of Artificial Sequence: Synthetic oligonucleotide
  Sense strand starting at position 1097 of SEQ ID NO: 588978
ggagguuaccacuggucca

SEQ ID NO: 902533 - RNA, 19 nt, Artificial Sequence
  Description of Artificial Sequence: Synthetic oligonucleotide
  Antisense strand to SEQ ID NO: 902532
uggaccagugguaaccucc

SEQ ID NO: 902534 - RNA, 19 nt, Artificial Sequence
  Description of Artificial Sequence: Synthetic oligonucleotide
  Sense strand starting at position 1156 of SEQ ID NO: 588978
uccucaggucuccgacuua

SEQ ID NO: 902535 - RNA, 19 nt, Artificial Sequence
  Description of Artificial Sequence: Synthetic oligonucleotide
  Antisense strand to SEQ ID NO: 902534
uaagucggagaccugagga

SEQ ID NO: 902536 - RNA, 19 nt, Artificial Sequence
  Description of Artificial Sequence: Synthetic oligonucleotide
  Sense strand starting at position 2060 of SEQ ID NO: 588978
caucuuuguucgguacaaa

SEQ ID NO: 902537 - RNA, 19 nt, Artificial Sequence
  Description of Artificial Sequence: Synthetic oligonucleotide
  Antisense strand to SEQ ID NO: 902536
uuuguaccgaacaaagaug

SEQ ID NO: 902538 - RNA, 19 nt, Artificial Sequence
  Description of Artificial Sequence: Synthetic oligonucleotide
  Sense strand starting at position 2061 of SEQ ID NO: 588978
aucuuuguucgguacaaag

SEQ ID NO: 902539 - RNA, 19 nt, Artificial Sequence
  Description of Artificial Sequence: Synthetic oligonucleotide
  Antisense strand to SEQ ID NO: 902538
cuuuguaccgaacaaagau

SEQ ID NO: 902540 - RNA, 19 nt, Artificial Sequence
  Description of Artificial Sequence: Synthetic oligonucleotide
  Sense strand starting at position 2134 of SEQ ID NO: 588978
uuuguuuauggacguuauu

SEQ ID NO: 902541 - RNA, 19 nt, Artificial Sequence
  Description of Artificial Sequence: Synthetic oligonucleotide
  Antisense strand to SEQ ID NO: 902540
aauaacguccauaaacaaa

SEQ ID NO: 902542 - RNA, 19 nt, Artificial Sequence
  Description of Artificial Sequence: Synthetic oligonucleotide
  Sense strand starting at position 2464 of SEQ ID NO: 588978
auaauaauaacggacguua

SEQ ID NO: 902543 - RNA, 19 nt, Artificial Sequence
  Description of Artificial Sequence: Synthetic oligonucleotide
  Antisense strand to SEQ ID NO: 902542
uaacguccguuauuauuau

SEQ ID NO: 902544 - RNA, 19 nt, Artificial Sequence
  Description of Artificial Sequence: Synthetic oligonucleotide
  Sense strand starting at position 2466 of SEQ ID NO: 588978
aauaauaacggacguuauu

SEQ ID NO: 902545 - RNA, 19 nt, Artificial Sequence
  Description of Artificial Sequence: Synthetic oligonucleotide
  Antisense strand to SEQ ID NO: 902544
aauaacguccguuauuauu

SEQ ID NO: 902546 - RNA, 19 nt, Artificial Sequence
  Description of Artificial Sequence: Synthetic oligonucleotide
  Sense strand starting at position 2576 of SEQ ID NO: 588978
acauuauuagugugcuaca

SEQ ID NO: 902547 - RNA, 19 nt, Artificial Sequence
  Description of Artificial Sequence: Synthetic oligonucleotide
  Antisense strand to SEQ ID NO: 902546
uguagcacacuaauaaugu

SEQ ID NO: 902548 - RNA, 19 nt, Artificial Sequence
  Description of Artificial Sequence: Synthetic oligonucleotide
  Sense strand starting at position 2585 of SEQ ID NO: 588978
gugugcuacauuuguuaaa

SEQ ID NO: 902549 - RNA, 19 nt, Artificial Sequence
  Description of Artificial Sequence: Synthetic oligonucleotide
  Antisense strand to SEQ ID NO: 902548
uuuaacaaauguagcacac

SEQ ID NO: 902550 - RNA, 19 nt, Artificial Sequence
  Description of Artificial Sequence: Synthetic oligonucleotide
  Sense strand starting at position 2610 of SEQ ID NO: 588978
gaugcacuguugucauauu

SEQ ID NO: 902551 - RNA, 19 nt, Artificial Sequence
  Description of Artificial Sequence: Synthetic oligonucleotide
  Antisense strand to SEQ ID NO: 902550
aauaugacaacagugcauc

SEQ ID NO: 902552 - RNA, 19 nt, Artificial Sequence
  Description of Artificial Sequence: Synthetic oligonucleotide
  Sense strand starting at position 2739 of SEQ ID NO: 588978
uguuaaugacagugucuca

SEQ ID NO: 902553 - RNA, 19 nt, Artificial Sequence
  Description of Artificial Sequence: Synthetic oligonucleotide
  Antisense strand to SEQ ID NO: 902552
ugagacacugucauuaaca

SEQ ID NO: 902554 - RNA, 19 nt, Artificial Sequence
  Description of Artificial Sequence: Synthetic oligonucleotide
  Sense strand starting at position 3062 of SEQ ID NO: 588978
aggaguacuggccaaaucu

SEQ ID NO: 902555 - RNA, 19 nt, Artificial Sequence
  Description of Artificial Sequence: Synthetic oligonucleotide
  Antisense strand to SEQ ID NO: 902554
agauuuggccaguacuccu

SEQ ID NO: 902556 - RNA, 19 nt, Artificial Sequence
  Description of Artificial Sequence: Synthetic oligonucleotide
  Sense strand starting at position 3092 of SEQ ID NO: 588978
gcccucuauugggauuuga

SEQ ID NO: 902557 - RNA, 19 nt, Artificial Sequence
  Description of Artificial Sequence: Synthetic oligonucleotide
  Antisense strand to SEQ ID NO: 902556
ucaaaucccaauagagggc

SEQ ID NO: 902558 - RNA, 19 nt, Artificial Sequence
  Description of Artificial Sequence: Synthetic oligonucleotide
  Sense strand starting at position 3122 of SEQ ID NO: 588978
ggauuagacaagcguuaug

SEQ ID NO: 902559 - RNA, 19 nt, Artificial Sequence
  Description of Artificial Sequence: Synthetic oligonucleotide
  Antisense strand to SEQ ID NO: 902558
cauaacgcuugucuaaucc

SEQ ID NO: 902560 - RNA, 19 nt, Artificial Sequence
  Description of Artificial Sequence: Synthetic oligonucleotide
  Sense strand starting at position 3239 of SEQ ID NO: 588978
cugacuugaucacuugacu

SEQ ID NO: 902561 - RNA, 19 nt, Artificial Sequence
  Description of Artificial Sequence: Synthetic oligonucleotide
  Antisense strand to SEQ ID NO: 902560
agucaagugaucaagucag

SEQ ID NO: 902562 - RNA, 19 nt, Artificial Sequence
  Description of Artificial Sequence: Synthetic oligonucleotide
  Sense strand starting at position 3245 of SEQ ID NO: 588978
ugaucacuugacugaagua

SEQ ID NO: 902563 - RNA, 19 nt, Artificial Sequence
  Description of Artificial Sequence: Synthetic oligonucleotide
  Antisense strand to SEQ ID NO: 902562
uacuucagucaagugauca

SEQ ID NO: 902564 - RNA, 19 nt, Artificial Sequence
  Description of Artificial Sequence: Synthetic oligonucleotide
  Sense strand starting at position 3447 of SEQ ID NO: 588978
uuuauaucaguguggacca

SEQ ID NO: 902565 - RNA, 19 nt, Artificial Sequence
  Description of Artificial Sequence: Synthetic oligonucleotide
  Antisense strand to SEQ ID NO: 902564
ugguccacacugauauaaa

SEQ ID NO: 902566 - RNA, 19 nt, Artificial Sequence
  Description of Artificial Sequence: Synthetic oligonucleotide
  Sense strand starting at position 3483 of SEQ ID NO: 588978
guuauacuacaguacuaau

SEQ ID NO: 902567 - RNA, 19 nt, Artificial Sequence
  Description of Artificial Sequence: Synthetic oligonucleotide
  Antisense strand to SEQ ID NO: 902566
auuaguacuguaguauaac

SEQ ID NO: 902568 - RNA, 19 nt, Artificial Sequence
  Description of Artificial Sequence: Synthetic oligonucleotide
  Sense strand starting at position 3565 of SEQ ID NO: 588978
acauacacccaguguauau

SEQ ID NO: 902569 - RNA, 19 nt, Artificial Sequence
  Description of Artificial Sequence: Synthetic oligonucleotide
  Antisense strand to SEQ ID NO: 902568
auauacacuggguguaugu

SEQ ID NO: 902570 - RNA, 19 nt, Artificial Sequence
  Description of Artificial Sequence: Synthetic oligonucleotide
  Sense strand starting at position 632 of SEQ ID NO: 588979
ggaaccaaguaagagaaau

SEQ ID NO: 902571 - RNA, 19 nt, Artificial Sequence
  Description of Artificial Sequence: Synthetic oligonucleotide
  Antisense strand to SEQ ID NO: 902570
auuucucuuacuugguucc

SEQ ID NO: 902572 - RNA, 19 nt, Artificial Sequence
  Description of Artificial Sequence: Synthetic oligonucleotide
  Sense strand starting at position 643 of SEQ ID NO: 588979
agagaaauguuguaggaga

SEQ ID NO: 902573 - RNA, 19 nt, Artificial Sequence
  Description of Artificial Sequence: Synthetic oligonucleotide
  Antisense strand to SEQ ID NO: 902572
ucuccuacaacauuucucu

SEQ ID NO: 902574 - RNA, 19 nt, Artificial Sequence
  Description of Artificial Sequence: Synthetic oligonucleotide
  Sense strand starting at position 654 of SEQ ID NO: 588979
guaggagagcuuuguaacu

SEQ ID NO: 902575 - RNA, 19 nt, Artificial Sequence
  Description of Artificial Sequence: Synthetic oligonucleotide
  Antisense strand to SEQ ID NO: 902574
aguuacaaagcucuccuac

SEQ ID NO: 902576 - RNA, 19 nt, Artificial Sequence
  Description of Artificial Sequence: Synthetic oligonucleotide
  Sense strand starting at position 656 of SEQ ID NO: 588979
aggagagcuuuguaacuac

SEQ ID NO: 902577 - RNA, 19 nt, Artificial Sequence
  Description of Artificial Sequence: Synthetic oligonucleotide
  Antisense strand to SEQ ID NO: 902576
guaguuacaaagcucuccu

SEQ ID NO: 902578 - RNA, 19 nt, Artificial Sequence
  Description of Artificial Sequence: Synthetic oligonucleotide
  Sense strand starting at position 665 of SEQ ID NO: 588979
uuguaacuaccuggacuaa

SEQ ID NO: 902579 - RNA, 19 nt, Artificial Sequence
  Description of Artificial Sequence: Synthetic oligonucleotide
  Antisense strand to SEQ ID NO: 902578
uuaguccagguaguuacaa

SEQ ID NO: 902580 - RNA, 19 nt, Artificial Sequence
  Description of Artificial Sequence: Synthetic oligonucleotide
  Sense strand starting at position 676 of SEQ ID NO: 588979
uggacuaagugugccuuaa

SEQ ID NO: 902581 - RNA, 19 nt, Artificial Sequence
  Description of Artificial Sequence: Synthetic oligonucleotide
  Antisense strand to SEQ ID NO: 902580
uuaaggcacacuuagucca

SEQ ID NO: 902582 - RNA, 19 nt, Artificial Sequence
  Description of Artificial Sequence: Synthetic oligonucleotide
  Sense strand starting at position 678 of SEQ ID NO: 588979
gacuaagugugccuuaacu

SEQ ID NO: 902583 - RNA, 19 nt, Artificial Sequence
  Description of Artificial Sequence: Synthetic oligonucleotide
  Antisense strand to SEQ ID NO: 902582
aguuaaggcacacuuaguc

SEQ ID NO: 902584 - RNA, 19 nt, Artificial Sequence
  Description of Artificial Sequence: Synthetic oligonucleotide
  Sense strand starting at position 680 of SEQ ID NO: 588979
cuaagugugccuuaacuca

SEQ ID NO: 902585 - RNA, 19 nt, Artificial Sequence
  Description of Artificial Sequence: Synthetic oligonucleotide
  Antisense strand to SEQ ID NO: 902584
ugaguuaaggcacacuuag

SEQ ID NO: 902586 - RNA, 19 nt, Artificial Sequence
  Description of Artificial Sequence: Synthetic oligonucleotide
  Sense strand starting at position 783 of SEQ ID NO: 588979
gccugcagacgagauaaua

SEQ ID NO: 902587 - RNA, 19 nt, Artificial Sequence
  Description of Artificial Sequence: Synthetic oligonucleotide
  Antisense strand to SEQ ID NO: 902586
uauuaucucgucugcaggc

SEQ ID NO: 902588 - RNA, 19 nt, Artificial Sequence
  Description of Artificial Sequence: Synthetic oligonucleotide
  Sense strand starting at position 803 of SEQ ID NO: 588979
cggguucucuugccuggua

SEQ ID NO: 902589 - RNA, 19 nt, Artificial Sequence
  Description of Artificial Sequence: Synthetic oligonucleotide
  Antisense strand to SEQ ID NO: 902588
uaccaggcaagagaacccg

SEQ ID NO: 902590 - RNA, 19 nt, Artificial Sequence
  Description of Artificial Sequence: Synthetic oligonucleotide
  Sense strand starting at position 805 of SEQ ID NO: 588979
gguucucuugccugguaca

SEQ ID NO: 902591 - RNA, 19 nt, Artificial Sequence
  Description of Artificial Sequence: Synthetic oligonucleotide
  Antisense strand to SEQ ID NO: 902590
uguaccaggcaagagaacc

SEQ ID NO: 902592 - RNA, 19 nt, Artificial Sequence
  Description of Artificial Sequence: Synthetic oligonucleotide
  Sense strand starting at position 1073 of SEQ ID NO: 588979
gcuugagagcugcaagaac

SEQ ID NO: 902593 - RNA, 19 nt, Artificial Sequence
  Description of Artificial Sequence: Synthetic oligonucleotide
  Antisense strand to SEQ ID NO: 902592
guucuugcagcucucaagc

SEQ ID NO: 902594 - RNA, 19 nt, Artificial Sequence
  Description of Artificial Sequence: Synthetic oligonucleotide
  Sense strand starting at position 1144 of SEQ ID NO: 588979
acuuucuuagcuggccaaa

SEQ ID NO: 902595 - RNA, 19 nt, Artificial Sequence
  Description of Artificial Sequence: Synthetic oligonucleotide
  Antisense strand to SEQ ID NO: 902594
uuuggccagcuaagaaagu

SEQ ID NO: 902596 - RNA, 19 nt, Artificial Sequence
  Description of Artificial Sequence: Synthetic oligonucleotide
  Sense strand starting at position 1245 of SEQ ID NO: 588979
agauuauguggagguccuu

SEQ ID NO: 902597 - RNA, 19 nt, Artificial Sequence
  Description of Artificial Sequence: Synthetic oligonucleotide
  Antisense strand to SEQ ID NO: 902596
aaggaccuccacauaaucu

SEQ ID NO: 902598 - RNA, 19 nt, Artificial Sequence
  Description of Artificial Sequence: Synthetic oligonucleotide
  Sense strand starting at position 1310 of SEQ ID NO: 588979
gaugaaccaucgcuugacu

SEQ ID NO: 902599 - RNA, 19 nt, Artificial Sequence
  Description of Artificial Sequence: Synthetic oligonucleotide
  Antisense strand to SEQ ID NO: 902598
agucaagcgaugguucauc

SEQ ID NO: 902600 - RNA, 19 nt, Artificial Sequence
  Description of Artificial Sequence: Synthetic oligonucleotide
  Sense strand starting at position 1312 of SEQ ID NO: 588979
ugaaccaucgcuugacuga

SEQ ID NO: 902601 - RNA, 19 nt, Artificial Sequence
  Description of Artificial Sequence: Synthetic oligonucleotide
  Antisense strand to SEQ ID NO: 902600
ucagucaagcgaugguuca

SEQ ID NO: 902602 - RNA, 19 nt, Artificial Sequence
  Description of Artificial Sequence: Synthetic oligonucleotide
  Sense strand starting at position 1400 of SEQ ID NO: 588979
cgacgcagcacgucugaaa

SEQ ID NO: 902603 - RNA, 19 nt, Artificial Sequence
  Description of Artificial Sequence: Synthetic oligonucleotide
  Antisense strand to SEQ ID NO: 902602
uuucagacgugcugcgucg

SEQ ID NO: 902604 - RNA, 19 nt, Artificial Sequence
  Description of Artificial Sequence: Synthetic oligonucleotide
  Sense strand starting at position 1526 of SEQ ID NO: 588979
ccacgaucuggagacuguu

SEQ ID NO: 902605 - RNA, 19 nt, Artificial Sequence
  Description of Artificial Sequence: Synthetic oligonucleotide
  Antisense strand to SEQ ID NO: 902604
aacagucuccagaucgugg

SEQ ID NO: 902606 - RNA, 19 nt, Artificial Sequence
  Description of Artificial Sequence: Synthetic oligonucleotide
  Sense strand starting at position 1532 of SEQ ID NO: 588979
ucuggagacuguuugcgaa

SEQ ID NO: 902607 - RNA, 19 nt, Artificial Sequence
  Description of Artificial Sequence: Synthetic oligonucleotide
  Antisense strand to SEQ ID NO: 902606
uucgcaaacagucuccaga

SEQ ID NO: 902608 - RNA, 19 nt, Artificial Sequence
  Description of Artificial Sequence: Synthetic oligonucleotide
  Sense strand starting at position 1536 of SEQ ID NO: 588979
gagacuguuugcgaaggca

SEQ ID NO: 902609 - RNA, 19 nt, Artificial Sequence
  Description of Artificial Sequence: Synthetic oligonucleotide
  Antisense strand to SEQ ID NO: 902608
ugccuucgcaaacagucuc

SEQ ID NO: 902610 - RNA, 19 nt, Artificial Sequence
  Description of Artificial Sequence: Synthetic oligonucleotide
  Sense strand starting at position 3220 of SEQ ID NO: 588979
ugggcuuauggcuggauuu

SEQ ID NO: 902611 - RNA, 19 nt, Artificial Sequence
  Description of Artificial Sequence: Synthetic oligonucleotide
  Antisense strand to SEQ ID NO: 902610
aaauccagccauaagccca

SEQ ID NO: 902612 - RNA, 19 nt, Artificial Sequence
  Description of Artificial Sequence: Synthetic oligonucleotide
  Sense strand starting at position 3291 of SEQ ID NO: 588979
uucacuucgccggagguau

SEQ ID NO: 902613 - RNA, 19 nt, Artificial Sequence
  Description of Artificial Sequence: Synthetic oligonucleotide
  Antisense strand to SEQ ID NO: 902612
auaccuccggcgaagugaa

SEQ ID NO: 902614 - RNA, 19 nt, Artificial Sequence
  Description of Artificial Sequence: Synthetic oligonucleotide
  Sense strand starting at position 3293 of SEQ ID NO: 588979
cacuucgccggagguauaa

SEQ ID NO: 902615 - RNA, 19 nt, Artificial Sequence
  Description of Artificial Sequence: Synthetic oligonucleotide
  Antisense strand to SEQ ID NO: 902614
uuauaccuccggcgaagug

SEQ ID NO: 902616 - RNA, 19 nt, Artificial Sequence
  Description of Artificial Sequence: Synthetic oligonucleotide
  Sense strand starting at position 3302 of SEQ ID NO: 588979
ggagguauaaugugcguuu

SEQ ID NO: 902617 - RNA, 19 nt, Artificial Sequence
  Description of Artificial Sequence: Synthetic oligonucleotide
  Antisense strand to SEQ ID NO: 902616
aaacgcacauuauaccucc

SEQ ID NO: 902618 - RNA, 19 nt, Artificial Sequence
  Description of Artificial Sequence: Synthetic oligonucleotide
  Sense strand starting at position 3304 of SEQ ID NO: 588979
agguauaaugugcguuucu

SEQ ID NO: 902619 - RNA, 19 nt, Artificial Sequence
  Description of Artificial Sequence: Synthetic oligonucleotide
  Antisense strand to SEQ ID NO: 902618
agaaacgcacauuauaccu

SEQ ID NO: 902620 - RNA, 19 nt, Artificial Sequence
  Description of Artificial Sequence: Synthetic oligonucleotide
  Sense strand starting at position 3305 of SEQ ID NO: 588979
gguauaaugugcguuucuu

SEQ ID NO: 902621 - RNA, 19 nt, Artificial Sequence
  Description of Artificial Sequence: Synthetic oligonucleotide
  Antisense strand to SEQ ID NO: 902620
aagaaacgcacauuauacc

SEQ ID NO: 902622 - RNA, 19 nt, Artificial Sequence
  Description of Artificial Sequence: Synthetic oligonucleotide
  Sense strand starting at position 3306 of SEQ ID NO: 588979
guauaaugugcguuucuug

SEQ ID NO: 902623 - RNA, 19 nt, Artificial Sequence
  Description of Artificial Sequence: Synthetic oligonucleotide
  Antisense strand to SEQ ID NO: 902622
caagaaacgcacauuauac

SEQ ID NO: 902624 - RNA, 19 nt, Artificial Sequence
  Description of Artificial Sequence: Synthetic oligonucleotide
  Sense strand starting at position 3341 of SEQ ID NO: 588979
ugccuucuuccugaaacag

SEQ ID NO: 902625 - RNA, 19 nt, Artificial Sequence
  Description of Artificial Sequence: Synthetic oligonucleotide
  Antisense strand to SEQ ID NO: 902624
cuguuucaggaagaaggca

SEQ ID NO: 902626 - RNA, 19 nt, Artificial Sequence
  Description of Artificial Sequence: Synthetic oligonucleotide
  Sense strand starting at position 3429 of SEQ ID NO: 588979
aggcuuccacacugaaauc

SEQ ID NO: 902627 - RNA, 19 nt, Artificial Sequence
  Description of Artificial Sequence: Synthetic oligonucleotide
  Antisense strand to SEQ ID NO: 902626
gauuucaguguggaagccu

SEQ ID NO: 902628 - RNA, 19 nt, Artificial Sequence
  Description of Artificial Sequence: Synthetic oligonucleotide
  Sense strand starting at position 3440 of SEQ ID NO: 588979
cugaaaucccgagguccau

SEQ ID NO: 902629 - RNA, 19 nt, Artificial Sequence
  Description of Artificial Sequence: Synthetic oligonucleotide
  Antisense strand to SEQ ID NO: 902628
auggaccucgggauuucag

SEQ ID NO: 902630 - RNA, 19 nt, Artificial Sequence
  Description of Artificial Sequence: Synthetic oligonucleotide
  Sense strand starting at position 3605 of SEQ ID NO: 588979
cagagaaguaucggacagu

SEQ ID NO: 902631 - RNA, 19 nt, Artificial Sequence
  Description of Artificial Sequence: Synthetic oligonucleotide
  Antisense strand to SEQ ID NO: 902630
acuguccgauacuucucug

SEQ ID NO: 902632 - RNA, 19 nt, Artificial Sequence
  Description of Artificial Sequence: Synthetic oligonucleotide
  Sense strand starting at position 3606 of SEQ ID NO: 588979
agagaaguaucggacagug

SEQ ID NO: 902633 - RNA, 19 nt, Artificial Sequence
  Description of Artificial Sequence: Synthetic oligonucleotide
  Antisense strand to SEQ ID NO: 902632
cacuguccgauacuucucu

SEQ ID NO: 902634 - RNA, 19 nt, Artificial Sequence
  Description of Artificial Sequence: Synthetic oligonucleotide
  Sense strand starting at position 3608 of SEQ ID NO: 588979
agaaguaucggacaguggu

SEQ ID NO: 902635 - RNA, 19 nt, Artificial Sequence
  Description of Artificial Sequence: Synthetic oligonucleotide
  Antisense strand to SEQ ID NO: 902634
accacuguccgauacuucu

SEQ ID NO: 902636 - RNA, 19 nt, Artificial Sequence
  Description of Artificial Sequence: Synthetic oligonucleotide
  Sense strand starting at position 3791 of SEQ ID NO: 588979
aggugaaguccuugcgaau

SEQ ID NO: 902637 - RNA, 19 nt, Artificial Sequence
  Description of Artificial Sequence: Synthetic oligonucleotide
  Antisense strand to SEQ ID NO: 902636
auucgcaaggacuucaccu

SEQ ID NO: 902638 - RNA, 19 nt, Artificial Sequence
  Description of Artificial Sequence: Synthetic oligonucleotide
  Sense strand starting at position 3797 of SEQ ID NO: 588979
aguccuugcgaauguugua

SEQ ID NO: 902639 - RNA, 19 nt, Artificial Sequence
  Description of Artificial Sequence: Synthetic oligonucleotide
  Antisense strand to SEQ ID NO: 902638
uacaacauucgcaaggacu

SEQ ID NO: 902640 - RNA, 19 nt, Artificial Sequence
  Description of Artificial Sequence: Synthetic oligonucleotide
  Sense strand starting at position 3803 of SEQ ID NO: 588979
ugcgaauguuguaaggagu

SEQ ID NO: 902641 - RNA, 19 nt, Artificial Sequence
  Description of Artificial Sequence: Synthetic oligonucleotide
  Antisense strand to SEQ ID NO: 902640
acuccuuacaacauucgca

SEQ ID NO: 902642 - RNA, 19 nt, Artificial Sequence
  Description of Artificial Sequence: Synthetic oligonucleotide
  Sense strand starting at position 3804 of SEQ ID NO: 588979
gcgaauguuguaaggaguu

SEQ ID NO: 902643 - RNA, 19 nt, Artificial Sequence
  Description of Artificial Sequence: Synthetic oligonucleotide
  Antisense strand to SEQ ID NO: 902642
aacuccuuacaacauucgc

SEQ ID NO: 902644 - RNA, 19 nt, Artificial Sequence
  Description of Artificial Sequence: Synthetic oligonucleotide
  Sense strand starting at position 3875 of SEQ ID NO: 588979
gcaacauggucagaucaga

SEQ ID NO: 902645 - RNA, 19 nt, Artificial Sequence
  Description of Artificial Sequence: Synthetic oligonucleotide
  Antisense strand to SEQ ID NO: 902644
ucugaucugaccauguugc

SEQ ID NO: 902646 - RNA, 19 nt, Artificial Sequence
  Description of Artificial Sequence: Synthetic oligonucleotide
  Sense strand starting at position 3963 of SEQ ID NO: 588979
ccagguaacuagucaggga

SEQ ID NO: 902647 - RNA, 19 nt, Artificial Sequence
  Description of Artificial Sequence: Synthetic oligonucleotide
  Antisense strand to SEQ ID NO: 902646
ucccugacuaguuaccugg

SEQ ID NO: 902648 - RNA, 19 nt, Artificial Sequence
  Description of Artificial Sequence: Synthetic oligonucleotide
  Sense strand starting at position 3967 of SEQ ID NO: 588979
guaacuagucagggagaca

SEQ ID NO: 902649 - RNA, 19 nt, Artificial Sequence
  Description of Artificial Sequence: Synthetic oligonucleotide
  Antisense strand to SEQ ID NO: 902648
ugucucccugacuaguuac

SEQ ID NO: 902650 - RNA, 19 nt, Artificial Sequence
  Description of Artificial Sequence: Synthetic oligonucleotide
  Sense strand starting at position 47 of SEQ ID NO: 588980
gaagauggcuuugcgguaa

SEQ ID NO: 902651 - RNA, 19 nt, Artificial Sequence
  Description of Artificial Sequence: Synthetic oligonucleotide
  Antisense strand to SEQ ID NO: 902650
uuaccgcaaagccaucuuc

SEQ ID NO: 902652 - RNA, 19 nt, Artificial Sequence
  Description of Artificial Sequence: Synthetic oligonucleotide
  Sense strand starting at position 59 of SEQ ID NO: 588980
gcgguaauuggucccguau

SEQ ID NO: 902653 - RNA, 19 nt, Artificial Sequence
  Description of Artificial Sequence: Synthetic oligonucleotide
  Antisense strand to SEQ ID NO: 902652
auacgggaccaauuaccgc

SEQ ID NO: 902654 - RNA, 19 nt, Artificial Sequence
  Description of Artificial Sequence: Synthetic oligonucleotide
  Sense strand starting at position 135 of SEQ ID NO: 588980
uuguccaucucaucgaaga

SEQ ID NO: 902655 - RNA, 19 nt, Artificial Sequence
  Description of Artificial Sequence: Synthetic oligonucleotide
  Antisense strand to SEQ ID NO: 902654
ucuucgaugagauggacaa

SEQ ID NO: 902656 - RNA, 19 nt, Artificial Sequence
  Description of Artificial Sequence: Synthetic oligonucleotide
  Sense strand starting at position 309 of SEQ ID NO: 588980
uguggucuuccagagagca

SEQ ID NO: 902657 - RNA, 19 nt, Artificial Sequence
  Description of Artificial Sequence: Synthetic oligonucleotide
  Antisense strand to SEQ ID NO: 902656
ugcucucuggaagaccaca

SEQ ID NO: 902658 - RNA, 19 nt, Artificial Sequence
  Description of Artificial Sequence: Synthetic oligonucleotide
  Sense strand starting at position 351 of SEQ ID NO: 588980
gugaaacuguaucccagau

SEQ ID NO: 902659 - RNA, 19 nt, Artificial Sequence
  Description of Artificial Sequence: Synthetic oligonucleotide
  Antisense strand to SEQ ID NO: 902658
aucugggauacaguuucac

SEQ ID NO: 902660 - RNA, 19 nt, Artificial Sequence
  Description of Artificial Sequence: Synthetic oligonucleotide
  Sense strand starting at position 520 of SEQ ID NO: 588980
aguguugacggcugaaacu

SEQ ID NO: 902661 - RNA, 19 nt, Artificial Sequence
  Description of Artificial Sequence: Synthetic oligonucleotide
  Antisense strand to SEQ ID NO: 902660
aguuucagccgucaacacu

SEQ ID NO: 902662 - RNA, 19 nt, Artificial Sequence
  Description of Artificial Sequence: Synthetic oligonucleotide
  Sense strand starting at position 529 of SEQ ID NO: 588980
ggcugaaacugaucagccu

SEQ ID NO: 902663 - RNA, 19 nt, Artificial Sequence
  Description of Artificial Sequence: Synthetic oligonucleotide
  Antisense strand to SEQ ID NO: 902662
aggcugaucaguuucagcc

SEQ ID NO: 902664 - RNA, 19 nt, Artificial Sequence
  Description of Artificial Sequence: Synthetic oligonucleotide
  Sense strand starting at position 549 of SEQ ID NO: 588980
guggguacccugcaaucaa

SEQ ID NO: 902665 - RNA, 19 nt, Artificial Sequence
  Description of Artificial Sequence: Synthetic oligonucleotide
  Antisense strand to SEQ ID NO: 902664
uugauugcaggguacccac

SEQ ID NO: 902666 - RNA, 19 nt, Artificial Sequence
  Description of Artificial Sequence: Synthetic oligonucleotide
  Sense strand starting at position 597 of SEQ ID NO: 588980
ugaugcuuccucugagcca

SEQ ID NO: 902667 - RNA, 19 nt, Artificial Sequence
  Description of Artificial Sequence: Synthetic oligonucleotide
  Antisense strand to SEQ ID NO: 902666
uggcucagaggaagcauca

SEQ ID NO: 902668 - RNA, 19 nt, Artificial Sequence
  Description of Artificial Sequence: Synthetic oligonucleotide
  Sense strand starting at position 645 of SEQ ID NO: 588980
cagugcagauuaucugaca

SEQ ID NO: 902669 - RNA, 19 nt, Artificial Sequence
  Description of Artificial Sequence: Synthetic oligonucleotide
  Antisense strand to SEQ ID NO: 902668
ugucagauaaucugcacug

SEQ ID NO: 902670 - RNA, 19 nt, Artificial Sequence
  Description of Artificial Sequence: Synthetic oligonucleotide
  Sense strand starting at position 646 of SEQ ID NO: 588980
agugcagauuaucugacaa

SEQ ID NO: 902671 - RNA, 19 nt, Artificial Sequence
  Description of Artificial Sequence: Synthetic oligonucleotide
  Antisense strand to SEQ ID NO: 902670
uugucagauaaucugcacu

SEQ ID NO: 902672 - RNA, 19 nt, Artificial Sequence
  Description of Artificial Sequence: Synthetic oligonucleotide
  Sense strand starting at position 680 of SEQ ID NO: 588980
aaaugauaucugcaauggu

SEQ ID NO: 902673 - RNA, 19 nt, Artificial Sequence
  Description of Artificial Sequence: Synthetic oligonucleotide
  Antisense strand to SEQ ID NO: 902672
accauugcagauaucauuu

SEQ ID NO: 902674 - RNA, 19 nt, Artificial Sequence
  Description of Artificial Sequence: Synthetic oligonucleotide
  Sense strand starting at position 683 of SEQ ID NO: 588980
ugauaucugcaaugguaua

SEQ ID NO: 902675 - RNA, 19 nt, Artificial Sequence
  Description of Artificial Sequence: Synthetic oligonucleotide
  Antisense strand to SEQ ID NO: 902674
uauaccauugcagauauca

SEQ ID NO: 902676 - RNA, 19 nt, Artificial Sequence
  Description of Artificial Sequence: Synthetic oligonucleotide
  Sense strand starting at position 801 of SEQ ID NO: 588980
ucccaaguucugugcagga

SEQ ID NO: 902677 - RNA, 19 nt, Artificial Sequence
  Description of Artificial Sequence: Synthetic oligonucleotide
  Antisense strand to SEQ ID NO: 902676
uccugcacagaacuuggga

SEQ ID NO: 902678 - RNA, 19 nt, Artificial Sequence
  Description of Artificial Sequence: Synthetic oligonucleotide
  Sense strand starting at position 914 of SEQ ID NO: 588980
uggugagaacaguggucaa

SEQ ID NO: 902679 - RNA, 19 nt, Artificial Sequence
  Description of Artificial Sequence: Synthetic oligonucleotide
  Antisense strand to SEQ ID NO: 902678
uugaccacuguucucacca

SEQ ID NO: 902680 - RNA, 19 nt, Artificial Sequence
  Description of Artificial Sequence: Synthetic oligonucleotide
  Sense strand starting at position 1294 of SEQ ID NO: 588980
cugggacuccuguguccuu

SEQ ID NO: 902681 - RNA, 19 nt, Artificial Sequence
  Description of Artificial Sequence: Synthetic oligonucleotide
  Antisense strand to SEQ ID NO: 902680
aaggacacaggagucccag

SEQ ID NO: 902682 - RNA, 19 nt, Artificial Sequence
  Description of Artificial Sequence: Synthetic oligonucleotide
  Sense strand starting at position 1784 of SEQ ID NO: 588980
ccggaagucgcauucgcaa

SEQ ID NO: 902683 - RNA, 19 nt, Artificial Sequence
  Description of Artificial Sequence: Synthetic oligonucleotide
  Antisense strand to SEQ ID NO: 902682
uugcgaaugcgacuuccgg

SEQ ID NO: 902684 - RNA, 19 nt, Artificial Sequence
  Description of Artificial Sequence: Synthetic oligonucleotide
  Sense strand starting at position 2166 of SEQ ID NO: 588980
aucguaguggcucagaaag

SEQ ID NO: 902685 - RNA, 19 nt, Artificial Sequence
  Description of Artificial Sequence: Synthetic oligonucleotide
  Antisense strand to SEQ ID NO: 902684
cuuucugagccacuacgau

SEQ ID NO: 902686 - RNA, 19 nt, Artificial Sequence
  Description of Artificial Sequence: Synthetic oligonucleotide
  Sense strand starting at position 2350 of SEQ ID NO: 588980
gugcuaagugccuauauac

SEQ ID NO: 902687 - RNA, 19 nt, Artificial Sequence
  Description of Artificial Sequence: Synthetic oligonucleotide
  Antisense strand to SEQ ID NO: 902686
guauauaggcacuuagcac

SEQ ID NO: 902688 - RNA, 19 nt, Artificial Sequence
  Description of Artificial Sequence: Synthetic oligonucleotide
  Sense strand starting at position 2378 of SEQ ID NO: 588980
ugguaauaguaucugcuau

SEQ ID NO: 902689 - RNA, 19 nt, Artificial Sequence
  Description of Artificial Sequence: Synthetic oligonucleotide
  Antisense strand to SEQ ID NO: 902688
auagcagauacuauuacca

SEQ ID NO: 902690 - RNA, 19 nt, Artificial Sequence
  Description of Artificial Sequence: Synthetic oligonucleotide
  Sense strand starting at position 2385 of SEQ ID NO: 588980
aguaucugcuauccagaga

SEQ ID NO: 902691 - RNA, 19 nt, Artificial Sequence
  Description of Artificial Sequence: Synthetic oligonucleotide
  Antisense strand to SEQ ID NO: 902690
ucucuggauagcagauacu

SEQ ID NO: 902692 - RNA, 19 nt, Artificial Sequence
  Description of Artificial Sequence: Synthetic oligonucleotide
  Sense strand starting at position 2432 of SEQ ID NO: 588980
acacaaauugucuggcuca

SEQ ID NO: 902693 - RNA, 19 nt, Artificial Sequence
  Description of Artificial Sequence: Synthetic oligonucleotide
  Antisense strand to SEQ ID NO: 902692
ugagccagacaauuugugu

SEQ ID NO: 902694 - RNA, 19 nt, Artificial Sequence
  Description of Artificial Sequence: Synthetic oligonucleotide
  Sense strand starting at position 2435 of SEQ ID NO: 588980
caaauugucuggcucagaa

SEQ ID NO: 902695 - RNA, 19 nt, Artificial Sequence
  Description of Artificial Sequence: Synthetic oligonucleotide
  Antisense strand to SEQ ID NO: 902694
uucugagccagacaauuug

SEQ ID NO: 902696 - RNA, 19 nt, Artificial Sequence
  Description of Artificial Sequence: Synthetic oligonucleotide
  Sense strand starting at position 2437 of SEQ ID NO: 588980
aauugucuggcucagaaag

SEQ ID NO: 902697 - RNA, 19 nt, Artificial Sequence
  Description of Artificial Sequence: Synthetic oligonucleotide
  Antisense strand to SEQ ID NO: 902696
cuuucugagccagacaauu

SEQ ID NO: 902698 - RNA, 19 nt, Artificial Sequence
  Description of Artificial Sequence: Synthetic oligonucleotide
  Sense strand starting at position 2445 of SEQ ID NO: 588980
ggcucagaaaguggucaau

SEQ ID NO: 902699 - RNA, 19 nt, Artificial Sequence
  Description of Artificial Sequence: Synthetic oligonucleotide
  Antisense strand to SEQ ID NO: 902698
auugaccacuuucugagcc

SEQ ID NO: 902700 - RNA, 19 nt, Artificial Sequence
  Description of Artificial Sequence: Synthetic oligonucleotide
  Sense strand starting at position 2447 of SEQ ID NO: 588980
cucagaaaguggucaauac

SEQ ID NO: 902701 - RNA, 19 nt, Artificial Sequence
  Description of Artificial Sequence: Synthetic oligonucleotide
  Antisense strand to SEQ ID NO: 902700
guauugaccacuuucugag

SEQ ID NO: 902702 - RNA, 19 nt, Artificial Sequence
  Description of Artificial Sequence: Synthetic oligonucleotide
  Sense strand starting at position 2477 of SEQ ID NO: 588980
cauuccguuguguauuaaa

SEQ ID NO: 902703 - RNA, 19 nt, Artificial Sequence
  Description of Artificial Sequence: Synthetic oligonucleotide
  Antisense strand to SEQ ID NO: 902702
uuuaauacacaacggaaug

SEQ ID NO: 902704 - RNA, 19 nt, Artificial Sequence
  Description of Artificial Sequence: Synthetic oligonucleotide
  Sense strand starting at position 2486 of SEQ ID NO: 588980
guguauuaaacaggacugu

SEQ ID NO: 902705 - RNA, 19 nt, Artificial Sequence
  Description of Artificial Sequence: Synthetic oligonucleotide
  Antisense strand to SEQ ID NO: 902704
acaguccuguuuaauacac

SEQ ID NO: 902706 - RNA, 19 nt, Artificial Sequence
  Description of Artificial Sequence: Synthetic oligonucleotide
  Sense strand starting at position 2526 of SEQ ID NO: 588980
ggccaaaugcuugguauca

SEQ ID NO: 902707 - RNA, 19 nt, Artificial Sequence
  Description of Artificial Sequence: Synthetic oligonucleotide
  Antisense strand to SEQ ID NO: 902706
ugauaccaagcauuuggcc

SEQ ID NO: 902708 - RNA, 19 nt, Artificial Sequence
  Description of Artificial Sequence: Synthetic oligonucleotide
  Sense strand starting at position 2527 of SEQ ID NO: 588980
gccaaaugcuugguaucag

SEQ ID NO: 902709 - RNA, 19 nt, Artificial Sequence
  Description of Artificial Sequence: Synthetic oligonucleotide
  Antisense strand to SEQ ID NO: 902708
cugauaccaagcauuuggc

SEQ ID NO: 902710 - RNA, 19 nt, Artificial Sequence
  Description of Artificial Sequence: Synthetic oligonucleotide
  Sense strand starting at position 2538 of SEQ ID NO: 588980
gguaucaguccugggagau

SEQ ID NO: 902711 - RNA, 19 nt, Artificial Sequence
  Description of Artificial Sequence: Synthetic oligonucleotide
  Antisense strand to SEQ ID NO: 902710
aucucccaggacugauacc

SEQ ID NO: 902712 - RNA, 19 nt, Artificial Sequence
  Description of Artificial Sequence: Synthetic oligonucleotide
  Sense strand starting at position 2539 of SEQ ID NO: 588980
guaucaguccugggagaug

SEQ ID NO: 902713 - RNA, 19 nt, Artificial Sequence
  Description of Artificial Sequence: Synthetic oligonucleotide
  Antisense strand to SEQ ID NO: 902712
caucucccaggacugauac

SEQ ID NO: 902714 - RNA, 19 nt, Artificial Sequence
  Description of Artificial Sequence: Synthetic oligonucleotide
  Sense strand starting at position 2586 of SEQ ID NO: 588980
ggaggaauuugggaccgaa

SEQ ID NO: 902715 - RNA, 19 nt, Artificial Sequence
  Description of Artificial Sequence: Synthetic oligonucleotide
  Antisense strand to SEQ ID NO: 902714
uucggucccaaauuccucc

SEQ ID NO: 902716 - RNA, 19 nt, Artificial Sequence
  Description of Artificial Sequence: Synthetic oligonucleotide
  Sense strand starting at position 2703 of SEQ ID NO: 588980
ucagccucucuuggucaaa

SEQ ID NO: 902717 - RNA, 19 nt, Artificial Sequence
  Description of Artificial Sequence: Synthetic oligonucleotide
  Antisense strand to SEQ ID NO: 902716
uuugaccaagagaggcuga

SEQ ID NO: 902718 - RNA, 19 nt, Artificial Sequence
  Description of Artificial Sequence: Synthetic oligonucleotide
  Sense strand starting at position 2706 of SEQ ID NO: 588980
gccucucuuggucaaagga

SEQ ID NO: 902719 - RNA, 19 nt, Artificial Sequence
  Description of Artificial Sequence: Synthetic oligonucleotide
  Antisense strand to SEQ ID NO: 902718
uccuuugaccaagagaggc

SEQ ID NO: 902720 - RNA, 19 nt, Artificial Sequence
  Description of Artificial Sequence: Synthetic oligonucleotide
  Sense strand starting at position 3043 of SEQ ID NO: 588980
cgugaaucaacauggcgaa

SEQ ID NO: 902721 - RNA, 19 nt, Artificial Sequence
  Description of Artificial Sequence: Synthetic oligonucleotide
  Antisense strand to SEQ ID NO: 902720
uucgccauguugauucacg

SEQ ID NO: 902722 - RNA, 19 nt, Artificial Sequence
  Description of Artificial Sequence: Synthetic oligonucleotide
  Sense strand starting at position 3044 of SEQ ID NO: 588980
gugaaucaacauggcgaaa

SEQ ID NO: 902723 - RNA, 19 nt, Artificial Sequence
  Description of Artificial Sequence: Synthetic oligonucleotide
  Antisense strand to SEQ ID NO: 902722
uuucgccauguugauucac

SEQ ID NO: 902724 - RNA, 19 nt, Artificial Sequence
  Description of Artificial Sequence: Synthetic oligonucleotide
  Sense strand starting at position 3781 of SEQ ID NO: 588980
aguaguucccacuaucaag

SEQ ID NO: 902725 - RNA, 19 nt, Artificial Sequence
  Description of Artificial Sequence: Synthetic oligonucleotide
  Antisense strand to SEQ ID NO: 902724
cuugauagugggaacuacu

SEQ ID NO: 902726 - RNA, 19 nt, Artificial Sequence
  Description of Artificial Sequence: Synthetic oligonucleotide
  Sense strand starting at position 3810 of SEQ ID NO: 588980
gagagaagucuggguccag

SEQ ID NO: 902727 - RNA, 19 nt, Artificial Sequence
  Description of Artificial Sequence: Synthetic oligonucleotide
  Antisense strand to SEQ ID NO: 902726
cuggacccagacuucucuc

SEQ ID NO: 902728 - RNA, 19 nt, Artificial Sequence
  Description of Artificial Sequence: Synthetic oligonucleotide
  Sense strand starting at position 3969 of SEQ ID NO: 588980
gguugugcauuugugggaa

SEQ ID NO: 902729 - RNA, 19 nt, Artificial Sequence
  Description of Artificial Sequence: Synthetic oligonucleotide
  Antisense strand to SEQ ID NO: 902728
uucccacaaaugcacaacc

SEQ ID NO: 902730 - RNA, 19 nt, Artificial Sequence
  Description of Artificial Sequence: Synthetic oligonucleotide
  Sense strand starting at position 1393 of SEQ ID NO: 588981
ugcaaaucucucgggucuu

SEQ ID NO: 902731 - RNA, 19 nt, Artificial Sequence
  Description of Artificial Sequence: Synthetic oligonucleotide
  Antisense strand to SEQ ID NO: 902730
aagacccgagagauuugca

SEQ ID NO: 902732 - RNA, 19 nt, Artificial Sequence
  Description of Artificial Sequence: Synthetic oligonucleotide
  Sense strand starting at position 1481 of SEQ ID NO: 588981
uggaggagucgucgaagga

SEQ ID NO: 902733 - RNA, 19 nt, Artificial Sequence
  Description of Artificial Sequence: Synthetic oligonucleotide
  Antisense strand to SEQ ID NO: 902732
uccuucgacgacuccucca

SEQ ID NO: 902734 - RNA, 19 nt, Artificial Sequence
  Description of Artificial Sequence: Synthetic oligonucleotide
  Sense strand starting at position 1482 of SEQ ID NO: 588981
ggaggagucgucgaaggag

SEQ ID NO: 902735 - RNA, 19 nt, Artificial Sequence
  Description of Artificial Sequence: Synthetic oligonucleotide
  Antisense strand to SEQ ID NO: 902734
cuccuucgacgacuccucc

SEQ ID NO: 902736 - RNA, 19 nt, Artificial Sequence
  Description of Artificial Sequence: Synthetic oligonucleotide
  Sense strand starting at position 1673 of SEQ ID NO: 588981
cuggcuggaacuuaugauu

SEQ ID NO: 902737 - RNA, 19 nt, Artificial Sequence
  Description of Artificial Sequence: Synthetic oligonucleotide
  Antisense strand to SEQ ID NO: 902736
aaucauaaguuccagccag

SEQ ID NO: 902738 - RNA, 19 nt, Artificial Sequence
  Description of Artificial Sequence: Synthetic oligonucleotide
  Sense strand starting at position 2121 of SEQ ID NO: 588981
gguuuccgcuucuaugcaa

SEQ ID NO: 902739 - RNA, 19 nt, Artificial Sequence
  Description of Artificial Sequence: Synthetic oligonucleotide
  Antisense strand to SEQ ID NO: 902738
uugcauagaagcggaaacc

SEQ ID NO: 902740 - RNA, 19 nt, Artificial Sequence
  Description of Artificial Sequence: Synthetic oligonucleotide
  Sense strand starting at position 2981 of SEQ ID NO: 588981
gcuguauauuccucacaca

SEQ ID NO: 902741 - RNA, 19 nt, Artificial Sequence
  Description of Artificial Sequence: Synthetic oligonucleotide
  Antisense strand to SEQ ID NO: 902740
ugugugaggaauauacagc

SEQ ID NO: 902742 - RNA, 19 nt, Artificial Sequence
  Description of Artificial Sequence: Synthetic oligonucleotide
  Sense strand starting at position 3052 of SEQ ID NO: 588981
uuccauucucuccagggua

SEQ ID NO: 902743 - RNA, 19 nt, Artificial Sequence
  Description of Artificial Sequence: Synthetic oligonucleotide
  Antisense strand to SEQ ID NO: 902742
uacccuggagagaauggaa

SEQ ID NO: 902744 - RNA, 19 nt, Artificial Sequence
  Description of Artificial Sequence: Synthetic oligonucleotide
  Sense strand starting at position 3195 of SEQ ID NO: 588981
guggaaugcuggugcucuu

SEQ ID NO: 902745 - RNA, 19 nt, Artificial Sequence
  Description of Artificial Sequence: Synthetic oligonucleotide
  Antisense strand to SEQ ID NO: 902744
aagagcaccagcauuccac

SEQ ID NO: 902746 - RNA, 19 nt, Artificial Sequence
  Description of Artificial Sequence: Synthetic oligonucleotide
  Sense strand starting at position 3326 of SEQ ID NO: 588981
cggugcuucuucugacaca

SEQ ID NO: 902747 - RNA, 19 nt, Artificial Sequence
  Description of Artificial Sequence: Synthetic oligonucleotide
  Antisense strand to SEQ ID NO: 902746
ugugucagaagaagcaccg

SEQ ID NO: 902748 - RNA, 19 nt, Artificial Sequence
  Description of Artificial Sequence: Synthetic oligonucleotide
  Sense strand starting at position 3474 of SEQ ID NO: 588981
agcaaauccucaggccaga

SEQ ID NO: 902749 - RNA, 19 nt, Artificial Sequence
  Description of Artificial Sequence: Synthetic oligonucleotide
  Antisense strand to SEQ ID NO: 902748
ucuggccugaggauuugcu

SEQ ID NO: 902750 - RNA, 19 nt, Artificial Sequence
  Description of Artificial Sequence: Synthetic oligonucleotide
  Sense strand starting at position 3538 of SEQ ID NO: 588981
ggcccuaugggucaaaggu

SEQ ID NO: 902751 - RNA, 19 nt, Artificial Sequence
  Description of Artificial Sequence: Synthetic oligonucleotide
  Antisense strand to SEQ ID NO: 902750
accuuugacccauagggcc

SEQ ID NO: 902752 - RNA, 19 nt, Artificial Sequence
  Description of Artificial Sequence: Synthetic oligonucleotide
  Sense strand starting at position 2078 of SEQ ID NO: 588982
gcuguagaaucagugcuca

SEQ ID NO: 902753 - RNA, 19 nt, Artificial Sequence
  Description of Artificial Sequence: Synthetic oligonucleotide
  Antisense strand to SEQ ID NO: 902752
ugagcacugauucuacagc

SEQ ID NO: 902754 - RNA, 19 nt, Artificial Sequence
  Description of Artificial Sequence: Synthetic oligonucleotide
  Sense strand starting at position 2150 of SEQ ID NO: 588982
guaggcagugcagagauua

SEQ ID NO: 902755 - RNA, 19 nt, Artificial Sequence
  Description of Artificial Sequence: Synthetic oligonucleotide
  Antisense strand to SEQ ID NO: 902754
uaaucucugcacugccuac

SEQ ID NO: 902756 - RNA, 19 nt, Artificial Sequence
  Description of Artificial Sequence: Synthetic oligonucleotide
  Sense strand starting at position 2182 of SEQ ID NO: 588982
aggaauuucuccugacaug

SEQ ID NO: 902757 - RNA, 19 nt, Artificial Sequence
  Description of Artificial Sequence: Synthetic oligonucleotide
  Antisense strand to SEQ ID NO: 902756
caugucaggagaaauuccu

SEQ ID NO: 902758 - RNA, 19 nt, Artificial Sequence
  Description of Artificial Sequence: Synthetic oligonucleotide
  Sense strand starting at position 2188 of SEQ ID NO: 588982
uucuccugacaugguaaau

SEQ ID NO: 902759 - RNA, 19 nt, Artificial Sequence
  Description of Artificial Sequence: Synthetic oligonucleotide
  Antisense strand to SEQ ID NO: 902758
auuuaccaugucaggagaa

SEQ ID NO: 902760 - RNA, 19 nt, Artificial Sequence
  Description of Artificial Sequence: Synthetic oligonucleotide
  Sense strand starting at position 2286 of SEQ ID NO: 588982
acaucauugugcuaguaug

SEQ ID NO: 902761 - RNA, 19 nt, Artificial Sequence
  Description of Artificial Sequence: Synthetic oligonucleotide
  Antisense strand to SEQ ID NO: 902760
cauacuagcacaaugaugu

SEQ ID NO: 902762 - RNA, 19 nt, Artificial Sequence
  Description of Artificial Sequence: Synthetic oligonucleotide
  Sense strand starting at position 2351 of SEQ ID NO: 588982
acucacauuucuggaagca

SEQ ID NO: 902763 - RNA, 19 nt, Artificial Sequence
  Description of Artificial Sequence: Synthetic oligonucleotide
  Antisense strand to SEQ ID NO: 902762
ugcuuccagaaaugugagu

SEQ ID NO: 902764 - RNA, 19 nt, Artificial Sequence
  Description of Artificial Sequence: Synthetic oligonucleotide
  Sense strand starting at position 2389 of SEQ ID NO: 588982
uuaccuguugugggaggua

SEQ ID NO: 902765 - RNA, 19 nt, Artificial Sequence
  Description of Artificial Sequence: Synthetic oligonucleotide
  Antisense strand to SEQ ID NO: 902764
uaccucccacaacagguaa

SEQ ID NO: 902766 - RNA, 19 nt, Artificial Sequence
  Description of Artificial Sequence: Synthetic oligonucleotide
  Sense strand starting at position 2401 of SEQ ID NO: 588982
ggagguagucugcacagua

SEQ ID NO: 902767 - RNA, 19 nt, Artificial Sequence
  Description of Artificial Sequence: Synthetic oligonucleotide
  Antisense strand to SEQ ID NO: 902766
uacugugcagacuaccucc

SEQ ID NO: 902768 - RNA, 19 nt, Artificial Sequence
  Description of Artificial Sequence: Synthetic oligonucleotide
  Sense strand starting at position 2406 of SEQ ID NO: 588982
uagucugcacaguaaagua

SEQ ID NO: 902769 - RNA, 19 nt, Artificial Sequence
  Description of Artificial Sequence: Synthetic oligonucleotide
  Antisense strand to SEQ ID NO: 902768
uacuuuacugugcagacua

SEQ ID NO: 902770 - RNA, 19 nt, Artificial Sequence
  Description of Artificial Sequence: Synthetic oligonucleotide
  Sense strand starting at position 2428 of SEQ ID NO: 588982
cuaguuaaauaggaucuau

SEQ ID NO: 902771 - RNA, 19 nt, Artificial Sequence
  Description of Artificial Sequence: Synthetic oligonucleotide
  Antisense strand to SEQ ID NO: 902770
auagauccuauuuaacuag

SEQ ID NO: 902772 - RNA, 19 nt, Artificial Sequence
  Description of Artificial Sequence: Synthetic oligonucleotide
  Sense strand starting at position 2440 of SEQ ID NO: 588982
gaucuaucagaguguggau

SEQ ID NO: 902773 - RNA, 19 nt, Artificial Sequence
  Description of Artificial Sequence: Synthetic oligonucleotide
  Antisense strand to SEQ ID NO: 902772
auccacacucugauagauc

SEQ ID NO: 902774 - RNA, 19 nt, Artificial Sequence
  Description of Artificial Sequence: Synthetic oligonucleotide
  Sense strand starting at position 2498 of SEQ ID NO: 588982
aaccguaauucugccgaga

SEQ ID NO: 902775 - RNA, 19 nt, Artificial Sequence
  Description of Artificial Sequence: Synthetic oligonucleotide
  Antisense strand to SEQ ID NO: 902774
ucucggcagaauuacgguu

SEQ ID NO: 902776 - RNA, 19 nt, Artificial Sequence
  Description of Artificial Sequence: Synthetic oligonucleotide
  Sense strand starting at position 2501 of SEQ ID NO: 588982
cguaauucugccgagagua

SEQ ID NO: 902777 - RNA, 19 nt, Artificial Sequence
  Description of Artificial Sequence: Synthetic oligonucleotide
  Antisense strand to SEQ ID NO: 902776
uacucucggcagaauuacg

SEQ ID NO: 902778 - RNA, 19 nt, Artificial Sequence
  Description of Artificial Sequence: Synthetic oligonucleotide
  Sense strand starting at position 2503 of SEQ ID NO: 588982
uaauucugccgagaguaaa

SEQ ID NO: 902779 - RNA, 19 nt, Artificial Sequence
  Description of Artificial Sequence: Synthetic oligonucleotide
  Antisense strand to SEQ ID NO: 902778
uuuacucucggcagaauua

SEQ ID NO: 902780 - RNA, 19 nt, Artificial Sequence
  Description of Artificial Sequence: Synthetic oligonucleotide
  Sense strand starting at position 2514 of SEQ ID NO: 588982
agaguaaacuuaugcaaug

SEQ ID NO: 902781 - RNA, 19 nt, Artificial Sequence
  Description of Artificial Sequence: Synthetic oligonucleotide
  Antisense strand to SEQ ID NO: 902780
cauugcauaaguuuacucu

SEQ ID NO: 902782 - RNA, 19 nt, Artificial Sequence
  Description of Artificial Sequence: Synthetic oligonucleotide
  Sense strand starting at position 2544 of SEQ ID NO: 588982
acguuaauccagugagguc

SEQ ID NO: 902783 - RNA, 19 nt, Artificial Sequence
  Description of Artificial Sequence: Synthetic oligonucleotide
  Antisense strand to SEQ ID NO: 902782
gaccucacuggauuaacgu

SEQ ID NO: 902784 - RNA, 19 nt, Artificial Sequence
  Description of Artificial Sequence: Synthetic oligonucleotide
  Sense strand starting at position 2545 of SEQ ID NO: 588982
cguuaauccagugaggucu

SEQ ID NO: 902785 - RNA, 19 nt, Artificial Sequence
  Description of Artificial Sequence: Synthetic oligonucleotide
  Antisense strand to SEQ ID NO: 902784
agaccucacuggauuaacg

SEQ ID NO: 902786 - RNA, 19 nt, Artificial Sequence
  Description of Artificial Sequence: Synthetic oligonucleotide
  Sense strand starting at position 2558 of SEQ ID NO: 588982
aggucuuguggucgagcuu

SEQ ID NO: 902787 - RNA, 19 nt, Artificial Sequence
  Description of Artificial Sequence: Synthetic oligonucleotide
  Antisense strand to SEQ ID NO: 902786
aagcucgaccacaagaccu

SEQ ID NO: 902788 - RNA, 19 nt, Artificial Sequence
  Description of Artificial Sequence: Synthetic oligonucleotide
  Sense strand starting at position 2597 of SEQ ID NO: 588982
ugccuauucucagagaaua

SEQ ID NO: 902789 - RNA, 19 nt, Artificial Sequence
  Description of Artificial Sequence: Synthetic oligonucleotide
  Antisense strand to SEQ ID NO: 902788
uauucucugagaauaggca

SEQ ID NO: 902790 - RNA, 19 nt, Artificial Sequence
  Description of Artificial Sequence: Synthetic oligonucleotide
  Sense strand starting at position 2608 of SEQ ID NO: 588982
agagaauauucuugagcaa

SEQ ID NO: 902791 - RNA, 19 nt, Artificial Sequence
  Description of Artificial Sequence: Synthetic oligonucleotide
  Antisense strand to SEQ ID NO: 902790
uugcucaagaauauucucu

SEQ ID NO: 902792 - RNA, 19 nt, Artificial Sequence
  Description of Artificial Sequence: Synthetic oligonucleotide
  Sense strand starting at position 2611 of SEQ ID NO: 588982
gaauauucuugagcaaguc

SEQ ID NO: 902793 - RNA, 19 nt, Artificial Sequence
  Description of Artificial Sequence: Synthetic oligonucleotide
  Antisense strand to SEQ ID NO: 902792
gacuugcucaagaauauuc

SEQ ID NO: 902794 - RNA, 19 nt, Artificial Sequence
  Description of Artificial Sequence: Synthetic oligonucleotide
  Sense strand starting at position 2621 of SEQ ID NO: 588982
gagcaagucuuagacucua

SEQ ID NO: 902795 - RNA, 19 nt, Artificial Sequence
  Description of Artificial Sequence: Synthetic oligonucleotide
  Antisense strand to SEQ ID NO: 902794
uagagucuaagacuugcuc

SEQ ID NO: 902796 - RNA, 19 nt, Artificial Sequence
  Description of Artificial Sequence: Synthetic oligonucleotide
  Sense strand starting at position 2626 of SEQ ID NO: 588982
agucuuagacucuagugau

SEQ ID NO: 902797 - RNA, 19 nt, Artificial Sequence
  Description of Artificial Sequence: Synthetic oligonucleotide
  Antisense strand to SEQ ID NO: 902796
aucacuagagucuaagacu

SEQ ID NO: 902798 - RNA, 19 nt, Artificial Sequence
  Description of Artificial Sequence: Synthetic oligonucleotide
  Sense strand starting at position 2645 of SEQ ID NO: 588982
uuuguuggauauucuugua

SEQ ID NO: 902799 - RNA, 19 nt, Artificial Sequence
  Description of Artificial Sequence: Synthetic oligonucleotide
  Antisense strand to SEQ ID NO: 902798
uacaagaauauccaacaaa

SEQ ID NO: 902800 - RNA, 19 nt, Artificial Sequence
  Description of Artificial Sequence: Synthetic oligonucleotide
  Sense strand starting at position 2650 of SEQ ID NO: 588982
uggauauucuuguaauucu

SEQ ID NO: 902801 - RNA, 19 nt, Artificial Sequence
  Description of Artificial Sequence: Synthetic oligonucleotide
  Antisense strand to SEQ ID NO: 902800
agaauuacaagaauaucca

SEQ ID NO: 902802 - RNA, 19 nt, Artificial Sequence
  Description of Artificial Sequence: Synthetic oligonucleotide
  Sense strand starting at position 2663 of SEQ ID NO: 588982
aauucuugcgagcaugauc

SEQ ID NO: 902803 - RNA, 19 nt, Artificial Sequence
  Description of Artificial Sequence: Synthetic oligonucleotide
  Antisense strand to SEQ ID NO: 902802
gaucaugcucgcaagaauu

SEQ ID NO: 902804 - RNA, 19 nt, Artificial Sequence
  Description of Artificial Sequence: Synthetic oligonucleotide
  Sense strand starting at position 2715 of SEQ ID NO: 588982
agcaguuugcccuacucau

SEQ ID NO: 902805 - RNA, 19 nt, Artificial Sequence
  Description of Artificial Sequence: Synthetic oligonucleotide
  Antisense strand to SEQ ID NO: 902804
augaguagggcaaacugcu

SEQ ID NO: 902806 - RNA, 19 nt, Artificial Sequence
  Description of Artificial Sequence: Synthetic oligonucleotide
  Sense strand starting at position 2732 of SEQ ID NO: 588982
augccuauguggcuacaau

SEQ ID NO: 902807 - RNA, 19 nt, Artificial Sequence
  Description of Artificial Sequence: Synthetic oligonucleotide
  Antisense strand to SEQ ID NO: 902806
auuguagccacauaggcau

SEQ ID NO: 902808 - RNA, 19 nt, Artificial Sequence
  Description of Artificial Sequence: Synthetic oligonucleotide
  Sense strand starting at position 2790 of SEQ ID NO: 588982
cuuugaguuuauguucuau

SEQ ID NO: 902809 - RNA, 19 nt, Artificial Sequence
  Description of Artificial Sequence: Synthetic oligonucleotide
  Antisense strand to SEQ ID NO: 902808
auagaacauaaacucaaag

SEQ ID NO: 902810 - RNA, 19 nt, Artificial Sequence
  Description of Artificial Sequence: Synthetic oligonucleotide
  Sense strand starting at position 2796 of SEQ ID NO: 588982
guuuauguucuauaacccu

SEQ ID NO: 902811 - RNA, 19 nt, Artificial Sequence
  Description of Artificial Sequence: Synthetic oligonucleotide
  Antisense strand to SEQ ID NO: 902810
aggguuauagaacauaaac

SEQ ID NO: 902812 - RNA, 19 nt, Artificial Sequence
  Description of Artificial Sequence: Synthetic oligonucleotide
  Sense strand starting at position 2856 of SEQ ID NO: 588982
ugguguguuucccuaaguu

SEQ ID NO: 902813 - RNA, 19 nt, Artificial Sequence
  Description of Artificial Sequence: Synthetic oligonucleotide
  Antisense strand to SEQ ID NO: 902812
aacuuagggaaacacacca

SEQ ID NO: 902814 - RNA, 19 nt, Artificial Sequence
  Description of Artificial Sequence: Synthetic oligonucleotide
  Sense strand starting at position 2878 of SEQ ID NO: 588982
aagugagaauuguucuugu

SEQ ID NO: 902815 - RNA, 19 nt, Artificial Sequence
  Description of Artificial Sequence: Synthetic oligonucleotide
  Antisense strand to SEQ ID NO: 902814
acaagaacaauucucacuu

SEQ ID NO: 902816 - RNA, 19 nt, Artificial Sequence
  Description of Artificial Sequence: Synthetic oligonucleotide
  Sense strand starting at position 2881 of SEQ ID NO: 588982
ugagaauuguucuuguaaa

SEQ ID NO: 902817 - RNA, 19 nt, Artificial Sequence
  Description of Artificial Sequence: Synthetic oligonucleotide
  Antisense strand to SEQ ID NO: 902816
uuuacaagaacaauucuca

SEQ ID NO: 902818 - RNA, 19 nt, Artificial Sequence
  Description of Artificial Sequence: Synthetic oligonucleotide
  Sense strand starting at position 2882 of SEQ ID NO: 588982
gagaauuguucuuguaaac

SEQ ID NO: 902819 - RNA, 19 nt, Artificial Sequence
  Description of Artificial Sequence: Synthetic oligonucleotide
  Antisense strand to SEQ ID NO: 902818
guuuacaagaacaauucuc

SEQ ID NO: 902820 - RNA, 19 nt, Artificial Sequence
  Description of Artificial Sequence: Synthetic oligonucleotide
  Sense strand starting at position 2915 of SEQ ID NO: 588982
aggauuuggcuauguguuu

SEQ ID NO: 902821 - RNA, 19 nt, Artificial Sequence
  Description of Artificial Sequence: Synthetic oligonucleotide
  Antisense strand to SEQ ID NO: 902820
aaacacauagccaaauccu

SEQ ID NO: 902822 - RNA, 19 nt, Artificial Sequence
  Description of Artificial Sequence: Synthetic oligonucleotide
  Sense strand starting at position 2916 of SEQ ID NO: 588982
ggauuuggcuauguguuua

SEQ ID NO: 902823 - RNA, 19 nt, Artificial Sequence
  Description of Artificial Sequence: Synthetic oligonucleotide
  Antisense strand to SEQ ID NO: 902822
uaaacacauagccaaaucc

SEQ ID NO: 902824 - RNA, 19 nt, Artificial Sequence
  Description of Artificial Sequence: Synthetic oligonucleotide
  Sense strand starting at position 2996 of SEQ ID NO: 588982
uccucuauugccuguagaa

SEQ ID NO: 902825 - RNA, 19 nt, Artificial Sequence
  Description of Artificial Sequence: Synthetic oligonucleotide
  Antisense strand to SEQ ID NO: 902824
uucuacaggcaauagagga

SEQ ID NO: 902826 - RNA, 19 nt, Artificial Sequence
  Description of Artificial Sequence: Synthetic oligonucleotide
  Sense strand starting at position 2998 of SEQ ID NO: 588982
cucuauugccuguagaaac

SEQ ID NO: 902827 - RNA, 19 nt, Artificial Sequence
  Description of Artificial Sequence: Synthetic oligonucleotide
  Antisense strand to SEQ ID NO: 902826
guuucuacaggcaauagag

SEQ ID NO: 902828 - RNA, 19 nt, Artificial Sequence
  Description of Artificial Sequence: Synthetic oligonucleotide
  Sense strand starting at position 3249 of SEQ ID NO: 588982
aguguauacuaugaaaucu

SEQ ID NO: 902829 - RNA, 19 nt, Artificial Sequence
  Description of Artificial Sequence: Synthetic oligonucleotide
  Antisense strand to SEQ ID NO: 902828
agauuucauaguauacacu

SEQ ID NO: 902830 - RNA, 19 nt, Artificial Sequence
  Description of Artificial Sequence: Synthetic oligonucleotide
  Sense strand starting at position 3335 of SEQ ID NO: 588982
gacacuuaguugccagauc

SEQ ID NO: 902831 - RNA, 19 nt, Artificial Sequence
  Description of Artificial Sequence: Synthetic oligonucleotide
  Antisense strand to SEQ ID NO: 902830
gaucuggcaacuaaguguc

SEQ ID NO: 902832 - RNA, 19 nt, Artificial Sequence
  Description of Artificial Sequence: Synthetic oligonucleotide
  Sense strand starting at position 62 of SEQ ID NO: 588983
cuugguuauuuauagagug

SEQ ID NO: 902833 - RNA, 19 nt, Artificial Sequence
  Description of Artificial Sequence: Synthetic oligonucleotide
  Antisense strand to SEQ ID NO: 902832
cacucuauaaauaaccaag

SEQ ID NO: 902834 - RNA, 19 nt, Artificial Sequence
  Description of Artificial Sequence: Synthetic oligonucleotide
  Sense strand starting at position 91 of SEQ ID NO: 588983
aggguugucugugcuagca

SEQ ID NO: 902835 - RNA, 19 nt, Artificial Sequence
  Description of Artificial Sequence: Synthetic oligonucleotide
  Antisense strand to SEQ ID NO: 902834
ugcuagcacagacaacccu

SEQ ID NO: 902836 - RNA, 19 nt, Artificial Sequence
  Description of Artificial Sequence: Synthetic oligonucleotide
  Sense strand starting at position 223 of SEQ ID NO: 588983
acagcuaugucaucucuga

SEQ ID NO: 902837 - RNA, 19 nt, Artificial Sequence
  Description of Artificial Sequence: Synthetic oligonucleotide
  Antisense strand to SEQ ID NO: 902836
ucagagaugacauagcugu

SEQ ID NO: 902838 - RNA, 19 nt, Artificial Sequence
  Description of Artificial Sequence: Synthetic oligonucleotide
  Sense strand starting at position 227 of SEQ ID NO: 588983
cuaugucaucucugauguu

SEQ ID NO: 902839 - RNA, 19 nt, Artificial Sequence
  Description of Artificial Sequence: Synthetic oligonucleotide
  Antisense strand to SEQ ID NO: 902838
aacaucagagaugacauag

SEQ ID NO: 902840 - RNA, 19 nt, Artificial Sequence
  Description of Artificial Sequence: Synthetic oligonucleotide
  Sense strand starting at position 436 of SEQ ID NO: 588983
agagaaaucucaggguaaa

SEQ ID NO: 902841 - RNA, 19 nt, Artificial Sequence
  Description of Artificial Sequence: Synthetic oligonucleotide
  Antisense strand to SEQ ID NO: 902840
uuuacccugagauuucucu

SEQ ID NO: 902842 - RNA, 19 nt, Artificial Sequence
  Description of Artificial Sequence: Synthetic oligonucleotide
  Sense strand starting at position 448 of SEQ ID NO: 588983
ggguaaaugaccugccaag

SEQ ID NO: 902843 - RNA, 19 nt, Artificial Sequence
  Description of Artificial Sequence: Synthetic oligonucleotide
  Antisense strand to SEQ ID NO: 902842
cuuggcaggucauuuaccc

SEQ ID NO: 902844 - RNA, 19 nt, Artificial Sequence
  Description of Artificial Sequence: Synthetic oligonucleotide
  Sense strand starting at position 531 of SEQ ID NO: 588983
acagcuuaaugaggguaaa

SEQ ID NO: 902845 - RNA, 19 nt, Artificial Sequence
  Description of Artificial Sequence: Synthetic oligonucleotide
  Antisense strand to SEQ ID NO: 902844
uuuacccucauuaagcugu

SEQ ID NO: 902846 - RNA, 19 nt, Artificial Sequence
  Description of Artificial Sequence: Synthetic oligonucleotide
  Sense strand starting at position 532 of SEQ ID NO: 588983
cagcuuaaugaggguaaau

SEQ ID NO: 902847 - RNA, 19 nt, Artificial Sequence
  Description of Artificial Sequence: Synthetic oligonucleotide
  Antisense strand to SEQ ID NO: 902846
auuuacccucauuaagcug

SEQ ID NO: 902848 - RNA, 19 nt, Artificial Sequence
  Description of Artificial Sequence: Synthetic oligonucleotide
  Sense strand starting at position 637 of SEQ ID NO: 588983
cccuuaggguuguaacuca

SEQ ID NO: 902849 - RNA, 19 nt, Artificial Sequence
  Description of Artificial Sequence: Synthetic oligonucleotide
  Antisense strand to SEQ ID NO: 902848
ugaguuacaacccuaaggg

SEQ ID NO: 902850 - RNA, 19 nt, Artificial Sequence
  Description of Artificial Sequence: Synthetic oligonucleotide
  Sense strand starting at position 735 of SEQ ID NO: 588983
gcugcagucuccucuccaa

SEQ ID NO: 902851 - RNA, 19 nt, Artificial Sequence
  Description of Artificial Sequence: Synthetic oligonucleotide
  Antisense strand to SEQ ID NO: 902850
uuggagaggagacugcagc

SEQ ID NO: 902852 - RNA, 19 nt, Artificial Sequence
  Description of Artificial Sequence: Synthetic oligonucleotide
  Sense strand starting at position 764 of SEQ ID NO: 588983
aggauuaauugagguagau

SEQ ID NO: 902853 - RNA, 19 nt, Artificial Sequence
  Description of Artificial Sequence: Synthetic oligonucleotide
  Antisense strand to SEQ ID NO: 902852
aucuaccucaauuaauccu

SEQ ID NO: 902854 - RNA, 19 nt, Artificial Sequence
  Description of Artificial Sequence: Synthetic oligonucleotide
  Sense strand starting at position 812 of SEQ ID NO: 588983
augacucauugcuugauca

SEQ ID NO: 902855 - RNA, 19 nt, Artificial Sequence
  Description of Artificial Sequence: Synthetic oligonucleotide
  Antisense strand to SEQ ID NO: 902854
ugaucaagcaaugagucau

SEQ ID NO: 902856 - RNA, 19 nt, Artificial Sequence
  Description of Artificial Sequence: Synthetic oligonucleotide
  Sense strand starting at position 819 of SEQ ID NO: 588983
auugcuugaucacuguaca

SEQ ID NO: 902857 - RNA, 19 nt, Artificial Sequence
  Description of Artificial Sequence: Synthetic oligonucleotide
  Antisense strand to SEQ ID NO: 902856
uguacagugaucaagcaau

SEQ ID NO: 902858 - RNA, 19 nt, Artificial Sequence
  Description of Artificial Sequence: Synthetic oligonucleotide
  Sense strand starting at position 820 of SEQ ID NO: 588983
uugcuugaucacuguacau

SEQ ID NO: 902859 - RNA, 19 nt, Artificial Sequence
  Description of Artificial Sequence: Synthetic oligonucleotide
  Antisense strand to SEQ ID NO: 902858
auguacagugaucaagcaa

SEQ ID NO: 902860 - RNA, 19 nt, Artificial Sequence
  Description of Artificial Sequence: Synthetic oligonucleotide
  Sense strand starting at position 822 of SEQ ID NO: 588983
gcuugaucacuguacauuc

SEQ ID NO: 902861 - RNA, 19 nt, Artificial Sequence
  Description of Artificial Sequence: Synthetic oligonucleotide
  Antisense strand to SEQ ID NO: 902860
gaauguacagugaucaagc

SEQ ID NO: 902862 - RNA, 19 nt, Artificial Sequence
  Description of Artificial Sequence: Synthetic oligonucleotide
  Sense strand starting at position 910 of SEQ ID NO: 588983
uccacugucuuggauuacu

SEQ ID NO: 902863 - RNA, 19 nt, Artificial Sequence
  Description of Artificial Sequence: Synthetic oligonucleotide
  Antisense strand to SEQ ID NO: 902862
aguaauccaagacagugga

SEQ ID NO: 902864 - RNA, 19 nt, Artificial Sequence
  Description of Artificial Sequence: Synthetic oligonucleotide
  Sense strand starting at position 920 of SEQ ID NO: 588983
uggauuacuuguguaaguu

SEQ ID NO: 902865 - RNA, 19 nt, Artificial Sequence
  Description of Artificial Sequence: Synthetic oligonucleotide
  Antisense strand to SEQ ID NO: 902864
aacuuacacaaguaaucca

SEQ ID NO: 902866 - RNA, 19 nt, Artificial Sequence
  Description of Artificial Sequence: Synthetic oligonucleotide
  Sense strand starting at position 921 of SEQ ID NO: 588983
ggauuacuuguguaaguuu

SEQ ID NO: 902867 - RNA, 19 nt, Artificial Sequence
  Description of Artificial Sequence: Synthetic oligonucleotide
  Antisense strand to SEQ ID NO: 902866
aaacuuacacaaguaaucc

SEQ ID NO: 902868 - RNA, 19 nt, Artificial Sequence
  Description of Artificial Sequence: Synthetic oligonucleotide
  Sense strand starting at position 948 of SEQ ID NO: 588983
ccugguuacugagaugaaa

SEQ ID NO: 902869 - RNA, 19 nt, Artificial Sequence
  Description of Artificial Sequence: Synthetic oligonucleotide
  Antisense strand to SEQ ID NO: 902868
uuucaucucaguaaccagg

SEQ ID NO: 902870 - RNA, 19 nt, Artificial Sequence
  Description of Artificial Sequence: Synthetic oligonucleotide
  Sense strand starting at position 1295 of SEQ ID NO: 588983
uacuaagauuuggaggcua

SEQ ID NO: 902871 - RNA, 19 nt, Artificial Sequence
  Description of Artificial Sequence: Synthetic oligonucleotide
  Antisense strand to SEQ ID NO: 902870
uagccuccaaaucuuagua

SEQ ID NO: 902872 - RNA, 19 nt, Artificial Sequence
  Description of Artificial Sequence: Synthetic oligonucleotide
  Sense strand starting at position 2279 of SEQ ID NO: 588983
agccgcuacccuuaauuua

SEQ ID NO: 902873 - RNA, 19 nt, Artificial Sequence
  Description of Artificial Sequence: Synthetic oligonucleotide
  Antisense strand to SEQ ID NO: 902872
uaaauuaaggguagcggcu

SEQ ID NO: 902874 - RNA, 19 nt, Artificial Sequence
  Description of Artificial Sequence: Synthetic oligonucleotide
  Sense strand starting at position 2295 of SEQ ID NO: 588983
uuagaaguuuccugcaaau

SEQ ID NO: 902875 - RNA, 19 nt, Artificial Sequence
  Description of Artificial Sequence: Synthetic oligonucleotide
  Antisense strand to SEQ ID NO: 902874
auuugcaggaaacuucuaa

SEQ ID NO: 902876 - RNA, 19 nt, Artificial Sequence
  Description of Artificial Sequence: Synthetic oligonucleotide
  Sense strand starting at position 2321 of SEQ ID NO: 588983
gauuaaaugucucucggga

SEQ ID NO: 902877 - RNA, 19 nt, Artificial Sequence
  Description of Artificial Sequence: Synthetic oligonucleotide
  Antisense strand to SEQ ID NO: 902876
ucccgagagacauuuaauc

SEQ ID NO: 902878 - RNA, 19 nt, Artificial Sequence
  Description of Artificial Sequence: Synthetic oligonucleotide
  Sense strand starting at position 2354 of SEQ ID NO: 588983
gcaguuugagugccucagu

SEQ ID NO: 902879 - RNA, 19 nt, Artificial Sequence
  Description of Artificial Sequence: Synthetic oligonucleotide
  Antisense strand to SEQ ID NO: 902878
acugaggcacucaaacugc

SEQ ID NO: 902880 - RNA, 19 nt, Artificial Sequence
  Description of Artificial Sequence: Synthetic oligonucleotide
  Sense strand starting at position 2355 of SEQ ID NO: 588983
caguuugagugccucaguu

SEQ ID NO: 902881 - RNA, 19 nt, Artificial Sequence
  Description of Artificial Sequence: Synthetic oligonucleotide
  Antisense strand to SEQ ID NO: 902880
aacugaggcacucaaacug

SEQ ID NO: 902882 - RNA, 19 nt, Artificial Sequence
  Description of Artificial Sequence: Synthetic oligonucleotide
  Sense strand starting at position 2357 of SEQ ID NO: 588983
guuugagugccucaguuua

SEQ ID NO: 902883 - RNA, 19 nt, Artificial Sequence
  Description of Artificial Sequence: Synthetic oligonucleotide
  Antisense strand to SEQ ID NO: 902882
uaaacugaggcacucaaac

SEQ ID NO: 902884 - RNA, 19 nt, Artificial Sequence
  Description of Artificial Sequence: Synthetic oligonucleotide
  Sense strand starting at position 2365 of SEQ ID NO: 588983
gccucaguuuacccugagu

SEQ ID NO: 902885 - RNA, 19 nt, Artificial Sequence
  Description of Artificial Sequence: Synthetic oligonucleotide
  Antisense strand to SEQ ID NO: 902884
acucaggguaaacugaggc

SEQ ID NO: 902886 - RNA, 19 nt, Artificial Sequence
  Description of Artificial Sequence: Synthetic oligonucleotide
  Sense strand starting at position 2388 of SEQ ID NO: 588983
cuagguuugcguuaucgac

SEQ ID NO: 902887 - RNA, 19 nt, Artificial Sequence
  Description of Artificial Sequence: Synthetic oligonucleotide
  Antisense strand to SEQ ID NO: 902886
gucgauaacgcaaaccuag

SEQ ID NO: 902888 - RNA, 19 nt, Artificial Sequence
  Description of Artificial Sequence: Synthetic oligonucleotide
  Sense strand starting at position 2396 of SEQ ID NO: 588983
gcguuaucgacgugguggu

SEQ ID NO: 902889 - RNA, 19 nt, Artificial Sequence
  Description of Artificial Sequence: Synthetic oligonucleotide
  Antisense strand to SEQ ID NO: 902888
accaccacgucgauaacgc

SEQ ID NO: 902890 - RNA, 19 nt, Artificial Sequence
  Description of Artificial Sequence: Synthetic oligonucleotide
  Sense strand starting at position 2813 of SEQ ID NO: 588983
gggccaacuuuaugcugaa

SEQ ID NO: 902891 - RNA, 19 nt, Artificial Sequence
  Description of Artificial Sequence: Synthetic oligonucleotide
  Antisense strand to SEQ ID NO: 902890
uucagcauaaaguuggccc

SEQ ID NO: 902892 - RNA, 19 nt, Artificial Sequence
  Description of Artificial Sequence: Synthetic oligonucleotide
  Sense strand starting at position 2814 of SEQ ID NO: 588983
ggccaacuuuaugcugaaa

SEQ ID NO: 902893 - RNA, 19 nt, Artificial Sequence
  Description of Artificial Sequence: Synthetic oligonucleotide
  Antisense strand to SEQ ID NO: 902892
uuucagcauaaaguuggcc

SEQ ID NO: 902894 - RNA, 19 nt, Artificial Sequence
  Description of Artificial Sequence: Synthetic oligonucleotide
  Sense strand starting at position 3333 of SEQ ID NO: 588983
ccucuaacuccguggaaga

SEQ ID NO: 902895 - RNA, 19 nt, Artificial Sequence
  Description of Artificial Sequence: Synthetic oligonucleotide
  Antisense strand to SEQ ID NO: 902894
ucuuccacggaguuagagg

SEQ ID NO: 902896 - RNA, 19 nt, Artificial Sequence
  Description of Artificial Sequence: Synthetic oligonucleotide
  Sense strand starting at position 3362 of SEQ ID NO: 588983
accaguagccuaugcuaga

SEQ ID NO: 902897 - RNA, 19 nt, Artificial Sequence
  Description of Artificial Sequence: Synthetic oligonucleotide
  Antisense strand to SEQ ID NO: 902896
ucuagcauaggcuacuggu

SEQ ID NO: 902898 - RNA, 19 nt, Artificial Sequence
  Description of Artificial Sequence: Synthetic oligonucleotide
  Sense strand starting at position 3551 of SEQ ID NO: 588983
auuugacugucccaugaca

SEQ ID NO: 902899 - RNA, 19 nt, Artificial Sequence
  Description of Artificial Sequence: Synthetic oligonucleotide
  Antisense strand to SEQ ID NO: 902898
ugucaugggacagucaaau

SEQ ID NO: 902900 - RNA, 19 nt, Artificial Sequence
  Description of Artificial Sequence: Synthetic oligonucleotide
  Sense strand starting at position 3553 of SEQ ID NO: 588983
uugacugucccaugacauu

SEQ ID NO: 902901 - RNA, 19 nt, Artificial Sequence
  Description of Artificial Sequence: Synthetic oligonucleotide
  Antisense strand to SEQ ID NO: 902900
aaugucaugggacagucaa

SEQ ID NO: 902902 - RNA, 19 nt, Artificial Sequence
  Description of Artificial Sequence: Synthetic oligonucleotide
  Sense strand starting at position 3562 of SEQ ID NO: 588983
ccaugacauuguugucaaa

SEQ ID NO: 902903 - RNA, 19 nt, Artificial Sequence
  Description of Artificial Sequence: Synthetic oligonucleotide
  Antisense strand to SEQ ID NO: 902902
uuugacaacaaugucaugg

SEQ ID NO: 902904 - RNA, 19 nt, Artificial Sequence
  Description of Artificial Sequence: Synthetic oligonucleotide
  Sense strand starting at position 3564 of SEQ ID NO: 588983
augacauuguugucaaaua

SEQ ID NO: 902905 - RNA, 19 nt, Artificial Sequence
  Description of Artificial Sequence: Synthetic oligonucleotide
  Antisense strand to SEQ ID NO: 902904
uauuugacaacaaugucau

SEQ ID NO: 902906 - RNA, 19 nt, Artificial Sequence
  Description of Artificial Sequence: Synthetic oligonucleotide
  Sense strand starting at position 3565 of SEQ ID NO: 588983
ugacauuguugucaaauau

SEQ ID NO: 902907 - RNA, 19 nt, Artificial Sequence
  Description of Artificial Sequence: Synthetic oligonucleotide
  Antisense strand to SEQ ID NO: 902906
auauuugacaacaauguca

SEQ ID NO: 902908 - RNA, 19 nt, Artificial Sequence
  Description of Artificial Sequence: Synthetic oligonucleotide
  Sense strand starting at position 3593 of SEQ ID NO: 588983
aguuaaugcgaauauuauc

SEQ ID NO: 902909 - RNA, 19 nt, Artificial Sequence
  Description of Artificial Sequence: Synthetic oligonucleotide
  Antisense strand to SEQ ID NO: 902908
gauaauauucgcauuaacu

SEQ ID NO: 902910 - RNA, 19 nt, Artificial Sequence
  Description of Artificial Sequence: Synthetic oligonucleotide
  Sense strand starting at position 3692 of SEQ ID NO: 588983
ucuugaacuuaugggcuua

SEQ ID NO: 902911 - RNA, 19 nt, Artificial Sequence
  Description of Artificial Sequence: Synthetic oligonucleotide
  Antisense strand to SEQ ID NO: 902910
uaagcccauaaguucaaga

SEQ ID NO: 902912 - RNA, 19 nt, Artificial Sequence
  Description of Artificial Sequence: Synthetic oligonucleotide
  Sense strand starting at position 145 of SEQ ID NO: 588984
gccucaaguccauguagaa

SEQ ID NO: 902913 - RNA, 19 nt, Artificial Sequence
  Description of Artificial Sequence: Synthetic oligonucleotide
  Antisense strand to SEQ ID NO: 902912
uucuacauggacuugaggc

SEQ ID NO: 902914 - RNA, 19 nt, Artificial Sequence
  Description of Artificial Sequence: Synthetic oligonucleotide
  Sense strand starting at position 218 of SEQ ID NO: 588984
aguucugugagcugucacu

SEQ ID NO: 902915 - RNA, 19 nt, Artificial Sequence
  Description of Artificial Sequence: Synthetic oligonucleotide
  Antisense strand to SEQ ID NO: 902914
agugacagcucacagaacu

SEQ ID NO: 902916 - RNA, 19 nt, Artificial Sequence
  Description of Artificial Sequence: Synthetic oligonucleotide
  Sense strand starting at position 272 of SEQ ID NO: 588984
ugaccuucuuucuugagga

SEQ ID NO: 902917 - RNA, 19 nt, Artificial Sequence
  Description of Artificial Sequence: Synthetic oligonucleotide
  Antisense strand to SEQ ID NO: 902916
uccucaagaaagaagguca

SEQ ID NO: 902918 - RNA, 19 nt, Artificial Sequence
  Description of Artificial Sequence: Synthetic oligonucleotide
  Sense strand starting at position 273 of SEQ ID NO: 588984
gaccuucuuucuugaggag

SEQ ID NO: 902919 - RNA, 19 nt, Artificial Sequence
  Description of Artificial Sequence: Synthetic oligonucleotide
  Antisense strand to SEQ ID NO: 902918
cuccucaagaaagaagguc

SEQ ID NO: 902920 - RNA, 19 nt, Artificial Sequence
  Description of Artificial Sequence: Synthetic oligonucleotide
  Sense strand starting at position 434 of SEQ ID NO: 588984
cccuguuggccugacugaa

SEQ ID NO: 902921 - RNA, 19 nt, Artificial Sequence
  Description of Artificial Sequence: Synthetic oligonucleotide
  Antisense strand to SEQ ID NO: 902920
uucagucaggccaacaggg

SEQ ID NO: 902922 - RNA, 19 nt, Artificial Sequence
  Description of Artificial Sequence: Synthetic oligonucleotide
  Sense strand starting at position 611 of SEQ ID NO: 588984
ccgagucuaccucaucgau

SEQ ID NO: 902923 - RNA, 19 nt, Artificial Sequence
  Description of Artificial Sequence: Synthetic oligonucleotide
  Antisense strand to SEQ ID NO: 902922
aucgaugagguagacucgg

SEQ ID NO: 902924 - RNA, 19 nt, Artificial Sequence
  Description of Artificial Sequence: Synthetic oligonucleotide
  Sense strand starting at position 613 of SEQ ID NO: 588984
gagucuaccucaucgauga

SEQ ID NO: 902925 - RNA, 19 nt, Artificial Sequence
  Description of Artificial Sequence: Synthetic oligonucleotide
  Antisense strand to SEQ ID NO: 902924
ucaucgaugagguagacuc

SEQ ID NO: 902926 - RNA, 19 nt, Artificial Sequence
  Description of Artificial Sequence: Synthetic oligonucleotide
  Sense strand starting at position 614 of SEQ ID NO: 588984
agucuaccucaucgaugaa

SEQ ID NO: 902927 - RNA, 19 nt, Artificial Sequence
  Description of Artificial Sequence: Synthetic oligonucleotide
  Antisense strand to SEQ ID NO: 902926
uucaucgaugagguagacu

SEQ ID NO: 902928 - RNA, 19 nt, Artificial Sequence
  Description of Artificial Sequence: Synthetic oligonucleotide
  Sense strand starting at position 617 of SEQ ID NO: 588984
cuaccucaucgaugaaggu

SEQ ID NO: 902929 - RNA, 19 nt, Artificial Sequence
  Description of Artificial Sequence: Synthetic oligonucleotide
  Antisense strand to SEQ ID NO: 902928
accuucaucgaugagguag

SEQ ID NO: 902930 - RNA, 19 nt, Artificial Sequence
  Description of Artificial Sequence: Synthetic oligonucleotide
  Sense strand starting at position 652 of SEQ ID NO: 588984
cucacauauucccggcuau

SEQ ID NO: 902931 - RNA, 19 nt, Artificial Sequence
  Description of Artificial Sequence: Synthetic oligonucleotide
  Antisense strand to SEQ ID NO: 902930
auagccgggaauaugugag

SEQ ID NO: 902932 - RNA, 19 nt, Artificial Sequence
  Description of Artificial Sequence: Synthetic oligonucleotide
  Sense strand starting at position 653 of SEQ ID NO: 588984
ucacauauucccggcuauu

SEQ ID NO: 902933 - RNA, 19 nt, Artificial Sequence
  Description of Artificial Sequence: Synthetic oligonucleotide
  Antisense strand to SEQ ID NO: 902932
aauagccgggaauauguga

SEQ ID NO: 902934 - RNA, 19 nt, Artificial Sequence
  Description of Artificial Sequence: Synthetic oligonucleotide
  Sense strand starting at position 662 of SEQ ID NO: 588984
cccggcuauucuuggccaa

SEQ ID NO: 902935 - RNA, 19 nt, Artificial Sequence
  Description of Artificial Sequence: Synthetic oligonucleotide
  Antisense strand to SEQ ID NO: 902934
uuggccaagaauagccggg

SEQ ID NO: 902936 - RNA, 19 nt, Artificial Sequence
  Description of Artificial Sequence: Synthetic oligonucleotide
  Sense strand starting at position 1006 of SEQ ID NO: 588984
augaaagaauuucgagagu

SEQ ID NO: 902937 - RNA, 19 nt, Artificial Sequence
  Description of Artificial Sequence: Synthetic oligonucleotide
  Antisense strand to SEQ ID NO: 902936
acucucgaaauucuuucau

SEQ ID NO: 902938 - RNA, 19 nt, Artificial Sequence
  Description of Artificial Sequence: Synthetic oligonucleotide
  Sense strand starting at position 1099 of SEQ ID NO: 588984
ggccguaucucgaaggagu

SEQ ID NO: 902939 - RNA, 19 nt, Artificial Sequence
  Description of Artificial Sequence: Synthetic oligonucleotide
  Antisense strand to SEQ ID NO: 902938
acuccuucgagauacggcc

SEQ ID NO: 902940 - RNA, 19 nt, Artificial Sequence
  Description of Artificial Sequence: Synthetic oligonucleotide
  Sense strand starting at position 1100 of SEQ ID NO: 588984
gccguaucucgaaggaguc

SEQ ID NO: 902941 - RNA, 19 nt, Artificial Sequence
  Description of Artificial Sequence: Synthetic oligonucleotide
  Antisense strand to SEQ ID NO: 902940
gacuccuucgagauacggc

SEQ ID NO: 902942 - RNA, 19 nt, Artificial Sequence
  Description of Artificial Sequence: Synthetic oligonucleotide
  Sense strand starting at position 1321 of SEQ ID NO: 588984
gccgagugcccguuggaga

SEQ ID NO: 902943 - RNA, 19 nt, Artificial Sequence
  Description of Artificial Sequence: Synthetic oligonucleotide
  Antisense strand to SEQ ID NO: 902942
ucuccaacgggcacucggc

SEQ ID NO: 902944 - RNA, 19 nt, Artificial Sequence
  Description of Artificial Sequence: Synthetic oligonucleotide
  Sense strand starting at position 1399 of SEQ ID NO: 588984
ccggucuucuggaggaagu

SEQ ID NO: 902945 - RNA, 19 nt, Artificial Sequence
  Description of Artificial Sequence: Synthetic oligonucleotide
  Antisense strand to SEQ ID NO: 902944
acuuccuccagaagaccgg

SEQ ID NO: 902946 - RNA, 19 nt, Artificial Sequence
  Description of Artificial Sequence: Synthetic oligonucleotide
  Sense strand starting at position 2180 of SEQ ID NO: 588984
gacccuaccgauuggacaa

SEQ ID NO: 902947 - RNA, 19 nt, Artificial Sequence
  Description of Artificial Sequence: Synthetic oligonucleotide
  Antisense strand to SEQ ID NO: 902946
uuguccaaucgguaggguc

SEQ ID NO: 902948 - RNA, 19 nt, Artificial Sequence
  Description of Artificial Sequence: Synthetic oligonucleotide
  Sense strand starting at position 2636 of SEQ ID NO: 588984
cgaaccaguuucucagaaa

SEQ ID NO: 902949 - RNA, 19 nt, Artificial Sequence
  Description of Artificial Sequence: Synthetic oligonucleotide
  Antisense strand to SEQ ID NO: 902948
uuucugagaaacugguucg

SEQ ID NO: 902950 - RNA, 19 nt, Artificial Sequence
  Description of Artificial Sequence: Synthetic oligonucleotide
  Sense strand starting at position 2806 of SEQ ID NO: 588984
uggagagcucuccaaugca

SEQ ID NO: 902951 - RNA, 19 nt, Artificial Sequence
  Description of Artificial Sequence: Synthetic oligonucleotide
  Antisense strand to SEQ ID NO: 902950
ugcauuggagagcucucca

SEQ ID NO: 902952 - RNA, 19 nt, Artificial Sequence
  Description of Artificial Sequence: Synthetic oligonucleotide
  Sense strand starting at position 3068 of SEQ ID NO: 588984
gggagaucgcuuggaguca

SEQ ID NO: 902953 - RNA, 19 nt, Artificial Sequence
  Description of Artificial Sequence: Synthetic oligonucleotide
  Antisense strand to SEQ ID NO: 902952
ugacuccaagcgaucuccc

SEQ ID NO: 902954 - RNA, 19 nt, Artificial Sequence
  Description of Artificial Sequence: Synthetic oligonucleotide
  Sense strand starting at position 3150 of SEQ ID NO: 588984
gcagccugcucaguagaca

SEQ ID NO: 902955 - RNA, 19 nt, Artificial Sequence
  Description of Artificial Sequence: Synthetic oligonucleotide
  Antisense strand to SEQ ID NO: 902954
ugucuacugagcaggcugc

SEQ ID NO: 902956 - RNA, 19 nt, Artificial Sequence
  Description of Artificial Sequence: Synthetic oligonucleotide
  Sense strand starting at position 3196 of SEQ ID NO: 588984
gggucucugcaaugaugca

SEQ ID NO: 902957 - RNA, 19 nt, Artificial Sequence
  Description of Artificial Sequence: Synthetic oligonucleotide
  Antisense strand to SEQ ID NO: 902956
ugcaucauugcagagaccc

SEQ ID NO: 902958 - RNA, 19 nt, Artificial Sequence
  Description of Artificial Sequence: Synthetic oligonucleotide
  Sense strand starting at position 3319 of SEQ ID NO: 588984
cuccauuaagcuggagaaa

SEQ ID NO: 902959 - RNA, 19 nt, Artificial Sequence
  Description of Artificial Sequence: Synthetic oligonucleotide
  Antisense strand to SEQ ID NO: 902958
uuucuccagcuuaauggag

SEQ ID NO: 902960 - RNA, 19 nt, Artificial Sequence
  Description of Artificial Sequence: Synthetic oligonucleotide
  Sense strand starting at position 3636 of SEQ ID NO: 588984
ugggccuggccagaauaaa

SEQ ID NO: 902961 - RNA, 19 nt, Artificial Sequence
  Description of Artificial Sequence: Synthetic oligonucleotide
  Antisense strand to SEQ ID NO: 902960
uuuauucuggccaggccca

SEQ ID NO: 902962 - RNA, 19 nt, Artificial Sequence
  Description of Artificial Sequence: Synthetic oligonucleotide
  Sense strand starting at position 3678 of SEQ ID NO: 588984
ccaagugucuccucccuua

SEQ ID NO: 902963 - RNA, 19 nt, Artificial Sequence
  Description of Artificial Sequence: Synthetic oligonucleotide
  Antisense strand to SEQ ID NO: 902962
uaagggaggagacacuugg

SEQ ID NO: 902964 - RNA, 19 nt, Artificial Sequence
  Description of Artificial Sequence: Synthetic oligonucleotide
  Sense strand starting at position 3753 of SEQ ID NO: 588984
cuaguaggguugcccaauu

SEQ ID NO: 902965 - RNA, 19 nt, Artificial Sequence
  Description of Artificial Sequence: Synthetic oligonucleotide
  Antisense strand to SEQ ID NO: 902964
aauugggcaacccuacuag

SEQ ID NO: 902966 - RNA, 19 nt, Artificial Sequence
  Description of Artificial Sequence: Synthetic oligonucleotide
  Sense strand starting at position 3860 of SEQ ID NO: 588984
gcuugaaucuggcuuugac

SEQ ID NO: 902967 - RNA, 19 nt, Artificial Sequence
  Description of Artificial Sequence: Synthetic oligonucleotide
  Antisense strand to SEQ ID NO: 902966
gucaaagccagauucaagc

SEQ ID NO: 902968 - RNA, 19 nt, Artificial Sequence
  Description of Artificial Sequence: Synthetic oligonucleotide
  Sense strand starting at position 3863 of SEQ ID NO: 588984
ugaaucuggcuuugacaaa

SEQ ID NO: 902969 - RNA, 19 nt, Artificial Sequence
  Description of Artificial Sequence: Synthetic oligonucleotide
  Antisense strand to SEQ ID NO: 902968
uuugucaaagccagauuca

SEQ ID NO: 902970 - RNA, 19 nt, Artificial Sequence
  Description of Artificial Sequence: Synthetic oligonucleotide
  Sense strand starting at position 14 of SEQ ID NO: 588985
gugugcuugggauggagau

SEQ ID NO: 902971 - RNA, 19 nt, Artificial Sequence
  Description of Artificial Sequence: Synthetic oligonucleotide
  Antisense strand to SEQ ID NO: 902970
aucuccaucccaagcacac

SEQ ID NO: 902972 - RNA, 19 nt, Artificial Sequence
  Description of Artificial Sequence: Synthetic oligonucleotide
  Sense strand starting at position 134 of SEQ ID NO: 588985
gugguuucagaucaugggu

SEQ ID NO: 902973 - RNA, 19 nt, Artificial Sequence
  Description of Artificial Sequence: Synthetic oligonucleotide
  Antisense strand to SEQ ID NO: 902972
acccaugaucugaaaccac

SEQ ID NO: 902974 - RNA, 19 nt, Artificial Sequence
  Description of Artificial Sequence: Synthetic oligonucleotide
  Sense strand starting at position 173 of SEQ ID NO: 588985
aguugaaauccugggucca

SEQ ID NO: 902975 - RNA, 19 nt, Artificial Sequence
  Description of Artificial Sequence: Synthetic oligonucleotide
  Antisense strand to SEQ ID NO: 902974
uggacccaggauuucaacu

SEQ ID NO: 902976 - RNA, 19 nt, Artificial Sequence
  Description of Artificial Sequence: Synthetic oligonucleotide
  Sense strand starting at position 174 of SEQ ID NO: 588985
guugaaauccuggguccac

SEQ ID NO: 902977 - RNA, 19 nt, Artificial Sequence
  Description of Artificial Sequence: Synthetic oligonucleotide
  Antisense strand to SEQ ID NO: 902976
guggacccaggauuucaac

SEQ ID NO: 902978 - RNA, 19 nt, Artificial Sequence
  Description of Artificial Sequence: Synthetic oligonucleotide
  Sense strand starting at position 175 of SEQ ID NO: 588985
uugaaauccuggguccacu

SEQ ID NO: 902979 - RNA, 19 nt, Artificial Sequence
  Description of Artificial Sequence: Synthetic oligonucleotide
  Antisense strand to SEQ ID NO: 902978
aguggacccaggauuucaa

SEQ ID NO: 902980 - RNA, 19 nt, Artificial Sequence
  Description of Artificial Sequence: Synthetic oligonucleotide
  Sense strand starting at position 214 of SEQ ID NO: 588985
gggacaaaguccuuaacuu

SEQ ID NO: 902981 - RNA, 19 nt, Artificial Sequence
  Description of Artificial Sequence: Synthetic oligonucleotide
  Antisense strand to SEQ ID NO: 902980
aaguuaaggacuuuguccc

SEQ ID NO: 902982 - RNA, 19 nt, Artificial Sequence
  Description of Artificial Sequence: Synthetic oligonucleotide
  Sense strand starting at position 327 of SEQ ID NO: 588985
ugguguguaacccaaguga

SEQ ID NO: 902983 - RNA, 19 nt, Artificial Sequence
  Description of Artificial Sequence: Synthetic oligonucleotide
  Antisense strand to SEQ ID NO: 902982
ucacuuggguuacacacca

SEQ ID NO: 902984 - RNA, 19 nt, Artificial Sequence
  Description of Artificial Sequence: Synthetic oligonucleotide
  Sense strand starting at position 331 of SEQ ID NO: 588985
guguaacccaagugaagua

SEQ ID NO: 902985 - RNA, 19 nt, Artificial Sequence
  Description of Artificial Sequence: Synthetic oligonucleotide
  Antisense strand to SEQ ID NO: 902984
uacuucacuuggguuacac

SEQ ID NO: 902986 - RNA, 19 nt, Artificial Sequence
  Description of Artificial Sequence: Synthetic oligonucleotide
  Sense strand starting at position 344 of SEQ ID NO: 588985
gaaguacuugaaugacauu

SEQ ID NO: 902987 - RNA, 19 nt, Artificial Sequence
  Description of Artificial Sequence: Synthetic oligonucleotide
  Antisense strand to SEQ ID NO: 902986
aaugucauucaaguacuuc

SEQ ID NO: 902988 - RNA, 19 nt, Artificial Sequence
  Description of Artificial Sequence: Synthetic oligonucleotide
  Sense strand starting at position 386 of SEQ ID NO: 588985
cuuccagcuccucagagaa

SEQ ID NO: 902989 - RNA, 19 nt, Artificial Sequence
  Description of Artificial Sequence: Synthetic oligonucleotide
  Antisense strand to SEQ ID NO: 902988
uucucugaggagcuggaag

SEQ ID NO: 902990 - RNA, 19 nt, Artificial Sequence
  Description of Artificial Sequence: Synthetic oligonucleotide
  Sense strand starting at position 480 of SEQ ID NO: 588985
caggucaucuggccugaga

SEQ ID NO: 902991 - RNA, 19 nt, Artificial Sequence
  Description of Artificial Sequence: Synthetic oligonucleotide
  Antisense strand to SEQ ID NO: 902990
ucucaggccagaugaccug

SEQ ID NO: 902992 - RNA, 19 nt, Artificial Sequence
  Description of Artificial Sequence: Synthetic oligonucleotide
  Sense strand starting at position 482 of SEQ ID NO: 588985
ggucaucuggccugagaua

SEQ ID NO: 902993 - RNA, 19 nt, Artificial Sequence
  Description of Artificial Sequence: Synthetic oligonucleotide
  Antisense strand to SEQ ID NO: 902992
uaucucaggccagaugacc

SEQ ID NO: 902994 - RNA, 19 nt, Artificial Sequence
  Description of Artificial Sequence: Synthetic oligonucleotide
  Sense strand starting at position 483 of SEQ ID NO: 588985
gucaucuggccugagauac

SEQ ID NO: 902995 - RNA, 19 nt, Artificial Sequence
  Description of Artificial Sequence: Synthetic oligonucleotide
  Antisense strand to SEQ ID NO: 902994
guaucucaggccagaugac

SEQ ID NO: 902996 - RNA, 19 nt, Artificial Sequence
  Description of Artificial Sequence: Synthetic oligonucleotide
  Sense strand starting at position 680 of SEQ ID NO: 588985
gcaagcuuuccugcagcca

SEQ ID NO: 902997 - RNA, 19 nt, Artificial Sequence
  Description of Artificial Sequence: Synthetic oligonucleotide
  Antisense strand to SEQ ID NO: 902996
uggcugcaggaaagcuugc

SEQ ID NO: 902998 - RNA, 19 nt, Artificial Sequence
  Description of Artificial Sequence: Synthetic oligonucleotide
  Sense strand starting at position 837 of SEQ ID NO: 588985
gugcgcaaccugcucuaau

SEQ ID NO: 902999 - RNA, 19 nt, Artificial Sequence
  Description of Artificial Sequence: Synthetic oligonucleotide
  Antisense strand to SEQ ID NO: 902998
auuagagcagguugcgcac

SEQ ID NO: 903000 - RNA, 19 nt, Artificial Sequence
  Description of Artificial Sequence: Synthetic oligonucleotide
  Sense strand starting at position 1171 of SEQ ID NO: 588985
cuuggaucuccagggaauc

SEQ ID NO: 903001 - RNA, 19 nt, Artificial Sequence
  Description of Artificial Sequence: Synthetic oligonucleotide
  Antisense strand to SEQ ID NO: 903000
gauucccuggagauccaag

SEQ ID NO: 903002 - RNA, 19 nt, Artificial Sequence
  Description of Artificial Sequence: Synthetic oligonucleotide
  Sense strand starting at position 1184 of SEQ ID NO: 588985
ggaaucaucucuccaagug

SEQ ID NO: 903003 - RNA, 19 nt, Artificial Sequence
  Description of Artificial Sequence: Synthetic oligonucleotide
  Antisense strand to SEQ ID NO: 903002
cacuuggagagaugauucc

SEQ ID NO: 903004 - RNA, 19 nt, Artificial Sequence
  Description of Artificial Sequence: Synthetic oligonucleotide
  Sense strand starting at position 2222 of SEQ ID NO: 588985
gcguguuuagugcucagua

SEQ ID NO: 903005 - RNA, 19 nt, Artificial Sequence
  Description of Artificial Sequence: Synthetic oligonucleotide
  Antisense strand to SEQ ID NO: 903004
uacugagcacuaaacacgc

SEQ ID NO: 903006 - RNA, 19 nt, Artificial Sequence
  Description of Artificial Sequence: Synthetic oligonucleotide
  Sense strand starting at position 2227 of SEQ ID NO: 588985
uuuagugcucaguaagaug

SEQ ID NO: 903007 - RNA, 19 nt, Artificial Sequence
  Description of Artificial Sequence: Synthetic oligonucleotide
  Antisense strand to SEQ ID NO: 903006
caucuuacugagcacuaaa

SEQ ID NO: 903008 - RNA, 19 nt, Artificial Sequence
  Description of Artificial Sequence: Synthetic oligonucleotide
  Sense strand starting at position 2348 of SEQ ID NO: 588985
agucuuaccuuucuuggau

SEQ ID NO: 903009 - RNA, 19 nt, Artificial Sequence
  Description of Artificial Sequence: Synthetic oligonucleotide
  Antisense strand to SEQ ID NO: 903008
auccaagaaagguaagacu

SEQ ID NO: 903010 - RNA, 19 nt, Artificial Sequence
  Description of Artificial Sequence: Synthetic oligonucleotide
  Sense strand starting at position 2418 of SEQ ID NO: 588985
ggagcaaucaagugauagu

SEQ ID NO: 903011 - RNA, 19 nt, Artificial Sequence
  Description of Artificial Sequence: Synthetic oligonucleotide
  Antisense strand to SEQ ID NO: 903010
acuaucacuugauugcucc

SEQ ID NO: 903012 - RNA, 19 nt, Artificial Sequence
  Description of Artificial Sequence: Synthetic oligonucleotide
  Sense strand starting at position 2427 of SEQ ID NO: 588985
aagugauaguacuugauag

SEQ ID NO: 903013 - RNA, 19 nt, Artificial Sequence
  Description of Artificial Sequence: Synthetic oligonucleotide
  Antisense strand to SEQ ID NO: 903012
cuaucaaguacuaucacuu

SEQ ID NO: 903014 - RNA, 19 nt, Artificial Sequence
  Description of Artificial Sequence: Synthetic oligonucleotide
  Sense strand starting at position 2428 of SEQ ID NO: 588985
agugauaguacuugauagu

SEQ ID NO: 903015 - RNA, 19 nt, Artificial Sequence
  Description of Artificial Sequence: Synthetic oligonucleotide
  Antisense strand to SEQ ID NO: 903014
acuaucaaguacuaucacu

SEQ ID NO: 903016 - RNA, 19 nt, Artificial Sequence
  Description of Artificial Sequence: Synthetic oligonucleotide
  Sense strand starting at position 2429 of SEQ ID NO: 588985
gugauaguacuugauagua

SEQ ID NO: 903017 - RNA, 19 nt, Artificial Sequence
  Description of Artificial Sequence: Synthetic oligonucleotide
  Antisense strand to SEQ ID NO: 903016
uacuaucaaguacuaucac

SEQ ID NO: 903018 - RNA, 19 nt, Artificial Sequence
  Description of Artificial Sequence: Synthetic oligonucleotide
  Sense strand starting at position 2437 of SEQ ID NO: 588985
acuugauaguacuugauca

SEQ ID NO: 903019 - RNA, 19 nt, Artificial Sequence
  Description of Artificial Sequence: Synthetic oligonucleotide
  Antisense strand to SEQ ID NO: 903018
ugaucaaguacuaucaagu

SEQ ID NO: 903020 - RNA, 19 nt, Artificial Sequence
  Description of Artificial Sequence: Synthetic oligonucleotide
  Sense strand starting at position 2551 of SEQ ID NO: 588985
gucgcuaaauccuuaagaa

SEQ ID NO: 903021 - RNA, 19 nt, Artificial Sequence
  Description of Artificial Sequence: Synthetic oligonucleotide
  Antisense strand to SEQ ID NO: 903020
uucuuaaggauuuagcgac

SEQ ID NO: 903022 - RNA, 19 nt, Artificial Sequence
  Description of Artificial Sequence: Synthetic oligonucleotide
  Sense strand starting at position 2552 of SEQ ID NO: 588985
ucgcuaaauccuuaagaau

SEQ ID NO: 903023 - RNA, 19 nt, Artificial Sequence
  Description of Artificial Sequence: Synthetic oligonucleotide
  Antisense strand to SEQ ID NO: 903022
auucuuaaggauuuagcga

SEQ ID NO: 903024 - RNA, 19 nt, Artificial Sequence
  Description of Artificial Sequence: Synthetic oligonucleotide
  Sense strand starting at position 2681 of SEQ ID NO: 588985
augucuuaaccuuguagga

SEQ ID NO: 903025 - RNA, 19 nt, Artificial Sequence
  Description of Artificial Sequence: Synthetic oligonucleotide
  Antisense strand to SEQ ID NO: 903024
uccuacaagguuaagacau

SEQ ID NO: 903026 - RNA, 19 nt, Artificial Sequence
  Description of Artificial Sequence: Synthetic oligonucleotide
  Sense strand starting at position 3152 of SEQ ID NO: 588985
cuggcaugccuguaagacu

SEQ ID NO: 903027 - RNA, 19 nt, Artificial Sequence
  Description of Artificial Sequence: Synthetic oligonucleotide
  Antisense strand to SEQ ID NO: 903026
agucuuacaggcaugccag

SEQ ID NO: 903028 - RNA, 19 nt, Artificial Sequence
  Description of Artificial Sequence: Synthetic oligonucleotide
  Sense strand starting at position 3163 of SEQ ID NO: 588985
guaagacucucacuuauug

SEQ ID NO: 903029 - RNA, 19 nt, Artificial Sequence
  Description of Artificial Sequence: Synthetic oligonucleotide
  Antisense strand to SEQ ID NO: 903028
caauaagugagagucuuac

SEQ ID NO: 903030 - RNA, 19 nt, Artificial Sequence
  Description of Artificial Sequence: Synthetic oligonucleotide
  Sense strand starting at position 3385 of SEQ ID NO: 588985
ggagguugcccagauguag

SEQ ID NO: 903031 - RNA, 19 nt, Artificial Sequence
  Description of Artificial Sequence: Synthetic oligonucleotide
  Antisense strand to SEQ ID NO: 903030
cuacaucugggcaaccucc

SEQ ID NO: 903032 - RNA, 19 nt, Artificial Sequence
  Description of Artificial Sequence: Synthetic oligonucleotide
  Sense strand starting at position 3444 of SEQ ID NO: 588985
agaguuaaguguuugaauu

SEQ ID NO: 903033 - RNA, 19 nt, Artificial Sequence
  Description of Artificial Sequence: Synthetic oligonucleotide
  Antisense strand to SEQ ID NO: 903032
aauucaaacacuuaacucu

SEQ ID NO: 903034 - RNA, 19 nt, Artificial Sequence
  Description of Artificial Sequence: Synthetic oligonucleotide
  Sense strand starting at position 3445 of SEQ ID NO: 588985
gaguuaaguguuugaauua

SEQ ID NO: 903035 - RNA, 19 nt, Artificial Sequence
  Description of Artificial Sequence: Synthetic oligonucleotide
  Antisense strand to SEQ ID NO: 903034
uaauucaaacacuuaacuc

SEQ ID NO: 903036 - RNA, 19 nt, Artificial Sequence
  Description of Artificial Sequence: Synthetic oligonucleotide
  Sense strand starting at position 3803 of SEQ ID NO: 588985
auugauggacucugaguca

SEQ ID NO: 903037 - RNA, 19 nt, Artificial Sequence
  Description of Artificial Sequence: Synthetic oligonucleotide
  Antisense strand to SEQ ID NO: 903036
ugacucagaguccaucaau

SEQ ID NO: 903038 - RNA, 19 nt, Artificial Sequence
  Description of Artificial Sequence: Synthetic oligonucleotide
  Sense strand starting at position 3806 of SEQ ID NO: 588985
gauggacucugagucaauu

SEQ ID NO: 903039 - RNA, 19 nt, Artificial Sequence
  Description of Artificial Sequence: Synthetic oligonucleotide
  Antisense strand to SEQ ID NO: 903038
aauugacucagaguccauc

SEQ ID NO: 903040 - RNA, 19 nt, Artificial Sequence
  Description of Artificial Sequence: Synthetic oligonucleotide
  Sense strand starting at position 3814 of SEQ ID NO: 588985
cugagucaauuagucugau

SEQ ID NO: 903041 - RNA, 19 nt, Artificial Sequence
  Description of Artificial Sequence: Synthetic oligonucleotide
  Antisense strand to SEQ ID NO: 903040
aucagacuaauugacucag

SEQ ID NO: 903042 - RNA, 19 nt, Artificial Sequence
  Description of Artificial Sequence: Synthetic oligonucleotide
  Sense strand starting at position 3815 of SEQ ID NO: 588985
ugagucaauuagucugaua

SEQ ID NO: 903043 - RNA, 19 nt, Artificial Sequence
  Description of Artificial Sequence: Synthetic oligonucleotide
  Antisense strand to SEQ ID NO: 903042
uaucagacuaauugacuca

SEQ ID NO: 903044 - RNA, 19 nt, Artificial Sequence
  Description of Artificial Sequence: Synthetic oligonucleotide
  Sense strand starting at position 3817 of SEQ ID NO: 588985
agucaauuagucugauagu

SEQ ID NO: 903045 - RNA, 19 nt, Artificial Sequence
  Description of Artificial Sequence: Synthetic oligonucleotide
  Antisense strand to SEQ ID NO: 903044
acuaucagacuaauugacu

SEQ ID NO: 903046 - RNA, 19 nt, Artificial Sequence
  Description of Artificial Sequence: Synthetic oligonucleotide
  Sense strand starting at position 3953 of SEQ ID NO: 588985
gggaguuucuaagucuagu

SEQ ID NO: 903047 - RNA, 19 nt, Artificial Sequence
  Description of Artificial Sequence: Synthetic oligonucleotide
  Antisense strand to SEQ ID NO: 903046
acuagacuuagaaacuccc

SEQ ID NO: 903048 - RNA, 19 nt, Artificial Sequence
  Description of Artificial Sequence: Synthetic oligonucleotide
  Sense strand starting at position 3956 of SEQ ID NO: 588985
aguuucuaagucuagugau

SEQ ID NO: 903049 - RNA, 19 nt, Artificial Sequence
  Description of Artificial Sequence: Synthetic oligonucleotide
  Antisense strand to SEQ ID NO: 903048
aucacuagacuuagaaacu

SEQ ID NO: 903050 - RNA, 19 nt, Artificial Sequence
  Description of Artificial Sequence: Synthetic oligonucleotide
  Sense strand starting at position 175 of SEQ ID NO: 588986
guggauuaucuggagucag

SEQ ID NO: 903051 - RNA, 19 nt, Artificial Sequence
  Description of Artificial Sequence: Synthetic oligonucleotide
  Antisense strand to SEQ ID NO: 903050
cugacuccagauaauccac

SEQ ID NO: 903052 - RNA, 19 nt, Artificial Sequence
  Description of Artificial Sequence: Synthetic oligonucleotide
  Sense strand starting at position 205 of SEQ ID NO: 588986
acuccaagcguacagaauu

SEQ ID NO: 903053 - RNA, 19 nt, Artificial Sequence
  Description of Artificial Sequence: Synthetic oligonucleotide
  Antisense strand to SEQ ID NO: 903052
aauucuguacgcuuggagu

SEQ ID NO: 903054 - RNA, 19 nt, Artificial Sequence
  Description of Artificial Sequence: Synthetic oligonucleotide
  Sense strand starting at position 245 of SEQ ID NO: 588986
guaggauggcaaugugaag

SEQ ID NO: 903055 - RNA, 19 nt, Artificial Sequence
  Description of Artificial Sequence: Synthetic oligonucleotide
  Antisense strand to SEQ ID NO: 903054
cuucacauugccauccuac

SEQ ID NO: 903056 - RNA, 19 nt, Artificial Sequence
  Description of Artificial Sequence: Synthetic oligonucleotide
  Sense strand starting at position 262 of SEQ ID NO: 588986
agcagcaugcucugaggaa

SEQ ID NO: 903057 - RNA, 19 nt, Artificial Sequence
  Description of Artificial Sequence: Synthetic oligonucleotide
  Antisense strand to SEQ ID NO: 903056
uuccucagagcaugcugcu

SEQ ID NO: 903058 - RNA, 19 nt, Artificial Sequence
  Description of Artificial Sequence: Synthetic oligonucleotide
  Sense strand starting at position 448 of SEQ ID NO: 588986
agcuuaguacaaggaagaa

SEQ ID NO: 903059 - RNA, 19 nt, Artificial Sequence
  Description of Artificial Sequence: Synthetic oligonucleotide
  Antisense strand to SEQ ID NO: 903058
uucuuccuuguacuaagcu

SEQ ID NO: 903060 - RNA, 19 nt, Artificial Sequence
  Description of Artificial Sequence: Synthetic oligonucleotide
  Sense strand starting at position 466 of SEQ ID NO: 588986
acuugcuaagaguggaaua

SEQ ID NO: 903061 - RNA, 19 nt, Artificial Sequence
  Description of Artificial Sequence: Synthetic oligonucleotide
  Antisense strand to SEQ ID NO: 903060
uauuccacucuuagcaagu

SEQ ID NO: 903062 - RNA, 19 nt, Artificial Sequence
  Description of Artificial Sequence: Synthetic oligonucleotide
  Sense strand starting at position 467 of SEQ ID NO: 588986
cuugcuaagaguggaauau

SEQ ID NO: 903063 - RNA, 19 nt, Artificial Sequence
  Description of Artificial Sequence: Synthetic oligonucleotide
  Antisense strand to SEQ ID NO: 903062
auauuccacucuuagcaag

SEQ ID NO: 903064 - RNA, 19 nt, Artificial Sequence
  Description of Artificial Sequence: Synthetic oligonucleotide
  Sense strand starting at position 480 of SEQ ID NO: 588986
gaauauguccugcacugga

SEQ ID NO: 903065 - RNA, 19 nt, Artificial Sequence
  Description of Artificial Sequence: Synthetic oligonucleotide
  Antisense strand to SEQ ID NO: 903064
uccagugcaggacauauuc

SEQ ID NO: 903066 - RNA, 19 nt, Artificial Sequence
  Description of Artificial Sequence: Synthetic oligonucleotide
  Sense strand starting at position 515 of SEQ ID NO: 588986
gguggugucuuaucacaaa

SEQ ID NO: 903067 - RNA, 19 nt, Artificial Sequence
  Description of Artificial Sequence: Synthetic oligonucleotide
  Antisense strand to SEQ ID NO: 903066
uuugugauaagacaccacc

SEQ ID NO: 903068 - RNA, 19 nt, Artificial Sequence
  Description of Artificial Sequence: Synthetic oligonucleotide
  Sense strand starting at position 567 of SEQ ID NO: 588986
agguuaugaccuugacuac

SEQ ID NO: 903069 - RNA, 19 nt, Artificial Sequence
  Description of Artificial Sequence: Synthetic oligonucleotide
  Antisense strand to SEQ ID NO: 903068
guagucaaggucauaaccu

SEQ ID NO: 903070 - RNA, 19 nt, Artificial Sequence
  Description of Artificial Sequence: Synthetic oligonucleotide
  Sense strand starting at position 607 of SEQ ID NO: 588986
ccuggaagggugugggaua

SEQ ID NO: 903071 - RNA, 19 nt, Artificial Sequence
  Description of Artificial Sequence: Synthetic oligonucleotide
  Antisense strand to SEQ ID NO: 903070
uaucccacacccuuccagg

SEQ ID NO: 903072 - RNA, 19 nt, Artificial Sequence
  Description of Artificial Sequence: Synthetic oligonucleotide
  Sense strand starting at position 654 of SEQ ID NO: 588986
ugcuguaagcaggaugaau

SEQ ID NO: 903073 - RNA, 19 nt, Artificial Sequence
  Description of Artificial Sequence: Synthetic oligonucleotide
  Antisense strand to SEQ ID NO: 903072
auucauccugcuuacagca

SEQ ID NO: 903074 - RNA, 19 nt, Artificial Sequence
  Description of Artificial Sequence: Synthetic oligonucleotide
  Sense strand starting at position 666 of SEQ ID NO: 588986
gaugaaugauuaggaggaa

SEQ ID NO: 903075 - RNA, 19 nt, Artificial Sequence
  Description of Artificial Sequence: Synthetic oligonucleotide
  Antisense strand to SEQ ID NO: 903074
uuccuccuaaucauucauc

SEQ ID NO: 903076 - RNA, 19 nt, Artificial Sequence
  Description of Artificial Sequence: Synthetic oligonucleotide
  Sense strand starting at position 1157 of SEQ ID NO: 588986
gugggcuucccugacaaga

SEQ ID NO: 903077 - RNA, 19 nt, Artificial Sequence
  Description of Artificial Sequence: Synthetic oligonucleotide
  Antisense strand to SEQ ID NO: 903076
ucuugucagggaagcccac

SEQ ID NO: 903078 - RNA, 19 nt, Artificial Sequence
  Description of Artificial Sequence: Synthetic oligonucleotide
  Sense strand starting at position 1279 of SEQ ID NO: 588986
aggaguggcuuucuguaca

SEQ ID NO: 903079 - RNA, 19 nt, Artificial Sequence
  Description of Artificial Sequence: Synthetic oligonucleotide
  Antisense strand to SEQ ID NO: 903078
uguacagaaagccacuccu

SEQ ID NO: 903080 - RNA, 19 nt, Artificial Sequence
  Description of Artificial Sequence: Synthetic oligonucleotide
  Sense strand starting at position 1449 of SEQ ID NO: 588986
ucugccuaugcuuagguaa

SEQ ID NO: 903081 - RNA, 19 nt, Artificial Sequence
  Description of Artificial Sequence: Synthetic oligonucleotide
  Antisense strand to SEQ ID NO: 903080
uuaccuaagcauaggcaga

SEQ ID NO: 903082 - RNA, 19 nt, Artificial Sequence
  Description of Artificial Sequence: Synthetic oligonucleotide
  Sense strand starting at position 1475 of SEQ ID NO: 588986
ggaagaacuucccugagua

SEQ ID NO: 903083 - RNA, 19 nt, Artificial Sequence
  Description of Artificial Sequence: Synthetic oligonucleotide
  Antisense strand to SEQ ID NO: 903082
uacucagggaaguucuucc

SEQ ID NO: 903084 - RNA, 19 nt, Artificial Sequence
  Description of Artificial Sequence: Synthetic oligonucleotide
  Sense strand starting at position 1476 of SEQ ID NO: 588986
gaagaacuucccugaguac

SEQ ID NO: 903085 - RNA, 19 nt, Artificial Sequence
  Description of Artificial Sequence: Synthetic oligonucleotide
  Antisense strand to SEQ ID NO: 903084
guacucagggaaguucuuc

SEQ ID NO: 903086 - RNA, 19 nt, Artificial Sequence
  Description of Artificial Sequence: Synthetic oligonucleotide
  Sense strand starting at position 1479 of SEQ ID NO: 588986
gaacuucccugaguacugu

SEQ ID NO: 903087 - RNA, 19 nt, Artificial Sequence
  Description of Artificial Sequence: Synthetic oligonucleotide
  Antisense strand to SEQ ID NO: 903086
acaguacucagggaaguuc

SEQ ID NO: 903088 - RNA, 19 nt, Artificial Sequence
  Description of Artificial Sequence: Synthetic oligonucleotide
  Sense strand starting at position 1485 of SEQ ID NO: 588986
cccugaguacugugaugac

SEQ ID NO: 903089 - RNA, 19 nt, Artificial Sequence
  Description of Artificial Sequence: Synthetic oligonucleotide
  Antisense strand to SEQ ID NO: 903088
gucaucacaguacucaggg

SEQ ID NO: 903090 - RNA, 19 nt, Artificial Sequence
  Description of Artificial Sequence: Synthetic oligonucleotide
  Sense strand starting at position 1524 of SEQ ID NO: 588986
uugggaaagucauuaguac

SEQ ID NO: 903091 - RNA, 19 nt, Artificial Sequence
  Description of Artificial Sequence: Synthetic oligonucleotide
  Antisense strand to SEQ ID NO: 903090
guacuaaugacuuucccaa

SEQ ID NO: 903092 - RNA, 19 nt, Artificial Sequence
  Description of Artificial Sequence: Synthetic oligonucleotide
  Sense strand starting at position 1554 of SEQ ID NO: 588986
agaugaguggacugauguu

SEQ ID NO: 903093 - RNA, 19 nt, Artificial Sequence
  Description of Artificial Sequence: Synthetic oligonucleotide
  Antisense strand to SEQ ID NO: 903092
aacaucaguccacucaucu

SEQ ID NO: 903094 - RNA, 19 nt, Artificial Sequence
  Description of Artificial Sequence: Synthetic oligonucleotide
  Sense strand starting at position 1627 of SEQ ID NO: 588986
guggauagaucuccuuucu

SEQ ID NO: 903095 - RNA, 19 nt, Artificial Sequence
  Description of Artificial Sequence: Synthetic oligonucleotide
  Antisense strand to SEQ ID NO: 903094
agaaaggagaucuauccac

SEQ ID NO: 903096 - RNA, 19 nt, Artificial Sequence
  Description of Artificial Sequence: Synthetic oligonucleotide
  Sense strand starting at position 1650 of SEQ ID NO: 588986
cucagaugcuuaccuugaa

SEQ ID NO: 903097 - RNA, 19 nt, Artificial Sequence
  Description of Artificial Sequence: Synthetic oligonucleotide
  Antisense strand to SEQ ID NO: 903096
uucaagguaagcaucugag

SEQ ID NO: 903098 - RNA, 19 nt, Artificial Sequence
  Description of Artificial Sequence: Synthetic oligonucleotide
  Sense strand starting at position 1653 of SEQ ID NO: 588986
agaugcuuaccuugaagga

SEQ ID NO: 903099 - RNA, 19 nt, Artificial Sequence
  Description of Artificial Sequence: Synthetic oligonucleotide
  Antisense strand to SEQ ID NO: 903098
uccuucaagguaagcaucu

SEQ ID NO: 903100 - RNA, 19 nt, Artificial Sequence
  Description of Artificial Sequence: Synthetic oligonucleotide
  Sense strand starting at position 2106 of SEQ ID NO: 588986
cacugacugcaugaguaaa

SEQ ID NO: 903101 - RNA, 19 nt, Artificial Sequence
  Description of Artificial Sequence: Synthetic oligonucleotide
  Antisense strand to SEQ ID NO: 903100
uuuacucaugcagucagug

SEQ ID NO: 903102 - RNA, 19 nt, Artificial Sequence
  Description of Artificial Sequence: Synthetic oligonucleotide
  Sense strand starting at position 2191 of SEQ ID NO: 588986
gccaucuauccuugacuga

SEQ ID NO: 903103 - RNA, 19 nt, Artificial Sequence
  Description of Artificial Sequence: Synthetic oligonucleotide
  Antisense strand to SEQ ID NO: 903102
ucagucaaggauagauggc

SEQ ID NO: 903104 - RNA, 19 nt, Artificial Sequence
  Description of Artificial Sequence: Synthetic oligonucleotide
  Sense strand starting at position 2606 of SEQ ID NO: 588986
agaaaugugucaucauugu

SEQ ID NO: 903105 - RNA, 19 nt, Artificial Sequence
  Description of Artificial Sequence: Synthetic oligonucleotide
  Antisense strand to SEQ ID NO: 903104
acaaugaugacacauuucu

SEQ ID NO: 903106 - RNA, 19 nt, Artificial Sequence
  Description of Artificial Sequence: Synthetic oligonucleotide
  Sense strand starting at position 2768 of SEQ ID NO: 588986
uaaguacguguguaucuaa

SEQ ID NO: 903107 - RNA, 19 nt, Artificial Sequence
  Description of Artificial Sequence: Synthetic oligonucleotide
  Antisense strand to SEQ ID NO: 903106
uuagauacacacguacuua

SEQ ID NO: 903108 - RNA, 19 nt, Artificial Sequence
  Description of Artificial Sequence: Synthetic oligonucleotide
  Sense strand starting at position 2824 of SEQ ID NO: 588986
guacuauacucuucuggga

SEQ ID NO: 903109 - RNA, 19 nt, Artificial Sequence
  Description of Artificial Sequence: Synthetic oligonucleotide
  Antisense strand to SEQ ID NO: 903108
ucccagaagaguauaguac

SEQ ID NO: 903110 - RNA, 19 nt, Artificial Sequence
  Description of Artificial Sequence: Synthetic oligonucleotide
  Sense strand starting at position 2837 of SEQ ID NO: 588986
cugggaccaucguuguaua

SEQ ID NO: 903111 - RNA, 19 nt, Artificial Sequence
  Description of Artificial Sequence: Synthetic oligonucleotide
  Antisense strand to SEQ ID NO: 903110
uauacaacgauggucccag

SEQ ID NO: 903112 - RNA, 19 nt, Artificial Sequence
  Description of Artificial Sequence: Synthetic oligonucleotide
  Sense strand starting at position 2838 of SEQ ID NO: 588986
ugggaccaucguuguauau

SEQ ID NO: 903113 - RNA, 19 nt, Artificial Sequence
  Description of Artificial Sequence: Synthetic oligonucleotide
  Antisense strand to SEQ ID NO: 903112
auauacaacgaugguccca

SEQ ID NO: 903114 - RNA, 19 nt, Artificial Sequence
  Description of Artificial Sequence: Synthetic oligonucleotide
  Sense strand starting at position 3481 of SEQ ID NO: 588986
ccaaaugugucaucagcug

SEQ ID NO: 903115 - RNA, 19 nt, Artificial Sequence
  Description of Artificial Sequence: Synthetic oligonucleotide
  Antisense strand to SEQ ID NO: 903114
cagcugaugacacauuugg

SEQ ID NO: 903116 - RNA, 19 nt, Artificial Sequence
  Description of Artificial Sequence: Synthetic oligonucleotide
  Sense strand starting at position 3506 of SEQ ID NO: 588986
ggguaaacaaauuggucua

SEQ ID NO: 903117 - RNA, 19 nt, Artificial Sequence
  Description of Artificial Sequence: Synthetic oligonucleotide
  Antisense strand to SEQ ID NO: 903116
uagaccaauuuguuuaccc

SEQ ID NO: 903118 - RNA, 19 nt, Artificial Sequence
  Description of Artificial Sequence: Synthetic oligonucleotide
  Sense strand starting at position 3508 of SEQ ID NO: 588986
guaaacaaauuggucuaua

SEQ ID NO: 903119 - RNA, 19 nt, Artificial Sequence
  Description of Artificial Sequence: Synthetic oligonucleotide
  Antisense strand to SEQ ID NO: 903118
uauagaccaauuuguuuac

SEQ ID NO: 903120 - RNA, 19 nt, Artificial Sequence
  Description of Artificial Sequence: Synthetic oligonucleotide
  Sense strand starting at position 3800 of SEQ ID NO: 588986
gcgguuacaugauuauuua

SEQ ID NO: 903121 - RNA, 19 nt, Artificial Sequence
  Description of Artificial Sequence: Synthetic oligonucleotide
  Antisense strand to SEQ ID NO: 903120
uaaauaaucauguaaccgc

SEQ ID NO: 903122 - RNA, 19 nt, Artificial Sequence
  Description of Artificial Sequence: Synthetic oligonucleotide
  Sense strand starting at position 3883 of SEQ ID NO: 588986
auaagcgcuuuguuauuua

SEQ ID NO: 903123 - RNA, 19 nt, Artificial Sequence
  Description of Artificial Sequence: Synthetic oligonucleotide
  Antisense strand to SEQ ID NO: 903122
uaaauaacaaagcgcuuau

SEQ ID NO: 903124 - RNA, 19 nt, Artificial Sequence
  Description of Artificial Sequence: Synthetic oligonucleotide
  Sense strand starting at position 3916 of SEQ ID NO: 588986
agagaauaaucucauggaa

SEQ ID NO: 903125 - RNA, 19 nt, Artificial Sequence
  Description of Artificial Sequence: Synthetic oligonucleotide
  Antisense strand to SEQ ID NO: 903124
uuccaugagauuauucucu

SEQ ID NO: 903126 - RNA, 19 nt, Artificial Sequence
  Description of Artificial Sequence: Synthetic oligonucleotide
  Sense strand starting at position 3976 of SEQ ID NO: 588986
ggucuuucggacugagcaa

SEQ ID NO: 903127 - RNA, 19 nt, Artificial Sequence
  Description of Artificial Sequence: Synthetic oligonucleotide
  Antisense strand to SEQ ID NO: 903126
uugcucaguccgaaagacc

SEQ ID NO: 903128 - RNA, 19 nt, Artificial Sequence
  Description of Artificial Sequence: Synthetic oligonucleotide
  Sense strand starting at position 3977 of SEQ ID NO: 588986
gucuuucggacugagcaaa

SEQ ID NO: 903129 - RNA, 19 nt, Artificial Sequence
  Description of Artificial Sequence: Synthetic oligonucleotide
  Antisense strand to SEQ ID NO: 903128
uuugcucaguccgaaagac

SEQ ID NO: 903130 - RNA, 19 nt, Artificial Sequence
  Description of Artificial Sequence: Synthetic oligonucleotide
  Sense strand starting at position 77 of SEQ ID NO: 588987
ugagcugaacccugacaau

SEQ ID NO: 903131 - RNA, 19 nt, Artificial Sequence
  Description of Artificial Sequence: Synthetic oligonucleotide
  Antisense strand to SEQ ID NO: 903130
auugucaggguucagcuca

SEQ ID NO: 903132 - RNA, 19 nt, Artificial Sequence
  Description of Artificial Sequence: Synthetic oligonucleotide
  Sense strand starting at position 86 of SEQ ID NO: 588987
cccugacaauccgcuugau

SEQ ID NO: 903133 - RNA, 19 nt, Artificial Sequence
  Description of Artificial Sequence: Synthetic oligonucleotide
  Antisense strand to SEQ ID NO: 903132
aucaagcggauugucaggg

SEQ ID NO: 903134 - RNA, 19 nt, Artificial Sequence
  Description of Artificial Sequence: Synthetic oligonucleotide
  Sense strand starting at position 89 of SEQ ID NO: 588987
ugacaauccgcuugauggu

SEQ ID NO: 903135 - RNA, 19 nt, Artificial Sequence
  Description of Artificial Sequence: Synthetic oligonucleotide
  Antisense strand to SEQ ID NO: 903134
accaucaagcggauuguca

SEQ ID NO: 903136 - RNA, 19 nt, Artificial Sequence
  Description of Artificial Sequence: Synthetic oligonucleotide
  Sense strand starting at position 90 of SEQ ID NO: 588987
gacaauccgcuugauggua

SEQ ID NO: 903137 - RNA, 19 nt, Artificial Sequence
  Description of Artificial Sequence: Synthetic oligonucleotide
  Antisense strand to SEQ ID NO: 903136
uaccaucaagcggauuguc

SEQ ID NO: 903138 - RNA, 19 nt, Artificial Sequence
  Description of Artificial Sequence: Synthetic oligonucleotide
  Sense strand starting at position 293 of SEQ ID NO: 588987
gggcauauuugccaggaaa

SEQ ID NO: 903139 - RNA, 19 nt, Artificial Sequence
  Description of Artificial Sequence: Synthetic oligonucleotide
  Antisense strand to SEQ ID NO: 903138
uuuccuggcaaauaugccc

SEQ ID NO: 903140 - RNA, 19 nt, Artificial Sequence
  Description of Artificial Sequence: Synthetic oligonucleotide
  Sense strand starting at position 434 of SEQ ID NO: 588987
ggugcauaauugcuuaaag

SEQ ID NO: 903141 - RNA, 19 nt, Artificial Sequence
  Description of Artificial Sequence: Synthetic oligonucleotide
  Antisense strand to SEQ ID NO: 903140
cuuuaagcaauuaugcacc

SEQ ID NO: 903142 - RNA, 19 nt, Artificial Sequence
  Description of Artificial Sequence: Synthetic oligonucleotide
  Sense strand starting at position 435 of SEQ ID NO: 588987
gugcauaauugcuuaaaga

SEQ ID NO: 903143 - RNA, 19 nt, Artificial Sequence
  Description of Artificial Sequence: Synthetic oligonucleotide
  Antisense strand to SEQ ID NO: 903142
ucuuuaagcaauuaugcac

SEQ ID NO: 903144 - RNA, 19 nt, Artificial Sequence
  Description of Artificial Sequence: Synthetic oligonucleotide
  Sense strand starting at position 436 of SEQ ID NO: 588987
ugcauaauugcuuaaagag

SEQ ID NO: 903145 - RNA, 19 nt, Artificial Sequence
  Description of Artificial Sequence: Synthetic oligonucleotide
  Antisense strand to SEQ ID NO: 903144
cucuuuaagcaauuaugca

SEQ ID NO: 903146 - RNA, 19 nt, Artificial Sequence
  Description of Artificial Sequence: Synthetic oligonucleotide
  Sense strand starting at position 455 of SEQ ID NO: 588987
ggauguccacaauaguacu

SEQ ID NO: 903147 - RNA, 19 nt, Artificial Sequence
  Description of Artificial Sequence: Synthetic oligonucleotide
  Antisense strand to SEQ ID NO: 903146
aguacuauuguggacaucc

SEQ ID NO: 903148 - RNA, 19 nt, Artificial Sequence
  Description of Artificial Sequence: Synthetic oligonucleotide
  Sense strand starting at position 484 of SEQ ID NO: 588987
cuuucuggguuguuaauau

SEQ ID NO: 903149 - RNA, 19 nt, Artificial Sequence
  Description of Artificial Sequence: Synthetic oligonucleotide
  Antisense strand to SEQ ID NO: 903148
auauuaacaacccagaaag

SEQ ID NO: 903150 - RNA, 19 nt, Artificial Sequence
  Description of Artificial Sequence: Synthetic oligonucleotide
  Sense strand starting at position 573 of SEQ ID NO: 588987
gucugaggugaugagcaau

SEQ ID NO: 903151 - RNA, 19 nt, Artificial Sequence
  Description of Artificial Sequence: Synthetic oligonucleotide
  Antisense strand to SEQ ID NO: 903150
auugcucaucaccucagac

SEQ ID NO: 903152 - RNA, 19 nt, Artificial Sequence
  Description of Artificial Sequence: Synthetic oligonucleotide
  Sense strand starting at position 600 of SEQ ID NO: 588987
aggagagauauucgucuaa

SEQ ID NO: 903153 - RNA, 19 nt, Artificial Sequence
  Description of Artificial Sequence: Synthetic oligonucleotide
  Antisense strand to SEQ ID NO: 903152
uuagacgaauaucucuccu

SEQ ID NO: 903154 - RNA, 19 nt, Artificial Sequence
  Description of Artificial Sequence: Synthetic oligonucleotide
  Sense strand starting at position 602 of SEQ ID NO: 588987
gagagauauucgucuaaca

SEQ ID NO: 903155 - RNA, 19 nt, Artificial Sequence
  Description of Artificial Sequence: Synthetic oligonucleotide
  Antisense strand to SEQ ID NO: 903154
uguuagacgaauaucucuc

SEQ ID NO: 903156 - RNA, 19 nt, Artificial Sequence
  Description of Artificial Sequence: Synthetic oligonucleotide
  Sense strand starting at position 604 of SEQ ID NO: 588987
gagauauucgucuaacagu

SEQ ID NO: 903157 - RNA, 19 nt, Artificial Sequence
  Description of Artificial Sequence: Synthetic oligonucleotide
  Antisense strand to SEQ ID NO: 903156
acuguuagacgaauaucuc

SEQ ID NO: 903158 - RNA, 19 nt, Artificial Sequence
  Description of Artificial Sequence: Synthetic oligonucleotide
  Sense strand starting at position 633 of SEQ ID NO: 588987
ccaagagguuuauauuugu

SEQ ID NO: 903159 - RNA, 19 nt, Artificial Sequence
  Description of Artificial Sequence: Synthetic oligonucleotide
  Antisense strand to SEQ ID NO: 903158
acaaauauaaaccucuugg

SEQ ID NO: 903160 - RNA, 19 nt, Artificial Sequence
  Description of Artificial Sequence: Synthetic oligonucleotide
  Sense strand starting at position 1398 of SEQ ID NO: 588987
gacugaaggcuuuaggagu

SEQ ID NO: 903161 - RNA, 19 nt, Artificial Sequence
  Description of Artificial Sequence: Synthetic oligonucleotide
  Antisense strand to SEQ ID NO: 903160
acuccuaaagccuucaguc

SEQ ID NO: 903162 - RNA, 19 nt, Artificial Sequence
  Description of Artificial Sequence: Synthetic oligonucleotide
  Sense strand starting at position 1618 of SEQ ID NO: 588987
cucugagcagccuggaauu

SEQ ID NO: 903163 - RNA, 19 nt, Artificial Sequence
  Description of Artificial Sequence: Synthetic oligonucleotide
  Antisense strand to SEQ ID NO: 903162
aauuccaggcugcucagag

SEQ ID NO: 903164 - RNA, 19 nt, Artificial Sequence
  Description of Artificial Sequence: Synthetic oligonucleotide
  Sense strand starting at position 1820 of SEQ ID NO: 588987
gccucugggcuguaagauu

SEQ ID NO: 903165 - RNA, 19 nt, Artificial Sequence
  Description of Artificial Sequence: Synthetic oligonucleotide
  Antisense strand to SEQ ID NO: 903164
aaucuuacagcccagaggc

SEQ ID NO: 903166 - RNA, 19 nt, Artificial Sequence
  Description of Artificial Sequence: Synthetic oligonucleotide
  Sense strand starting at position 1847 of SEQ ID NO: 588987
cuaucuugccugggacuga

SEQ ID NO: 903167 - RNA, 19 nt, Artificial Sequence
  Description of Artificial Sequence: Synthetic oligonucleotide
  Antisense strand to SEQ ID NO: 903166
ucagucccaggcaagauag

SEQ ID NO: 903168 - RNA, 19 nt, Artificial Sequence
  Description of Artificial Sequence: Synthetic oligonucleotide
  Sense strand starting at position 1880 of SEQ ID NO: 588987
gcaggaaagcccugaugaa

SEQ ID NO: 903169 - RNA, 19 nt, Artificial Sequence
  Description of Artificial Sequence: Synthetic oligonucleotide
  Antisense strand to SEQ ID NO: 903168
uucaucagggcuuuccugc

SEQ ID NO: 903170 - RNA, 19 nt, Artificial Sequence
  Description of Artificial Sequence: Synthetic oligonucleotide
  Sense strand starting at position 2058 of SEQ ID NO: 588987
auccaagugggauguagau

SEQ ID NO: 903171 - RNA, 19 nt, Artificial Sequence
  Description of Artificial Sequence: Synthetic oligonucleotide
  Antisense strand to SEQ ID NO: 903170
aucuacaucccacuuggau

SEQ ID NO: 903172 - RNA, 19 nt, Artificial Sequence
  Description of Artificial Sequence: Synthetic oligonucleotide
  Sense strand starting at position 2214 of SEQ ID NO: 588987
caagaugccugguccaaag

SEQ ID NO: 903173 - RNA, 19 nt, Artificial Sequence
  Description of Artificial Sequence: Synthetic oligonucleotide
  Antisense strand to SEQ ID NO: 903172
cuuuggaccaggcaucuug

SEQ ID NO: 903174 - RNA, 19 nt, Artificial Sequence
  Description of Artificial Sequence: Synthetic oligonucleotide
  Sense strand starting at position 2292 of SEQ ID NO: 588987
gugugcuugggauggagau

SEQ ID NO: 903175 - RNA, 19 nt, Artificial Sequence
  Description of Artificial Sequence: Synthetic oligonucleotide
  Antisense strand to SEQ ID NO: 903174
aucuccaucccaagcacac

SEQ ID NO: 903176 - RNA, 19 nt, Artificial Sequence
  Description of Artificial Sequence: Synthetic oligonucleotide
  Sense strand starting at position 2412 of SEQ ID NO: 588987
gugguuucagaucaugggu

SEQ ID NO: 903177 - RNA, 19 nt, Artificial Sequence
  Description of Artificial Sequence: Synthetic oligonucleotide
  Antisense strand to SEQ ID NO: 903176
acccaugaucugaaaccac

SEQ ID NO: 903178 - RNA, 19 nt, Artificial Sequence
  Description of Artificial Sequence: Synthetic oligonucleotide
  Sense strand starting at position 2451 of SEQ ID NO: 588987
aguugaaauccugggucca

SEQ ID NO: 903179 - RNA, 19 nt, Artificial Sequence
  Description of Artificial Sequence: Synthetic oligonucleotide
  Antisense strand to SEQ ID NO: 903178
uggacccaggauuucaacu

SEQ ID NO: 903180 - RNA, 19 nt, Artificial Sequence
  Description of Artificial Sequence: Synthetic oligonucleotide
  Sense strand starting at position 2452 of SEQ ID NO: 588987
guugaaauccuggguccac

SEQ ID NO: 903181 - RNA, 19 nt, Artificial Sequence
  Description of Artificial Sequence: Synthetic oligonucleotide
  Antisense strand to SEQ ID NO: 903180
guggacccaggauuucaac

SEQ ID NO: 903182 - RNA, 19 nt, Artificial Sequence
  Description of Artificial Sequence: Synthetic oligonucleotide
  Sense strand starting at position 2453 of SEQ ID NO: 588987
uugaaauccuggguccacu

SEQ ID NO: 903183 - RNA, 19 nt, Artificial Sequence
  Description of Artificial Sequence: Synthetic oligonucleotide
  Antisense strand to SEQ ID NO: 903182
aguggacccaggauuucaa

SEQ ID NO: 903184 - RNA, 19 nt, Artificial Sequence
  Description of Artificial Sequence: Synthetic oligonucleotide
  Sense strand starting at position 2492 of SEQ ID NO: 588987
gggacaaaguccuuaacuu

SEQ ID NO: 903185 - RNA, 19 nt, Artificial Sequence
  Description of Artificial Sequence: Synthetic oligonucleotide
  Antisense strand to SEQ ID NO: 903184
aaguuaaggacuuuguccc

SEQ ID NO: 903186 - RNA, 19 nt, Artificial Sequence
  Description of Artificial Sequence: Synthetic oligonucleotide
  Sense strand starting at position 2605 of SEQ ID NO: 588987
ugguguguaacccaaguga

SEQ ID NO: 903187 - RNA, 19 nt, Artificial Sequence
  Description of Artificial Sequence: Synthetic oligonucleotide
  Antisense strand to SEQ ID NO: 903186
ucacuuggguuacacacca

SEQ ID NO: 903188 - RNA, 19 nt, Artificial Sequence
  Description of Artificial Sequence: Synthetic oligonucleotide
  Sense strand starting at position 2609 of SEQ ID NO: 588987
guguaacccaagugaagua

SEQ ID NO: 903189 - RNA, 19 nt, Artificial Sequence
  Description of Artificial Sequence: Synthetic oligonucleotide
  Antisense strand to SEQ ID NO: 903188
uacuucacuuggguuacac

SEQ ID NO: 903190 - RNA, 19 nt, Artificial Sequence
  Description of Artificial Sequence: Synthetic oligonucleotide
  Sense strand starting at position 2622 of SEQ ID NO: 588987
gaaguacuugaaugacauu

SEQ ID NO: 903191 - RNA, 19 nt, Artificial Sequence
  Description of Artificial Sequence: Synthetic oligonucleotide
  Antisense strand to SEQ ID NO: 903190
aaugucauucaaguacuuc

SEQ ID NO: 903192 - RNA, 19 nt, Artificial Sequence
  Description of Artificial Sequence: Synthetic oligonucleotide
  Sense strand starting at position 2664 of SEQ ID NO: 588987
cuuccagcuccucagagaa

SEQ ID NO: 903193 - RNA, 19 nt, Artificial Sequence
  Description of Artificial Sequence: Synthetic oligonucleotide
  Antisense strand to SEQ ID NO: 903192
uucucugaggagcuggaag

SEQ ID NO: 903194 - RNA, 19 nt, Artificial Sequence
  Description of Artificial Sequence: Synthetic oligonucleotide
  Sense strand starting at position 2758 of SEQ ID NO: 588987
caggucaucuggccugaga

SEQ ID NO: 903195 - RNA, 19 nt, Artificial Sequence
  Description of Artificial Sequence: Synthetic oligonucleotide
  Antisense strand to SEQ ID NO: 903194
ucucaggccagaugaccug

SEQ ID NO: 903196 - RNA, 19 nt, Artificial Sequence
  Description of Artificial Sequence: Synthetic oligonucleotide
  Sense strand starting at position 2760 of SEQ ID NO: 588987
ggucaucuggccugagaua

SEQ ID NO: 903197 - RNA, 19 nt, Artificial Sequence
  Description of Artificial Sequence: Synthetic oligonucleotide
  Antisense strand to SEQ ID NO: 903196
uaucucaggccagaugacc

SEQ ID NO: 903198 - RNA, 19 nt, Artificial Sequence
  Description of Artificial Sequence: Synthetic oligonucleotide
  Sense strand starting at position 2761 of SEQ ID NO: 588987
gucaucuggccugagauac

SEQ ID NO: 903199 - RNA, 19 nt, Artificial Sequence
  Description of Artificial Sequence: Synthetic oligonucleotide
  Antisense strand to SEQ ID NO: 903198
guaucucaggccagaugac

SEQ ID NO: 903200 - RNA, 19 nt, Artificial Sequence
  Description of Artificial Sequence: Synthetic oligonucleotide
  Sense strand starting at position 2958 of SEQ ID NO: 588987
gcaagcuuuccugcagcca

SEQ ID NO: 903201 - RNA, 19 nt, Artificial Sequence
  Description of Artificial Sequence: Synthetic oligonucleotide
  Antisense strand to SEQ ID NO: 903200
uggcugcaggaaagcuugc

SEQ ID NO: 903202 - RNA, 19 nt, Artificial Sequence
  Description of Artificial Sequence: Synthetic oligonucleotide
  Sense strand starting at position 3090 of SEQ ID NO: 588987
ugcucauucccacggacau

SEQ ID NO: 903203 - RNA, 19 nt, Artificial Sequence
  Description of Artificial Sequence: Synthetic oligonucleotide
  Antisense strand to SEQ ID NO: 903202
auguccgugggaaugagca

SEQ ID NO: 903204 - RNA, 19 nt, Artificial Sequence
  Description of Artificial Sequence: Synthetic oligonucleotide
  Sense strand starting at position 3115 of SEQ ID NO: 588987
gugcgcaaccugcucuaau

SEQ ID NO: 903205 - RNA, 19 nt, Artificial Sequence
  Description of Artificial Sequence: Synthetic oligonucleotide
  Antisense strand to SEQ ID NO: 903204
auuagagcagguugcgcac

SEQ ID NO: 903206 - RNA, 19 nt, Artificial Sequence
  Description of Artificial Sequence: Synthetic oligonucleotide
  Sense strand starting at position 3449 of SEQ ID NO: 588987
cuuggaucuccagggaauc

SEQ ID NO: 903207 - RNA, 19 nt, Artificial Sequence
  Description of Artificial Sequence: Synthetic oligonucleotide
  Antisense strand to SEQ ID NO: 903206
gauucccuggagauccaag

SEQ ID NO: 903208 - RNA, 19 nt, Artificial Sequence
  Description of Artificial Sequence: Synthetic oligonucleotide
  Sense strand starting at position 3462 of SEQ ID NO: 588987
ggaaucaucucuccaagug

SEQ ID NO: 903209 - RNA, 19 nt, Artificial Sequence
  Description of Artificial Sequence: Synthetic oligonucleotide
  Antisense strand to SEQ ID NO: 903208
cacuuggagagaugauucc

SEQ ID NO: 903210 - RNA, 19 nt, Artificial Sequence
  Description of Artificial Sequence: Synthetic oligonucleotide
  Sense strand starting at position 39 of SEQ ID NO: 588988
cuggacuccacguaagagu

SEQ ID NO: 903211 - RNA, 19 nt, Artificial Sequence
  Description of Artificial Sequence: Synthetic oligonucleotide
  Antisense strand to SEQ ID NO: 903210
acucuuacguggaguccag

SEQ ID NO: 903212 - RNA, 19 nt, Artificial Sequence
  Description of Artificial Sequence: Synthetic oligonucleotide
  Sense strand starting at position 246 of SEQ ID NO: 588988
agcucaucugaguaauauu

SEQ ID NO: 903213 - RNA, 19 nt, Artificial Sequence
  Description of Artificial Sequence: Synthetic oligonucleotide
  Antisense strand to SEQ ID NO: 903212
aauauuacucagaugagcu

SEQ ID NO: 903214 - RNA, 19 nt, Artificial Sequence
  Description of Artificial Sequence: Synthetic oligonucleotide
  Sense strand starting at position 695 of SEQ ID NO: 588988
auagaagcuugauaacaac

SEQ ID NO: 903215 - RNA, 19 nt, Artificial Sequence
  Description of Artificial Sequence: Synthetic oligonucleotide
  Antisense strand to SEQ ID NO: 903214
guuguuaucaagcuucuau

SEQ ID NO: 903216 - RNA, 19 nt, Artificial Sequence
  Description of Artificial Sequence: Synthetic oligonucleotide
  Sense strand starting at position 774 of SEQ ID NO: 588988
ucuugaaccuuacaagugu

SEQ ID NO: 903217 - RNA, 19 nt, Artificial Sequence
  Description of Artificial Sequence: Synthetic oligonucleotide
  Antisense strand to SEQ ID NO: 903216
acacuuguaagguucaaga

SEQ ID NO: 903218 - RNA, 19 nt, Artificial Sequence
  Description of Artificial Sequence: Synthetic oligonucleotide
  Sense strand starting at position 789 of SEQ ID NO: 588988
guguccacccauuaauaca

SEQ ID NO: 903219 - RNA, 19 nt, Artificial Sequence
  Description of Artificial Sequence: Synthetic oligonucleotide
  Antisense strand to SEQ ID NO: 903218
uguauuaauggguggacac

SEQ ID NO: 903220 - RNA, 19 nt, Artificial Sequence
  Description of Artificial Sequence: Synthetic oligonucleotide
  Sense strand starting at position 855 of SEQ ID NO: 588988
ugaguuacagggcaguaau

SEQ ID NO: 903221 - RNA, 19 nt, Artificial Sequence
  Description of Artificial Sequence: Synthetic oligonucleotide
  Antisense strand to SEQ ID NO: 903220
auuacugcccuguaacuca

SEQ ID NO: 903222 - RNA, 19 nt, Artificial Sequence
  Description of Artificial Sequence: Synthetic oligonucleotide
  Sense strand starting at position 865 of SEQ ID NO: 588988
ggcaguaauuccgucccuu

SEQ ID NO: 903223 - RNA, 19 nt, Artificial Sequence
  Description of Artificial Sequence: Synthetic oligonucleotide
  Antisense strand to SEQ ID NO: 903222
aagggacggaauuacugcc

SEQ ID NO: 903224 - RNA, 19 nt, Artificial Sequence
  Description of Artificial Sequence: Synthetic oligonucleotide
  Sense strand starting at position 909 of SEQ ID NO: 588988
guccguucucaguccuagu

SEQ ID NO: 903225 - RNA, 19 nt, Artificial Sequence
  Description of Artificial Sequence: Synthetic oligonucleotide
  Antisense strand to SEQ ID NO: 903224
acuaggacugagaacggac

SEQ ID NO: 903226 - RNA, 19 nt, Artificial Sequence
  Description of Artificial Sequence: Synthetic oligonucleotide
  Sense strand starting at position 920 of SEQ ID NO: 588988
guccuaguuucccuugacu

SEQ ID NO: 903227 - RNA, 19 nt, Artificial Sequence
  Description of Artificial Sequence: Synthetic oligonucleotide
  Antisense strand to SEQ ID NO: 903226
agucaagggaaacuaggac

SEQ ID NO: 903228 - RNA, 19 nt, Artificial Sequence
  Description of Artificial Sequence: Synthetic oligonucleotide
  Sense strand starting at position 923 of SEQ ID NO: 588988
cuaguuucccuugacuuga

SEQ ID NO: 903229 - RNA, 19 nt, Artificial Sequence
  Description of Artificial Sequence: Synthetic oligonucleotide
  Antisense strand to SEQ ID NO: 903228
ucaagucaagggaaacuag

SEQ ID NO: 903230 - RNA, 19 nt, Artificial Sequence
  Description of Artificial Sequence: Synthetic oligonucleotide
  Sense strand starting at position 1212 of SEQ ID NO: 588988
gccagauucuugcagacau

SEQ ID NO: 903231 - RNA, 19 nt, Artificial Sequence
  Description of Artificial Sequence: Synthetic oligonucleotide
  Antisense strand to SEQ ID NO: 903230
augucugcaagaaucuggc

SEQ ID NO: 903232 - RNA, 19 nt, Artificial Sequence
  Description of Artificial Sequence: Synthetic oligonucleotide
  Sense strand starting at position 1785 of SEQ ID NO: 588988
cccagcggcucagagaaau

SEQ ID NO: 903233 - RNA, 19 nt, Artificial Sequence
  Description of Artificial Sequence: Synthetic oligonucleotide
  Antisense strand to SEQ ID NO: 903232
auuucucugagccgcuggg

SEQ ID NO: 903234 - RNA, 19 nt, Artificial Sequence
  Description of Artificial Sequence: Synthetic oligonucleotide
  Sense strand starting at position 1865 of SEQ ID NO: 588988
cggagucucccugagaggu

SEQ ID NO: 903235 - RNA, 19 nt, Artificial Sequence
  Description of Artificial Sequence: Synthetic oligonucleotide
  Antisense strand to SEQ ID NO: 903234
accucucagggagacuccg

SEQ ID NO: 903236 - RNA, 19 nt, Artificial Sequence
  Description of Artificial Sequence: Synthetic oligonucleotide
  Sense strand starting at position 2111 of SEQ ID NO: 588988
gagagccauuggccagaua

SEQ ID NO: 903237 - RNA, 19 nt, Artificial Sequence
  Description of Artificial Sequence: Synthetic oligonucleotide
  Antisense strand to SEQ ID NO: 903236
uaucuggccaauggcucuc

SEQ ID NO: 903238 - RNA, 19 nt, Artificial Sequence
  Description of Artificial Sequence: Synthetic oligonucleotide
  Sense strand starting at position 2204 of SEQ ID NO: 588988
cgauuggucggcgcugaga

SEQ ID NO: 903239 - RNA, 19 nt, Artificial Sequence
  Description of Artificial Sequence: Synthetic oligonucleotide
  Antisense strand to SEQ ID NO: 903238
ucucagcgccgaccaaucg

SEQ ID NO: 903240 - RNA, 19 nt, Artificial Sequence
  Description of Artificial Sequence: Synthetic oligonucleotide
  Sense strand starting at position 2558 of SEQ ID NO: 588988
cgccucaauuuggguaaca

SEQ ID NO: 903241 - RNA, 19 nt, Artificial Sequence
  Description of Artificial Sequence: Synthetic oligonucleotide
  Antisense strand to SEQ ID NO: 903240
uguuacccaaauugaggcg

SEQ ID NO: 903242 - RNA, 19 nt, Artificial Sequence
  Description of Artificial Sequence: Synthetic oligonucleotide
  Sense strand starting at position 2569 of SEQ ID NO: 588988
ggguaacauuuaugagaaa

SEQ ID NO: 903243 - RNA, 19 nt, Artificial Sequence
  Description of Artificial Sequence: Synthetic oligonucleotide
  Antisense strand to SEQ ID NO: 903242
uuucucauaaauguuaccc

SEQ ID NO: 903244 - RNA, 19 nt, Artificial Sequence
  Description of Artificial Sequence: Synthetic oligonucleotide
  Sense strand starting at position 2570 of SEQ ID NO: 588988
gguaacauuuaugagaaac

SEQ ID NO: 903245 - RNA, 19 nt, Artificial Sequence
  Description of Artificial Sequence: Synthetic oligonucleotide
  Antisense strand to SEQ ID NO: 903244
guuucucauaaauguuacc

SEQ ID NO: 903246 - RNA, 19 nt, Artificial Sequence
  Description of Artificial Sequence: Synthetic oligonucleotide
  Sense strand starting at position 2608 of SEQ ID NO: 588988
acacuuaaguaagguauua

SEQ ID NO: 903247 - RNA, 19 nt, Artificial Sequence
  Description of Artificial Sequence: Synthetic oligonucleotide
  Antisense strand to SEQ ID NO: 903246
uaauaccuuacuuaagugu

SEQ ID NO: 903248 - RNA, 19 nt, Artificial Sequence
  Description of Artificial Sequence: Synthetic oligonucleotide
  Sense strand starting at position 2652 of SEQ ID NO: 588988
gagguaaugcucugcaacc

SEQ ID NO: 903249 - RNA, 19 nt, Artificial Sequence
  Description of Artificial Sequence: Synthetic oligonucleotide
  Antisense strand to SEQ ID NO: 903248
gguugcagagcauuaccuc

SEQ ID NO: 903250 - RNA, 19 nt, Artificial Sequence
  Description of Artificial Sequence: Synthetic oligonucleotide
  Sense strand starting at position 3157 of SEQ ID NO: 588988
cauccagccuuuggugaaa

SEQ ID NO: 903251 - RNA, 19 nt, Artificial Sequence
  Description of Artificial Sequence: Synthetic oligonucleotide
  Antisense strand to SEQ ID NO: 903250
uuucaccaaaggcuggaug

SEQ ID NO: 903252 - RNA, 19 nt, Artificial Sequence
  Description of Artificial Sequence: Synthetic oligonucleotide
  Sense strand starting at position 3206 of SEQ ID NO: 588988
ggaaacguucacggaggua

SEQ ID NO: 903253 - RNA, 19 nt, Artificial Sequence
  Description of Artificial Sequence: Synthetic oligonucleotide
  Antisense strand to SEQ ID NO: 903252
uaccuccgugaacguuucc

SEQ ID NO: 903254 - RNA, 19 nt, Artificial Sequence
  Description of Artificial Sequence: Synthetic oligonucleotide
  Sense strand starting at position 3218 of SEQ ID NO: 588988
ggagguaagucuccuccaa

SEQ ID NO: 903255 - RNA, 19 nt, Artificial Sequence
  Description of Artificial Sequence: Synthetic oligonucleotide
  Antisense strand to SEQ ID NO: 903254
uuggaggagacuuaccucc

SEQ ID NO: 903256 - RNA, 19 nt, Artificial Sequence
  Description of Artificial Sequence: Synthetic oligonucleotide
  Sense strand starting at position 3222 of SEQ ID NO: 588988
guaagucuccuccaagcau

SEQ ID NO: 903257 - RNA, 19 nt, Artificial Sequence
  Description of Artificial Sequence: Synthetic oligonucleotide
  Antisense strand to SEQ ID NO: 903256
augcuuggaggagacuuac

SEQ ID NO: 903258 - RNA, 19 nt, Artificial Sequence
  Description of Artificial Sequence: Synthetic oligonucleotide
  Sense strand starting at position 3296 of SEQ ID NO: 588988
aggcuuugaaguugcauaa

SEQ ID NO: 903259 - RNA, 19 nt, Artificial Sequence
  Description of Artificial Sequence: Synthetic oligonucleotide
  Antisense strand to SEQ ID NO: 903258
uuaugcaacuucaaagccu

SEQ ID NO: 903260 - RNA, 19 nt, Artificial Sequence
  Description of Artificial Sequence: Synthetic oligonucleotide
  Sense strand starting at position 3356 of SEQ ID NO: 588988
ucauauauguuacuugguu

SEQ ID NO: 903261 - RNA, 19 nt, Artificial Sequence
  Description of Artificial Sequence: Synthetic oligonucleotide
  Antisense strand to SEQ ID NO: 903260
aaccaaguaacauauauga

SEQ ID NO: 903262 - RNA, 19 nt, Artificial Sequence
  Description of Artificial Sequence: Synthetic oligonucleotide
  Sense strand starting at position 3360 of SEQ ID NO: 588988
auauguuacuugguuugca

SEQ ID NO: 903263 - RNA, 19 nt, Artificial Sequence
  Description of Artificial Sequence: Synthetic oligonucleotide
  Antisense strand to SEQ ID NO: 903262
ugcaaaccaaguaacauau

SEQ ID NO: 903264 - RNA, 19 nt, Artificial Sequence
  Description of Artificial Sequence: Synthetic oligonucleotide
  Sense strand starting at position 3369 of SEQ ID NO: 588988
uugguuugcaguuggaauu

SEQ ID NO: 903265 - RNA, 19 nt, Artificial Sequence
  Description of Artificial Sequence: Synthetic oligonucleotide
  Antisense strand to SEQ ID NO: 903264
aauuccaacugcaaaccaa

SEQ ID NO: 903266 - RNA, 19 nt, Artificial Sequence
  Description of Artificial Sequence: Synthetic oligonucleotide
  Sense strand starting at position 3550 of SEQ ID NO: 588988
ggaacuaacugagcucuca

SEQ ID NO: 903267 - RNA, 19 nt, Artificial Sequence
  Description of Artificial Sequence: Synthetic oligonucleotide
  Antisense strand to SEQ ID NO: 903266
ugagagcucaguuaguucc

SEQ ID NO: 903268 - RNA, 19 nt, Artificial Sequence
  Description of Artificial Sequence: Synthetic oligonucleotide
  Sense strand starting at position 3559 of SEQ ID NO: 588988
ugagcucucaaacguaaga

SEQ ID NO: 903269 - RNA, 19 nt, Artificial Sequence
  Description of Artificial Sequence: Synthetic oligonucleotide
  Antisense strand to SEQ ID NO: 903268
ucuuacguuugagagcuca

SEQ ID NO: 903270 - RNA, 19 nt, Artificial Sequence
  Description of Artificial Sequence: Synthetic oligonucleotide
  Sense strand starting at position 3607 of SEQ ID NO: 588988
gcucaaagcuguccugagu

SEQ ID NO: 903271 - RNA, 19 nt, Artificial Sequence
  Description of Artificial Sequence: Synthetic oligonucleotide
  Antisense strand to SEQ ID NO: 903270
acucaggacagcuuugagc

SEQ ID NO: 903272 - RNA, 19 nt, Artificial Sequence
  Description of Artificial Sequence: Synthetic oligonucleotide
  Sense strand starting at position 3634 of SEQ ID NO: 588988
gccagcucgggaugagaaa

SEQ ID NO: 903273 - RNA, 19 nt, Artificial Sequence
  Description of Artificial Sequence: Synthetic oligonucleotide
  Antisense strand to SEQ ID NO: 903272
uuucucaucccgagcuggc

SEQ ID NO: 903274 - RNA, 19 nt, Artificial Sequence
  Description of Artificial Sequence: Synthetic oligonucleotide
  Sense strand starting at position 236 of SEQ ID NO: 588989
ccgacugcuuaugucauuu

SEQ ID NO: 903275 - RNA, 19 nt, Artificial Sequence
  Description of Artificial Sequence: Synthetic oligonucleotide
  Antisense strand to SEQ ID NO: 903274
aaaugacauaagcagucgg

SEQ ID NO: 903276 - RNA, 19 nt, Artificial Sequence
  Description of Artificial Sequence: Synthetic oligonucleotide
  Sense strand starting at position 327 of SEQ ID NO: 588989
gcuaaucagaguggauagu

SEQ ID NO: 903277 - RNA, 19 nt, Artificial Sequence
  Description of Artificial Sequence: Synthetic oligonucleotide
  Antisense strand to SEQ ID NO: 903276
acuauccacucugauuagc

SEQ ID NO: 903278 - RNA, 19 nt, Artificial Sequence
  Description of Artificial Sequence: Synthetic oligonucleotide
  Sense strand starting at position 385 of SEQ ID NO: 588989
aagcuuuaggcuuggauaa

SEQ ID NO: 903279 - RNA, 19 nt, Artificial Sequence
  Description of Artificial Sequence: Synthetic oligonucleotide
  Antisense strand to SEQ ID NO: 903278
uuauccaagccuaaagcuu

SEQ ID NO: 903280 - RNA, 19 nt, Artificial Sequence
  Description of Artificial Sequence: Synthetic oligonucleotide
  Sense strand starting at position 386 of SEQ ID NO: 588989
agcuuuaggcuuggauaaa

SEQ ID NO: 903281 - RNA, 19 nt, Artificial Sequence
  Description of Artificial Sequence: Synthetic oligonucleotide
  Antisense strand to SEQ ID NO: 903280
uuuauccaagccuaaagcu

SEQ ID NO: 903282 - RNA, 19 nt, Artificial Sequence
  Description of Artificial Sequence: Synthetic oligonucleotide
  Sense strand starting at position 396 of SEQ ID NO: 588989
uuggauaaacucuguacuu

SEQ ID NO: 903283 - RNA, 19 nt, Artificial Sequence
  Description of Artificial Sequence: Synthetic oligonucleotide
  Antisense strand to SEQ ID NO: 903282
aaguacagaguuuauccaa

SEQ ID NO: 903284 - RNA, 19 nt, Artificial Sequence
  Description of Artificial Sequence: Synthetic oligonucleotide
  Sense strand starting at position 397 of SEQ ID NO: 588989
uggauaaacucuguacuua

SEQ ID NO: 903285 - RNA, 19 nt, Artificial Sequence
  Description of Artificial Sequence: Synthetic oligonucleotide
  Antisense strand to SEQ ID NO: 903284
uaaguacagaguuuaucca

SEQ ID NO: 903286 - RNA, 19 nt, Artificial Sequence
  Description of Artificial Sequence: Synthetic oligonucleotide
  Sense strand starting at position 488 of SEQ ID NO: 588989
ugagacucuugagccagau

SEQ ID NO: 903287 - RNA, 19 nt, Artificial Sequence
  Description of Artificial Sequence: Synthetic oligonucleotide
  Antisense strand to SEQ ID NO: 903286
aucuggcucaagagucuca

SEQ ID NO: 903288 - RNA, 19 nt, Artificial Sequence
  Description of Artificial Sequence: Synthetic oligonucleotide
  Sense strand starting at position 492 of SEQ ID NO: 588989
acucuugagccagaucugu

SEQ ID NO: 903289 - RNA, 19 nt, Artificial Sequence
  Description of Artificial Sequence: Synthetic oligonucleotide
  Antisense strand to SEQ ID NO: 903288
acagaucuggcucaagagu

SEQ ID NO: 903290 - RNA, 19 nt, Artificial Sequence
  Description of Artificial Sequence: Synthetic oligonucleotide
  Sense strand starting at position 497 of SEQ ID NO: 588989
ugagccagaucuguggaaa

SEQ ID NO: 903291 - RNA, 19 nt, Artificial Sequence
  Description of Artificial Sequence: Synthetic oligonucleotide
  Antisense strand to SEQ ID NO: 903290
uuuccacagaucuggcuca

SEQ ID NO: 903292 - RNA, 19 nt, Artificial Sequence
  Description of Artificial Sequence: Synthetic oligonucleotide
  Sense strand starting at position 498 of SEQ ID NO: 588989
gagccagaucuguggaaag

SEQ ID NO: 903293 - RNA, 19 nt, Artificial Sequence
  Description of Artificial Sequence: Synthetic oligonucleotide
  Antisense strand to SEQ ID NO: 903292
cuuuccacagaucuggcuc

SEQ ID NO: 903294 - RNA, 19 nt, Artificial Sequence
  Description of Artificial Sequence: Synthetic oligonucleotide
  Sense strand starting at position 500 of SEQ ID NO: 588989
gccagaucuguggaaagca

SEQ ID NO: 903295 - RNA, 19 nt, Artificial Sequence
  Description of Artificial Sequence: Synthetic oligonucleotide
  Antisense strand to SEQ ID NO: 903294
ugcuuuccacagaucuggc

SEQ ID NO: 903296 - RNA, 19 nt, Artificial Sequence
  Description of Artificial Sequence: Synthetic oligonucleotide
  Sense strand starting at position 524 of SEQ ID NO: 588989
guuaauucugaauaacagu

SEQ ID NO: 903297 - RNA, 19 nt, Artificial Sequence
  Description of Artificial Sequence: Synthetic oligonucleotide
  Antisense strand to SEQ ID NO: 903296
acuguuauucagaauuaac

SEQ ID NO: 903298 - RNA, 19 nt, Artificial Sequence
  Description of Artificial Sequence: Synthetic oligonucleotide
  Sense strand starting at position 671 of SEQ ID NO: 588989
gaguuccaagguugucaca

SEQ ID NO: 903299 - RNA, 19 nt, Artificial Sequence
  Description of Artificial Sequence: Synthetic oligonucleotide
  Antisense strand to SEQ ID NO: 903298
ugugacaaccuuggaacuc

SEQ ID NO: 903300 - RNA, 19 nt, Artificial Sequence
  Description of Artificial Sequence: Synthetic oligonucleotide
  Sense strand starting at position 691 of SEQ ID NO: 588989
ugugguggucuggagucau

SEQ ID NO: 903301 - RNA, 19 nt, Artificial Sequence
  Description of Artificial Sequence: Synthetic oligonucleotide
  Antisense strand to SEQ ID NO: 903300
augacuccagaccaccaca

SEQ ID NO: 903302 - RNA, 19 nt, Artificial Sequence
  Description of Artificial Sequence: Synthetic oligonucleotide
  Sense strand starting at position 753 of SEQ ID NO: 588989
gaagacuucuuggagacaa

SEQ ID NO: 903303 - RNA, 19 nt, Artificial Sequence
  Description of Artificial Sequence: Synthetic oligonucleotide
  Antisense strand to SEQ ID NO: 903302
uugucuccaagaagucuuc

SEQ ID NO: 903304 - RNA, 19 nt, Artificial Sequence
  Description of Artificial Sequence: Synthetic oligonucleotide
  Sense strand starting at position 777 of SEQ ID NO: 588989
aggaucaacagcugucaga

SEQ ID NO: 903305 - RNA, 19 nt, Artificial Sequence
  Description of Artificial Sequence: Synthetic oligonucleotide
  Antisense strand to SEQ ID NO: 903304
ucugacagcuguugauccu

SEQ ID NO: 903306 - RNA, 19 nt, Artificial Sequence
  Description of Artificial Sequence: Synthetic oligonucleotide
  Sense strand starting at position 910 of SEQ ID NO: 588989
cacuguuaggauuaugcau

SEQ ID NO: 903307 - RNA, 19 nt, Artificial Sequence
  Description of Artificial Sequence: Synthetic oligonucleotide
  Antisense strand to SEQ ID NO: 903306
augcauaauccuaacagug

SEQ ID NO: 903308 - RNA, 19 nt, Artificial Sequence
  Description of Artificial Sequence: Synthetic oligonucleotide
  Sense strand starting at position 916 of SEQ ID NO: 588989
uaggauuaugcauggguaa

SEQ ID NO: 903309 - RNA, 19 nt, Artificial Sequence
  Description of Artificial Sequence: Synthetic oligonucleotide
  Antisense strand to SEQ ID NO: 903308
uuacccaugcauaauccua

SEQ ID NO: 903310 - RNA, 19 nt, Artificial Sequence
  Description of Artificial Sequence: Synthetic oligonucleotide
  Sense strand starting at position 917 of SEQ ID NO: 588989
aggauuaugcauggguaag

SEQ ID NO: 903311 - RNA, 19 nt, Artificial Sequence
  Description of Artificial Sequence: Synthetic oligonucleotide
  Antisense strand to SEQ ID NO: 903310
cuuacccaugcauaauccu

SEQ ID NO: 903312 - RNA, 19 nt, Artificial Sequence
  Description of Artificial Sequence: Synthetic oligonucleotide
  Sense strand starting at position 934 of SEQ ID NO: 588989
aggguuccacggugacaau

SEQ ID NO: 903313 - RNA, 19 nt, Artificial Sequence
  Description of Artificial Sequence: Synthetic oligonucleotide
  Antisense strand to SEQ ID NO: 903312
auugucaccguggaacccu

SEQ ID NO: 903314 - RNA, 19 nt, Artificial Sequence
  Description of Artificial Sequence: Synthetic oligonucleotide
  Sense strand starting at position 1066 of SEQ ID NO: 588989
ggcugcuaugagcaggaau

SEQ ID NO: 903315 - RNA, 19 nt, Artificial Sequence
  Description of Artificial Sequence: Synthetic oligonucleotide
  Antisense strand to SEQ ID NO: 903314
auuccugcucauagcagcc

SEQ ID NO: 903316 - RNA, 19 nt, Artificial Sequence
  Description of Artificial Sequence: Synthetic oligonucleotide
  Sense strand starting at position 1252 of SEQ ID NO: 588989
guuuauuaagagggagagu

SEQ ID NO: 903317 - RNA, 19 nt, Artificial Sequence
  Description of Artificial Sequence: Synthetic oligonucleotide
  Antisense strand to SEQ ID NO: 903316
acucucccucuuaauaaac

SEQ ID NO: 903318 - RNA, 19 nt, Artificial Sequence
  Description of Artificial Sequence: Synthetic oligonucleotide
  Sense strand starting at position 2286 of SEQ ID NO: 588989
gaguuuauuucggacugag

SEQ ID NO: 903319 - RNA, 19 nt, Artificial Sequence
  Description of Artificial Sequence: Synthetic oligonucleotide
  Antisense strand to SEQ ID NO: 903318
cucaguccgaaauaaacuc

SEQ ID NO: 903320 - RNA, 19 nt, Artificial Sequence
  Description of Artificial Sequence: Synthetic oligonucleotide
  Sense strand starting at position 2309 of SEQ ID NO: 588989
aggauugcaauucgggaau

SEQ ID NO: 903321 - RNA, 19 nt, Artificial Sequence
  Description of Artificial Sequence: Synthetic oligonucleotide
  Antisense strand to SEQ ID NO: 903320
auucccgaauugcaauccu

SEQ ID NO: 903322 - RNA, 19 nt, Artificial Sequence
  Description of Artificial Sequence: Synthetic oligonucleotide
  Sense strand starting at position 2315 of SEQ ID NO: 588989
gcaauucgggaauaaaugu

SEQ ID NO: 903323 - RNA, 19 nt, Artificial Sequence
  Description of Artificial Sequence: Synthetic oligonucleotide
  Antisense strand to SEQ ID NO: 903322
acauuuauucccgaauugc

SEQ ID NO: 903324 - RNA, 19 nt, Artificial Sequence
  Description of Artificial Sequence: Synthetic oligonucleotide
  Sense strand starting at position 2360 of SEQ ID NO: 588989
cggaguacucagggaggca

SEQ ID NO: 903325 - RNA, 19 nt, Artificial Sequence
  Description of Artificial Sequence: Synthetic oligonucleotide
  Antisense strand to SEQ ID NO: 903324
ugccucccugaguacuccg

SEQ ID NO: 903326 - RNA, 19 nt, Artificial Sequence
  Description of Artificial Sequence: Synthetic oligonucleotide
  Sense strand starting at position 2843 of SEQ ID NO: 588989
ggcagauguccucauauca

SEQ ID NO: 903327 - RNA, 19 nt, Artificial Sequence
  Description of Artificial Sequence: Synthetic oligonucleotide
  Antisense strand to SEQ ID NO: 903326
ugauaugaggacaucugcc

SEQ ID NO: 903328 - RNA, 19 nt, Artificial Sequence
  Description of Artificial Sequence: Synthetic oligonucleotide
  Sense strand starting at position 2899 of SEQ ID NO: 588989
ugcaguuugguggaaucuu

SEQ ID NO: 903329 - RNA, 19 nt, Artificial Sequence
  Description of Artificial Sequence: Synthetic oligonucleotide
  Antisense strand to SEQ ID NO: 903328
aagauuccaccaaacugca

SEQ ID NO: 903330 - RNA, 19 nt, Artificial Sequence
  Description of Artificial Sequence: Synthetic oligonucleotide
  Sense strand starting at position 2939 of SEQ ID NO: 588989
ccaggcaaaucguugauga

SEQ ID NO: 903331 - RNA, 19 nt, Artificial Sequence
  Description of Artificial Sequence: Synthetic oligonucleotide
  Antisense strand to SEQ ID NO: 903330
ucaucaacgauuugccugg

SEQ ID NO: 903332 - RNA, 19 nt, Artificial Sequence
  Description of Artificial Sequence: Synthetic oligonucleotide
  Sense strand starting at position 2940 of SEQ ID NO: 588989
caggcaaaucguugaugag

SEQ ID NO: 903333 - RNA, 19 nt, Artificial Sequence
  Description of Artificial Sequence: Synthetic oligonucleotide
  Antisense strand to SEQ ID NO: 903332
cucaucaacgauuugccug

SEQ ID NO: 903334 - RNA, 19 nt, Artificial Sequence
  Description of Artificial Sequence: Synthetic oligonucleotide
  Sense strand starting at position 3093 of SEQ ID NO: 588989
ccaccucaucucuggagua

SEQ ID NO: 903335 - RNA, 19 nt, Artificial Sequence
  Description of Artificial Sequence: Synthetic oligonucleotide
  Antisense strand to SEQ ID NO: 903334
uacuccagagaugaggugg

SEQ ID NO: 903336 - RNA, 19 nt, Artificial Sequence
  Description of Artificial Sequence: Synthetic oligonucleotide
  Sense strand starting at position 3262 of SEQ ID NO: 588989
uucuuaagauccuuggucu

SEQ ID NO: 903337 - RNA, 19 nt, Artificial Sequence
  Description of Artificial Sequence: Synthetic oligonucleotide
  Antisense strand to SEQ ID NO: 903336
agaccaaggaucuuaagaa

SEQ ID NO: 903338 - RNA, 19 nt, Artificial Sequence
  Description of Artificial Sequence: Synthetic oligonucleotide
  Sense strand starting at position 3397 of SEQ ID NO: 588989
gcagguuucuaccuuacua

SEQ ID NO: 903339 - RNA, 19 nt, Artificial Sequence
  Description of Artificial Sequence: Synthetic oligonucleotide
  Antisense strand to SEQ ID NO: 903338
uaguaagguagaaaccugc

SEQ ID NO: 903340 - RNA, 19 nt, Artificial Sequence
  Description of Artificial Sequence: Synthetic oligonucleotide
  Sense strand starting at position 3555 of SEQ ID NO: 588989
ggugucugacuccaagagu

SEQ ID NO: 903341 - RNA, 19 nt, Artificial Sequence
  Description of Artificial Sequence: Synthetic oligonucleotide
  Antisense strand to SEQ ID NO: 903340
acucuuggagucagacacc

SEQ ID NO: 903342 - RNA, 19 nt, Artificial Sequence
  Description of Artificial Sequence: Synthetic oligonucleotide
  Sense strand starting at position 3572 of SEQ ID NO: 588989
guagauaguuaauugguau

SEQ ID NO: 903343 - RNA, 19 nt, Artificial Sequence
  Description of Artificial Sequence: Synthetic oligonucleotide
  Antisense strand to SEQ ID NO: 903342
auaccaauuaacuaucuac

SEQ ID NO: 903344 - RNA, 19 nt, Artificial Sequence
  Description of Artificial Sequence: Synthetic oligonucleotide
  Sense strand starting at position 3610 of SEQ ID NO: 588989
aaggaaagcuccuuguagu

SEQ ID NO: 903345 - RNA, 19 nt, Artificial Sequence
  Description of Artificial Sequence: Synthetic oligonucleotide
  Antisense strand to SEQ ID NO: 903344
acuacaaggagcuuuccuu

SEQ ID NO: 903346 - RNA, 19 nt, Artificial Sequence
  Description of Artificial Sequence: Synthetic oligonucleotide
  Sense strand starting at position 3611 of SEQ ID NO: 588989
aggaaagcuccuuguagua

SEQ ID NO: 903347 - RNA, 19 nt, Artificial Sequence
  Description of Artificial Sequence: Synthetic oligonucleotide
  Antisense strand to SEQ ID NO: 903346
uacuacaaggagcuuuccu

SEQ ID NO: 903348 - RNA, 19 nt, Artificial Sequence
  Description of Artificial Sequence: Synthetic oligonucleotide
  Sense strand starting at position 3633 of SEQ ID NO: 588989
uggccagauguuuauuauu

SEQ ID NO: 903349 - RNA, 19 nt, Artificial Sequence
  Description of Artificial Sequence: Synthetic oligonucleotide
  Antisense strand to SEQ ID NO: 903348
aauaauaaacaucuggcca

SEQ ID NO: 903350 - RNA, 19 nt, Artificial Sequence
  Description of Artificial Sequence: Synthetic oligonucleotide
  Sense strand starting at position 3801 of SEQ ID NO: 588989
agauuugauuucugacuuc

SEQ ID NO: 903351 - RNA, 19 nt, Artificial Sequence
  Description of Artificial Sequence: Synthetic oligonucleotide
  Antisense strand to SEQ ID NO: 903350
gaagucagaaaucaaaucu

SEQ ID NO: 903352 - RNA, 19 nt, Artificial Sequence
  Description of Artificial Sequence: Synthetic oligonucleotide
  Sense strand starting at position 3930 of SEQ ID NO: 588989
gaaaguuccugagucaaca

SEQ ID NO: 903353 - RNA, 19 nt, Artificial Sequence
  Description of Artificial Sequence: Synthetic oligonucleotide
  Antisense strand to SEQ ID NO: 903352
uguugacucaggaacuuuc

SEQ ID NO: 903354 - RNA, 19 nt, Artificial Sequence
  Description of Artificial Sequence: Synthetic oligonucleotide
  Sense strand starting at position 131 of SEQ ID NO: 588990
gucagagugccucaacuuu

SEQ ID NO: 903355 - RNA, 19 nt, Artificial Sequence
  Description of Artificial Sequence: Synthetic oligonucleotide
  Antisense strand to SEQ ID NO: 903354
aaaguugaggcacucugac

SEQ ID NO: 903356 - RNA, 19 nt, Artificial Sequence
  Description of Artificial Sequence: Synthetic oligonucleotide
  Sense strand starting at position 169 of SEQ ID NO: 588990
gcaggauaauuccuuacug

SEQ ID NO: 903357 - RNA, 19 nt, Artificial Sequence
  Description of Artificial Sequence: Synthetic oligonucleotide
  Antisense strand to SEQ ID NO: 903356
caguaaggaauuauccugc

SEQ ID NO: 903358 - RNA, 19 nt, Artificial Sequence
  Description of Artificial Sequence: Synthetic oligonucleotide
  Sense strand starting at position 318 of SEQ ID NO: 588990
ugccuaaugucuccuagga

SEQ ID NO: 903359 - RNA, 19 nt, Artificial Sequence
  Description of Artificial Sequence: Synthetic oligonucleotide
  Antisense strand to SEQ ID NO: 903358
uccuaggagacauuaggca

SEQ ID NO: 903360 - RNA, 19 nt, Artificial Sequence
  Description of Artificial Sequence: Synthetic oligonucleotide
  Sense strand starting at position 322 of SEQ ID NO: 588990
uaaugucuccuaggagaca

SEQ ID NO: 903361 - RNA, 19 nt, Artificial Sequence
  Description of Artificial Sequence: Synthetic oligonucleotide
  Antisense strand to SEQ ID NO: 903360
ugucuccuaggagacauua

SEQ ID NO: 903362 - RNA, 19 nt, Artificial Sequence
  Description of Artificial Sequence: Synthetic oligonucleotide
  Sense strand starting at position 341 of SEQ ID NO: 588990
aagccagacuugguuaaga

SEQ ID NO: 903363 - RNA, 19 nt, Artificial Sequence
  Description of Artificial Sequence: Synthetic oligonucleotide
  Antisense strand to SEQ ID NO: 903362
ucuuaaccaagucuggcuu

SEQ ID NO: 903364 - RNA, 19 nt, Artificial Sequence
  Description of Artificial Sequence: Synthetic oligonucleotide
  Sense strand starting at position 343 of SEQ ID NO: 588990
gccagacuugguuaagaac

SEQ ID NO: 903365 - RNA, 19 nt, Artificial Sequence
  Description of Artificial Sequence: Synthetic oligonucleotide
  Antisense strand to SEQ ID NO: 903364
guucuuaaccaagucuggc

SEQ ID NO: 903366 - RNA, 19 nt, Artificial Sequence
  Description of Artificial Sequence: Synthetic oligonucleotide
  Sense strand starting at position 600 of SEQ ID NO: 588990
ggcagaugaccuugaauag

SEQ ID NO: 903367 - RNA, 19 nt, Artificial Sequence
  Description of Artificial Sequence: Synthetic oligonucleotide
  Antisense strand to SEQ ID NO: 903366
cuauucaaggucaucugcc

SEQ ID NO: 903368 - RNA, 19 nt, Artificial Sequence
  Description of Artificial Sequence: Synthetic oligonucleotide
  Sense strand starting at position 601 of SEQ ID NO: 588990
gcagaugaccuugaauagu

SEQ ID NO: 903369 - RNA, 19 nt, Artificial Sequence
  Description of Artificial Sequence: Synthetic oligonucleotide
  Antisense strand to SEQ ID NO: 903368
acuauucaaggucaucugc

SEQ ID NO: 903370 - RNA, 19 nt, Artificial Sequence
  Description of Artificial Sequence: Synthetic oligonucleotide
  Sense strand starting at position 669 of SEQ ID NO: 588990
gguggucagaauggaguua

SEQ ID NO: 903371 - RNA, 19 nt, Artificial Sequence
  Description of Artificial Sequence: Synthetic oligonucleotide
  Antisense strand to SEQ ID NO: 903370
uaacuccauucugaccacc

SEQ ID NO: 903372 - RNA, 19 nt, Artificial Sequence
  Description of Artificial Sequence: Synthetic oligonucleotide
  Sense strand starting at position 712 of SEQ ID NO: 588990
gauaacggaucuuuguuua

SEQ ID NO: 903373 - RNA, 19 nt, Artificial Sequence
  Description of Artificial Sequence: Synthetic oligonucleotide
  Antisense strand to SEQ ID NO: 903372
uaaacaaagauccguuauc

SEQ ID NO: 903374 - RNA, 19 nt, Artificial Sequence
  Description of Artificial Sequence: Synthetic oligonucleotide
  Sense strand starting at position 715 of SEQ ID NO: 588990
aacggaucuuuguuuaaua

SEQ ID NO: 903375 - RNA, 19 nt, Artificial Sequence
  Description of Artificial Sequence: Synthetic oligonucleotide
  Antisense strand to SEQ ID NO: 903374
uauuaaacaaagauccguu

SEQ ID NO: 903376 - RNA, 19 nt, Artificial Sequence
  Description of Artificial Sequence: Synthetic oligonucleotide
  Sense strand starting at position 716 of SEQ ID NO: 588990
acggaucuuuguuuaauaa

SEQ ID NO: 903377 - RNA, 19 nt, Artificial Sequence
  Description of Artificial Sequence: Synthetic oligonucleotide
  Antisense strand to SEQ ID NO: 903376
uuauuaaacaaagauccgu

SEQ ID NO: 903378 - RNA, 19 nt, Artificial Sequence
  Description of Artificial Sequence: Synthetic oligonucleotide
  Sense strand starting at position 717 of SEQ ID NO: 588990
cggaucuuuguuuaauaaa

SEQ ID NO: 903379 - RNA, 19 nt, Artificial Sequence
  Description of Artificial Sequence: Synthetic oligonucleotide
  Antisense strand to SEQ ID NO: 903378
uuuauuaaacaaagauccg

SEQ ID NO: 903380 - RNA, 19 nt, Artificial Sequence
  Description of Artificial Sequence: Synthetic oligonucleotide
  Sense strand starting at position 952 of SEQ ID NO: 588990
ccacaaaucuacucagggu

SEQ ID NO: 903381 - RNA, 19 nt, Artificial Sequence
  Description of Artificial Sequence: Synthetic oligonucleotide
  Antisense strand to SEQ ID NO: 903380
acccugaguagauuugugg

SEQ ID NO: 903382 - RNA, 19 nt, Artificial Sequence
  Description of Artificial Sequence: Synthetic oligonucleotide
  Sense strand starting at position 961 of SEQ ID NO: 588990
uacucaggguccuuugauu

SEQ ID NO: 903383 - RNA, 19 nt, Artificial Sequence
  Description of Artificial Sequence: Synthetic oligonucleotide
  Antisense strand to SEQ ID NO: 903382
aaucaaaggacccugagua

SEQ ID NO: 903384 - RNA, 19 nt, Artificial Sequence
  Description of Artificial Sequence: Synthetic oligonucleotide
  Sense strand starting at position 1123 of SEQ ID NO: 588990
ucggacucagaucguuuaa

SEQ ID NO: 903385 - RNA, 19 nt, Artificial Sequence
  Description of Artificial Sequence: Synthetic oligonucleotide
  Antisense strand to SEQ ID NO: 903384
uuaaacgaucugaguccga

SEQ ID NO: 903386 - RNA, 19 nt, Artificial Sequence
  Description of Artificial Sequence: Synthetic oligonucleotide
  Sense strand starting at position 1125 of SEQ ID NO: 588990
ggacucagaucguuuaauc

SEQ ID NO: 903387 - RNA, 19 nt, Artificial Sequence
  Description of Artificial Sequence: Synthetic oligonucleotide
  Antisense strand to SEQ ID NO: 903386
gauuaaacgaucugagucc

SEQ ID NO: 903388 - RNA, 19 nt, Artificial Sequence
  Description of Artificial Sequence: Synthetic oligonucleotide
  Sense strand starting at position 2313 of SEQ ID NO: 588990
caggguaguccucagcaaa

SEQ ID NO: 903389 - RNA, 19 nt, Artificial Sequence
  Description of Artificial Sequence: Synthetic oligonucleotide
  Antisense strand to SEQ ID NO: 903388
uuugcugaggacuacccug

SEQ ID NO: 903390 - RNA, 19 nt, Artificial Sequence
  Description of Artificial Sequence: Synthetic oligonucleotide
  Sense strand starting at position 2438 of SEQ ID NO: 588990
agugcuuuggccucauguu

SEQ ID NO: 903391 - RNA, 19 nt, Artificial Sequence
  Description of Artificial Sequence: Synthetic oligonucleotide
  Antisense strand to SEQ ID NO: 903390
aacaugaggccaaagcacu

SEQ ID NO: 903392 - RNA, 19 nt, Artificial Sequence
  Description of Artificial Sequence: Synthetic oligonucleotide
  Sense strand starting at position 2483 of SEQ ID NO: 588990
gagacaaguuuauccauga

SEQ ID NO: 903393 - RNA, 19 nt, Artificial Sequence
  Description of Artificial Sequence: Synthetic oligonucleotide
  Antisense strand to SEQ ID NO: 903392
ucauggauaaacuugucuc

SEQ ID NO: 903394 - RNA, 19 nt, Artificial Sequence
  Description of Artificial Sequence: Synthetic oligonucleotide
  Sense strand starting at position 2499 of SEQ ID NO: 588990
ugaacacauugcucuguaa

SEQ ID NO: 903395 - RNA, 19 nt, Artificial Sequence
  Description of Artificial Sequence: Synthetic oligonucleotide
  Antisense strand to SEQ ID NO: 903394
uuacagagcaauguguuca

SEQ ID NO: 903396 - RNA, 19 nt, Artificial Sequence
  Description of Artificial Sequence: Synthetic oligonucleotide
  Sense strand starting at position 2502 of SEQ ID NO: 588990
acacauugcucuguaaagg

SEQ ID NO: 903397 - RNA, 19 nt, Artificial Sequence
  Description of Artificial Sequence: Synthetic oligonucleotide
  Antisense strand to SEQ ID NO: 903396
ccuuuacagagcaaugugu

SEQ ID NO: 903398 - RNA, 19 nt, Artificial Sequence
  Description of Artificial Sequence: Synthetic oligonucleotide
  Sense strand starting at position 2503 of SEQ ID NO: 588990
cacauugcucuguaaagga

SEQ ID NO: 903399 - RNA, 19 nt, Artificial Sequence
  Description of Artificial Sequence: Synthetic oligonucleotide
  Antisense strand to SEQ ID NO: 903398
uccuuuacagagcaaugug

SEQ ID NO: 903400 - RNA, 19 nt, Artificial Sequence
  Description of Artificial Sequence: Synthetic oligonucleotide
  Sense strand starting at position 2655 of SEQ ID NO: 588990
ggaaucuuaccagguggga

SEQ ID NO: 903401 - RNA, 19 nt, Artificial Sequence
  Description of Artificial Sequence: Synthetic oligonucleotide
  Antisense strand to SEQ ID NO: 903400
ucccaccugguaagauucc

SEQ ID NO: 903402 - RNA, 19 nt, Artificial Sequence
  Description of Artificial Sequence: Synthetic oligonucleotide
  Sense strand starting at position 2674 of SEQ ID NO: 588990
ggugaucuggccugagauu

SEQ ID NO: 903403 - RNA, 19 nt, Artificial Sequence
  Description of Artificial Sequence: Synthetic oligonucleotide
  Antisense strand to SEQ ID NO: 903402
aaucucaggccagaucacc

SEQ ID NO: 903404 - RNA, 19 nt, Artificial Sequence
  Description of Artificial Sequence: Synthetic oligonucleotide
  Sense strand starting at position 2723 of SEQ ID NO: 588990
aaggacgaggucugauaca

SEQ ID NO: 903405 - RNA, 19 nt, Artificial Sequence
  Description of Artificial Sequence: Synthetic oligonucleotide
  Antisense strand to SEQ ID NO: 903404
uguaucagaccucguccuu

SEQ ID NO: 903406 - RNA, 19 nt, Artificial Sequence
  Description of Artificial Sequence: Synthetic oligonucleotide
  Sense strand starting at position 2830 of SEQ ID NO: 588990
cacaaaggaguuugaagua

SEQ ID NO: 903407 - RNA, 19 nt, Artificial Sequence
  Description of Artificial Sequence: Synthetic oligonucleotide
  Antisense strand to SEQ ID NO: 903406
uacuucaaacuccuuugug

SEQ ID NO: 903408 - RNA, 19 nt, Artificial Sequence
  Description of Artificial Sequence: Synthetic oligonucleotide
  Sense strand starting at position 2853 of SEQ ID NO: 588990
ggacuuggauuugaaauuc

SEQ ID NO: 903409 - RNA, 19 nt, Artificial Sequence
  Description of Artificial Sequence: Synthetic oligonucleotide
  Antisense strand to SEQ ID NO: 903408
gaauuucaaauccaagucc

SEQ ID NO: 903410 - RNA, 19 nt, Artificial Sequence
  Description of Artificial Sequence: Synthetic oligonucleotide
  Sense strand starting at position 2969 of SEQ ID NO: 588990
aggugcauagcucacuaaa

SEQ ID NO: 903411 - RNA, 19 nt, Artificial Sequence
  Description of Artificial Sequence: Synthetic oligonucleotide
  Antisense strand to SEQ ID NO: 903410
uuuagugagcuaugcaccu

SEQ ID NO: 903412 - RNA, 19 nt, Artificial Sequence
  Description of Artificial Sequence: Synthetic oligonucleotide
  Sense strand starting at position 3014 of SEQ ID NO: 588990
gcagcugaugguuaaccua

SEQ ID NO: 903413 - RNA, 19 nt, Artificial Sequence
  Description of Artificial Sequence: Synthetic oligonucleotide
  Antisense strand to SEQ ID NO: 903412
uagguuaaccaucagcugc

SEQ ID NO: 903414 - RNA, 19 nt, Artificial Sequence
  Description of Artificial Sequence: Synthetic oligonucleotide
  Sense strand starting at position 3032 of SEQ ID NO: 588990
acaccuguuguguaaccua

SEQ ID NO: 903415 - RNA, 19 nt, Artificial Sequence
  Description of Artificial Sequence: Synthetic oligonucleotide
  Antisense strand to SEQ ID NO: 903414
uagguuacacaacaggugu

SEQ ID NO: 903416 - RNA, 19 nt, Artificial Sequence
  Description of Artificial Sequence: Synthetic oligonucleotide
  Sense strand starting at position 3171 of SEQ ID NO: 588990
ugaaguuugccaugaagau

SEQ ID NO: 903417 - RNA, 19 nt, Artificial Sequence
  Description of Artificial Sequence: Synthetic oligonucleotide
  Antisense strand to SEQ ID NO: 903416
aucuucauggcaaacuuca

SEQ ID NO: 903418 - RNA, 19 nt, Artificial Sequence
  Description of Artificial Sequence: Synthetic oligonucleotide
  Sense strand starting at position 3366 of SEQ ID NO: 588990
guauaaauuuaggacuguu

SEQ ID NO: 903419 - RNA, 19 nt, Artificial Sequence
  Description of Artificial Sequence: Synthetic oligonucleotide
  Antisense strand to SEQ ID NO: 903418
aacaguccuaaauuuauac

SEQ ID NO: 903420 - RNA, 19 nt, Artificial Sequence
  Description of Artificial Sequence: Synthetic oligonucleotide
  Sense strand starting at position 3452 of SEQ ID NO: 588990
ccuaauuacagaggagugu

SEQ ID NO: 903421 - RNA, 19 nt, Artificial Sequence
  Description of Artificial Sequence: Synthetic oligonucleotide
  Antisense strand to SEQ ID NO: 903420
acacuccucuguaauuagg

SEQ ID NO: 903422 - RNA, 19 nt, Artificial Sequence
  Description of Artificial Sequence: Synthetic oligonucleotide
  Sense strand starting at position 3456 of SEQ ID NO: 588990
auuacagaggaguguuaaa

SEQ ID NO: 903423 - RNA, 19 nt, Artificial Sequence
  Description of Artificial Sequence: Synthetic oligonucleotide
  Antisense strand to SEQ ID NO: 903422
uuuaacacuccucuguaau

SEQ ID NO: 903424 - RNA, 19 nt, Artificial Sequence
  Description of Artificial Sequence: Synthetic oligonucleotide
  Sense strand starting at position 3552 of SEQ ID NO: 588990
guuugacucuucuuuaaug

SEQ ID NO: 903425 - RNA, 19 nt, Artificial Sequence
  Description of Artificial Sequence: Synthetic oligonucleotide
  Antisense strand to SEQ ID NO: 903424
cauuaaagaagagucaaac

SEQ ID NO: 903426 - RNA, 19 nt, Artificial Sequence
  Description of Artificial Sequence: Synthetic oligonucleotide
  Sense strand starting at position 3623 of SEQ ID NO: 588990
auaagcauucuaggaaaug

SEQ ID NO: 903427 - RNA, 19 nt, Artificial Sequence
  Description of Artificial Sequence: Synthetic oligonucleotide
  Antisense strand to SEQ ID NO: 903426
cauuuccuagaaugcuuau

SEQ ID NO: 903428 - RNA, 19 nt, Artificial Sequence
  Description of Artificial Sequence: Synthetic oligonucleotide
  Sense strand starting at position 3664 of SEQ ID NO: 588990
uugacauauccuggcacaa

SEQ ID NO: 903429 - RNA, 19 nt, Artificial Sequence
  Description of Artificial Sequence: Synthetic oligonucleotide
  Antisense strand to SEQ ID NO: 903428
uugugccaggauaugucaa

SEQ ID NO: 903430 - RNA, 19 nt, Artificial Sequence
  Description of Artificial Sequence: Synthetic oligonucleotide
  Sense strand starting at position 3726 of SEQ ID NO: 588990
uguggagugcuuuaaacac

SEQ ID NO: 903431 - RNA, 19 nt, Artificial Sequence
  Description of Artificial Sequence: Synthetic oligonucleotide
  Antisense strand to SEQ ID NO: 903430
guguuuaaagcacuccaca

SEQ ID NO: 903432 - RNA, 19 nt, Artificial Sequence
  Description of Artificial Sequence: Synthetic oligonucleotide
  Sense strand starting at position 3939 of SEQ ID NO: 588990
agucaucucccugagcauu

SEQ ID NO: 903433 - RNA, 19 nt, Artificial Sequence
  Description of Artificial Sequence: Synthetic oligonucleotide
  Antisense strand to SEQ ID NO: 903432
aaugcucagggagaugacu

SEQ ID NO: 903434 - RNA, 19 nt, Artificial Sequence
  Description of Artificial Sequence: Synthetic oligonucleotide
  Sense strand starting at position 55 of SEQ ID NO: 588991
ucucuacagucccugagaa

SEQ ID NO: 903435 - RNA, 19 nt, Artificial Sequence
  Description of Artificial Sequence: Synthetic oligonucleotide
  Antisense strand to SEQ ID NO: 903434
uucucagggacuguagaga

SEQ ID NO: 903436 - RNA, 19 nt, Artificial Sequence
  Description of Artificial Sequence: Synthetic oligonucleotide
  Sense strand starting at position 56 of SEQ ID NO: 588991
cucuacagucccugagaau

SEQ ID NO: 903437 - RNA, 19 nt, Artificial Sequence
  Description of Artificial Sequence: Synthetic oligonucleotide
  Antisense strand to SEQ ID NO: 903436
auucucagggacuguagag

SEQ ID NO: 903438 - RNA, 19 nt, Artificial Sequence
  Description of Artificial Sequence: Synthetic oligonucleotide
  Sense strand starting at position 65 of SEQ ID NO: 588991
cccugagaauguuucuuaa

SEQ ID NO: 903439 - RNA, 19 nt, Artificial Sequence
  Description of Artificial Sequence: Synthetic oligonucleotide
  Antisense strand to SEQ ID NO: 903438
uuaagaaacauucucaggg

SEQ ID NO: 903440 - RNA, 19 nt, Artificial Sequence
  Description of Artificial Sequence: Synthetic oligonucleotide
  Sense strand starting at position 67 of SEQ ID NO: 588991
cugagaauguuucuuaaac

SEQ ID NO: 903441 - RNA, 19 nt, Artificial Sequence
  Description of Artificial Sequence: Synthetic oligonucleotide
  Antisense strand to SEQ ID NO: 903440
guuuaagaaacauucucag

SEQ ID NO: 903442 - RNA, 19 nt, Artificial Sequence
  Description of Artificial Sequence: Synthetic oligonucleotide
  Sense strand starting at position 68 of SEQ ID NO: 588991
ugagaauguuucuuaaacc

SEQ ID NO: 903443 - RNA, 19 nt, Artificial Sequence
  Description of Artificial Sequence: Synthetic oligonucleotide
  Antisense strand to SEQ ID NO: 903442
gguuuaagaaacauucuca

SEQ ID NO: 903444 - RNA, 19 nt, Artificial Sequence
  Description of Artificial Sequence: Synthetic oligonucleotide
  Sense strand starting at position 85 of SEQ ID NO: 588991
ccaggaauuugggaugcaa

SEQ ID NO: 903445 - RNA, 19 nt, Artificial Sequence
  Description of Artificial Sequence: Synthetic oligonucleotide
  Antisense strand to SEQ ID NO: 903444
uugcaucccaaauuccugg

SEQ ID NO: 903446 - RNA, 19 nt, Artificial Sequence
  Description of Artificial Sequence: Synthetic oligonucleotide
  Sense strand starting at position 142 of SEQ ID NO: 588991
ucagaagaguaauagaaca

SEQ ID NO: 903447 - RNA, 19 nt, Artificial Sequence
  Description of Artificial Sequence: Synthetic oligonucleotide
  Antisense strand to SEQ ID NO: 903446
uguucuauuacucuucuga

SEQ ID NO: 903448 - RNA, 19 nt, Artificial Sequence
  Description of Artificial Sequence: Synthetic oligonucleotide
  Sense strand starting at position 265 of SEQ ID NO: 588991
gugauugccaccuagggau

SEQ ID NO: 903449 - RNA, 19 nt, Artificial Sequence
  Description of Artificial Sequence: Synthetic oligonucleotide
  Antisense strand to SEQ ID NO: 903448
aucccuagguggcaaucac

SEQ ID NO: 903450 - RNA, 19 nt, Artificial Sequence
  Description of Artificial Sequence: Synthetic oligonucleotide
  Sense strand starting at position 330 of SEQ ID NO: 588991
gcucaaucugugugggaca

SEQ ID NO: 903451 - RNA, 19 nt, Artificial Sequence
  Description of Artificial Sequence: Synthetic oligonucleotide
  Antisense strand to SEQ ID NO: 903450
ugucccacacagauugagc

SEQ ID NO: 903452 - RNA, 19 nt, Artificial Sequence
  Description of Artificial Sequence: Synthetic oligonucleotide
  Sense strand starting at position 332 of SEQ ID NO: 588991
ucaaucugugugggacauu

SEQ ID NO: 903453 - RNA, 19 nt, Artificial Sequence
  Description of Artificial Sequence: Synthetic oligonucleotide
  Antisense strand to SEQ ID NO: 903452
aaugucccacacagauuga

SEQ ID NO: 903454 - RNA, 19 nt, Artificial Sequence
  Description of Artificial Sequence: Synthetic oligonucleotide
  Sense strand starting at position 344 of SEQ ID NO: 588991
ggacauuaucuaugcccaa

SEQ ID NO: 903455 - RNA, 19 nt, Artificial Sequence
  Description of Artificial Sequence: Synthetic oligonucleotide
  Antisense strand to SEQ ID NO: 903454
uugggcauagauaaugucc

SEQ ID NO: 903456 - RNA, 19 nt, Artificial Sequence
  Description of Artificial Sequence: Synthetic oligonucleotide
  Sense strand starting at position 406 of SEQ ID NO: 588991
uuuguaaaugugcaguuaa

SEQ ID NO: 903457 - RNA, 19 nt, Artificial Sequence
  Description of Artificial Sequence: Synthetic oligonucleotide
  Antisense strand to SEQ ID NO: 903456
uuaacugcacauuuacaaa

SEQ ID NO: 903458 - RNA, 19 nt, Artificial Sequence
  Description of Artificial Sequence: Synthetic oligonucleotide
  Sense strand starting at position 484 of SEQ ID NO: 588991
uuguuugucuuccuaaagu

SEQ ID NO: 903459 - RNA, 19 nt, Artificial Sequence
  Description of Artificial Sequence: Synthetic oligonucleotide
  Antisense strand to SEQ ID NO: 903458
acuuuaggaagacaaacaa

SEQ ID NO: 903460 - RNA, 19 nt, Artificial Sequence
  Description of Artificial Sequence: Synthetic oligonucleotide
  Sense strand starting at position 856 of SEQ ID NO: 588991
gcaccuuuguauuuccuau

SEQ ID NO: 903461 - RNA, 19 nt, Artificial Sequence
  Description of Artificial Sequence: Synthetic oligonucleotide
  Antisense strand to SEQ ID NO: 903460
auaggaaauacaaaggugc

SEQ ID NO: 903462 - RNA, 19 nt, Artificial Sequence
  Description of Artificial Sequence: Synthetic oligonucleotide
  Sense strand starting at position 884 of SEQ ID NO: 588991
uugagugcugcucugguuu

SEQ ID NO: 903463 - RNA, 19 nt, Artificial Sequence
  Description of Artificial Sequence: Synthetic oligonucleotide
  Antisense strand to SEQ ID NO: 903462
aaaccagagcagcacucaa

SEQ ID NO: 903464 - RNA, 19 nt, Artificial Sequence
  Description of Artificial Sequence: Synthetic oligonucleotide
  Sense strand starting at position 955 of SEQ ID NO: 588991
aguaucaagaagugagauu

SEQ ID NO: 903465 - RNA, 19 nt, Artificial Sequence
  Description of Artificial Sequence: Synthetic oligonucleotide
  Antisense strand to SEQ ID NO: 903464
aaucucacuucuugauacu

SEQ ID NO: 903466 - RNA, 19 nt, Artificial Sequence
  Description of Artificial Sequence: Synthetic oligonucleotide
  Sense strand starting at position 1015 of SEQ ID NO: 588991
cuccaauuauggguccgau

SEQ ID NO: 903467 - RNA, 19 nt, Artificial Sequence
  Description of Artificial Sequence: Synthetic oligonucleotide
  Antisense strand to SEQ ID NO: 903466
aucggacccauaauuggag

SEQ ID NO: 903468 - RNA, 19 nt, Artificial Sequence
  Description of Artificial Sequence: Synthetic oligonucleotide
  Sense strand starting at position 1018 of SEQ ID NO: 588991
caauuauggguccgaugcu

SEQ ID NO: 903469 - RNA, 19 nt, Artificial Sequence
  Description of Artificial Sequence: Synthetic oligonucleotide
  Antisense strand to SEQ ID NO: 903468
agcaucggacccauaauug

SEQ ID NO: 903470 - RNA, 19 nt, Artificial Sequence
  Description of Artificial Sequence: Synthetic oligonucleotide
  Sense strand starting at position 1025 of SEQ ID NO: 588991
ggguccgaugcugaauauu

SEQ ID NO: 903471 - RNA, 19 nt, Artificial Sequence
  Description of Artificial Sequence: Synthetic oligonucleotide
  Antisense strand to SEQ ID NO: 903470
aauauucagcaucggaccc

SEQ ID NO: 903472 - RNA, 19 nt, Artificial Sequence
  Description of Artificial Sequence: Synthetic oligonucleotide
  Sense strand starting at position 1106 of SEQ ID NO: 588991
ggaugacauucguucugcu

SEQ ID NO: 903473 - RNA, 19 nt, Artificial Sequence
  Description of Artificial Sequence: Synthetic oligonucleotide
  Antisense strand to SEQ ID NO: 903472
agcagaacgaaugucaucc

SEQ ID NO: 903474 - RNA, 19 nt, Artificial Sequence
  Description of Artificial Sequence: Synthetic oligonucleotide
  Sense strand starting at position 1200 of SEQ ID NO: 588991
agggaagaauuggaagaau

SEQ ID NO: 903475 - RNA, 19 nt, Artificial Sequence
  Description of Artificial Sequence: Synthetic oligonucleotide
  Antisense strand to SEQ ID NO: 903474
auucuuccaauucuucccu

SEQ ID NO: 903476 - RNA, 19 nt, Artificial Sequence
  Description of Artificial Sequence: Synthetic oligonucleotide
  Sense strand starting at position 1256 of SEQ ID NO: 588991
uccuaaguauuugaugauc

SEQ ID NO: 903477 - RNA, 19 nt, Artificial Sequence
  Description of Artificial Sequence: Synthetic oligonucleotide
  Antisense strand to SEQ ID NO: 903476
gaucaucaaauacuuagga

SEQ ID NO: 903478 - RNA, 19 nt, Artificial Sequence
  Description of Artificial Sequence: Synthetic oligonucleotide
  Sense strand starting at position 1258 of SEQ ID NO: 588991
cuaaguauuugaugaucac

SEQ ID NO: 903479 - RNA, 19 nt, Artificial Sequence
  Description of Artificial Sequence: Synthetic oligonucleotide
  Antisense strand to SEQ ID NO: 903478
gugaucaucaaauacuuag

SEQ ID NO: 903480 - RNA, 19 nt, Artificial Sequence
  Description of Artificial Sequence: Synthetic oligonucleotide
  Sense strand starting at position 1285 of SEQ ID NO: 588991
ugcuuagaacccugcagua

SEQ ID NO: 903481 - RNA, 19 nt, Artificial Sequence
  Description of Artificial Sequence: Synthetic oligonucleotide
  Antisense strand to SEQ ID NO: 903480
uacugcaggguucuaagca

SEQ ID NO: 903482 - RNA, 19 nt, Artificial Sequence
  Description of Artificial Sequence: Synthetic oligonucleotide
  Sense strand starting at position 1575 of SEQ ID NO: 588991
aaguguuguuugcuuauag

SEQ ID NO: 903483 - RNA, 19 nt, Artificial Sequence
  Description of Artificial Sequence: Synthetic oligonucleotide
  Antisense strand to SEQ ID NO: 903482
cuauaagcaaacaacacuu

SEQ ID NO: 903484 - RNA, 19 nt, Artificial Sequence
  Description of Artificial Sequence: Synthetic oligonucleotide
  Sense strand starting at position 1586 of SEQ ID NO: 588991
gcuuauagaugcuuaauaa

SEQ ID NO: 903485 - RNA, 19 nt, Artificial Sequence
  Description of Artificial Sequence: Synthetic oligonucleotide
  Antisense strand to SEQ ID NO: 903484
uuauuaagcaucuauaagc

SEQ ID NO: 903486 - RNA, 19 nt, Artificial Sequence
  Description of Artificial Sequence: Synthetic oligonucleotide
  Sense strand starting at position 1833 of SEQ ID NO: 588991
aggccacaugacugcuaaa

SEQ ID NO: 903487 - RNA, 19 nt, Artificial Sequence
  Description of Artificial Sequence: Synthetic oligonucleotide
  Antisense strand to SEQ ID NO: 903486
uuuagcagucauguggccu

SEQ ID NO: 903488 - RNA, 19 nt, Artificial Sequence
  Description of Artificial Sequence: Synthetic oligonucleotide
  Sense strand starting at position 2024 of SEQ ID NO: 588991
ucguaacuccgcuccgaau

SEQ ID NO: 903489 - RNA, 19 nt, Artificial Sequence
  Description of Artificial Sequence: Synthetic oligonucleotide
  Antisense strand to SEQ ID NO: 903488
auucggagcggaguuacga

SEQ ID NO: 903490 - RNA, 19 nt, Artificial Sequence
  Description of Artificial Sequence: Synthetic oligonucleotide
  Sense strand starting at position 2367 of SEQ ID NO: 588991
acuaguuauggccauuaca

SEQ ID NO: 903491 - RNA, 19 nt, Artificial Sequence
  Description of Artificial Sequence: Synthetic oligonucleotide
  Antisense strand to SEQ ID NO: 903490
uguaauggccauaacuagu

SEQ ID NO: 903492 - RNA, 19 nt, Artificial Sequence
  Description of Artificial Sequence: Synthetic oligonucleotide
  Sense strand starting at position 2370 of SEQ ID NO: 588991
aguuauggccauuacagga

SEQ ID NO: 903493 - RNA, 19 nt, Artificial Sequence
  Description of Artificial Sequence: Synthetic oligonucleotide
  Antisense strand to SEQ ID NO: 903492
uccuguaauggccauaacu

SEQ ID NO: 903494 - RNA, 19 nt, Artificial Sequence
  Description of Artificial Sequence: Synthetic oligonucleotide
  Sense strand starting at position 2410 of SEQ ID NO: 588991
uuggacaugcacugauauu

SEQ ID NO: 903495 - RNA, 19 nt, Artificial Sequence
  Description of Artificial Sequence: Synthetic oligonucleotide
  Antisense strand to SEQ ID NO: 903494
aauaucagugcauguccaa

SEQ ID NO: 903496 - RNA, 19 nt, Artificial Sequence
  Description of Artificial Sequence: Synthetic oligonucleotide
  Sense strand starting at position 2516 of SEQ ID NO: 588991
aucauauuguguccggaaa

SEQ ID NO: 903497 - RNA, 19 nt, Artificial Sequence
  Description of Artificial Sequence: Synthetic oligonucleotide
  Antisense strand to SEQ ID NO: 903496
uuuccggacacaauaugau

SEQ ID NO: 903498 - RNA, 19 nt, Artificial Sequence
  Description of Artificial Sequence: Synthetic oligonucleotide
  Sense strand starting at position 2517 of SEQ ID NO: 588991
ucauauuguguccggaaau

SEQ ID NO: 903499 - RNA, 19 nt, Artificial Sequence
  Description of Artificial Sequence: Synthetic oligonucleotide
  Antisense strand to SEQ ID NO: 903498
auuuccggacacaauauga

SEQ ID NO: 903500 - RNA, 19 nt, Artificial Sequence
  Description of Artificial Sequence: Synthetic oligonucleotide
  Sense strand starting at position 2672 of SEQ ID NO: 588991
agaucuucgcaaugagugu

SEQ ID NO: 903501 - RNA, 19 nt, Artificial Sequence
  Description of Artificial Sequence: Synthetic oligonucleotide
  Antisense strand to SEQ ID NO: 903500
acacucauugcgaagaucu

SEQ ID NO: 903502 - RNA, 19 nt, Artificial Sequence
  Description of Artificial Sequence: Synthetic oligonucleotide
  Sense strand starting at position 2673 of SEQ ID NO: 588991
gaucuucgcaaugaguguu

SEQ ID NO: 903503 - RNA, 19 nt, Artificial Sequence
  Description of Artificial Sequence: Synthetic oligonucleotide
  Antisense strand to SEQ ID NO: 903502
aacacucauugcgaagauc

SEQ ID NO: 903504 - RNA, 19 nt, Artificial Sequence
  Description of Artificial Sequence: Synthetic oligonucleotide
  Sense strand starting at position 2676 of SEQ ID NO: 588991
cuucgcaaugaguguuaaa

SEQ ID NO: 903505 - RNA, 19 nt, Artificial Sequence
  Description of Artificial Sequence: Synthetic oligonucleotide
  Antisense strand to SEQ ID NO: 903504
uuuaacacucauugcgaag

SEQ ID NO: 903506 - RNA, 19 nt, Artificial Sequence
  Description of Artificial Sequence: Synthetic oligonucleotide
  Sense strand starting at position 2686 of SEQ ID NO: 588991
aguguuaaaucucuuaaga

SEQ ID NO: 903507 - RNA, 19 nt, Artificial Sequence
  Description of Artificial Sequence: Synthetic oligonucleotide
  Antisense strand to SEQ ID NO: 903506
ucuuaagagauuuaacacu

SEQ ID NO: 903508 - RNA, 19 nt, Artificial Sequence
  Description of Artificial Sequence: Synthetic oligonucleotide
  Sense strand starting at position 2715 of SEQ ID NO: 588991
ggaguuguuccuucgcucu

SEQ ID NO: 903509 - RNA, 19 nt, Artificial Sequence
  Description of Artificial Sequence: Synthetic oligonucleotide
  Antisense strand to SEQ ID NO: 903508
agagcgaaggaacaacucc

SEQ ID NO: 903510 - RNA, 19 nt, Artificial Sequence
  Description of Artificial Sequence: Synthetic oligonucleotide
  Sense strand starting at position 2783 of SEQ ID NO: 588991
ucuucacggcgaguguuau

SEQ ID NO: 903511 - RNA, 19 nt, Artificial Sequence
  Description of Artificial Sequence: Synthetic oligonucleotide
  Antisense strand to SEQ ID NO: 903510
auaacacucgccgugaaga

SEQ ID NO: 903512 - RNA, 19 nt, Artificial Sequence
  Description of Artificial Sequence: Synthetic oligonucleotide
  Sense strand starting at position 2831 of SEQ ID NO: 588991
guuagcaagcaacaagauu

SEQ ID NO: 903513 - RNA, 19 nt, Artificial Sequence
  Description of Artificial Sequence: Synthetic oligonucleotide
  Antisense strand to SEQ ID NO: 903512
aaucuuguugcuugcuaac

SEQ ID NO: 903514 - RNA, 19 nt, Artificial Sequence
  Description of Artificial Sequence: Synthetic oligonucleotide
  Sense strand starting at position 84 of SEQ ID NO: 588992
aggaaugaauacucugcua

SEQ ID NO: 903515 - RNA, 19 nt, Artificial Sequence
  Description of Artificial Sequence: Synthetic oligonucleotide
  Antisense strand to SEQ ID NO: 903514
uagcagaguauucauuccu

SEQ ID NO: 903516 - RNA, 19 nt, Artificial Sequence
  Description of Artificial Sequence: Synthetic oligonucleotide
  Sense strand starting at position 123 of SEQ ID NO: 588992
gcgguaaaggaugaaggua

SEQ ID NO: 903517 - RNA, 19 nt, Artificial Sequence
  Description of Artificial Sequence: Synthetic oligonucleotide
  Antisense strand to SEQ ID NO: 903516
uaccuucauccuuuaccgc

SEQ ID NO: 903518 - RNA, 19 nt, Artificial Sequence
  Description of Artificial Sequence: Synthetic oligonucleotide
  Sense strand starting at position 217 of SEQ ID NO: 588992
gaaucugugcugcaaagac

SEQ ID NO: 903519 - RNA, 19 nt, Artificial Sequence
  Description of Artificial Sequence: Synthetic oligonucleotide
  Antisense strand to SEQ ID NO: 903518
gucuuugcagcacagauuc

SEQ ID NO: 903520 - RNA, 19 nt, Artificial Sequence
  Description of Artificial Sequence: Synthetic oligonucleotide
  Sense strand starting at position 287 of SEQ ID NO: 588992
ucccauuguuaaccuggaa

SEQ ID NO: 903521 - RNA, 19 nt, Artificial Sequence
  Description of Artificial Sequence: Synthetic oligonucleotide
  Antisense strand to SEQ ID NO: 903520
uuccagguuaacaauggga

SEQ ID NO: 903522 - RNA, 19 nt, Artificial Sequence
  Description of Artificial Sequence: Synthetic oligonucleotide
  Sense strand starting at position 291 of SEQ ID NO: 588992
auuguuaaccuggaaagca

SEQ ID NO: 903523 - RNA, 19 nt, Artificial Sequence
  Description of Artificial Sequence: Synthetic oligonucleotide
  Antisense strand to SEQ ID NO: 903522
ugcuuuccagguuaacaau

SEQ ID NO: 903524 - RNA, 19 nt, Artificial Sequence
  Description of Artificial Sequence: Synthetic oligonucleotide
  Sense strand starting at position 322 of SEQ ID NO: 588992
gucagaugaugggugguaa

SEQ ID NO: 903525 - RNA, 19 nt, Artificial Sequence
  Description of Artificial Sequence: Synthetic oligonucleotide
  Antisense strand to SEQ ID NO: 903524
uuaccacccaucaucugac

SEQ ID NO: 903526 - RNA, 19 nt, Artificial Sequence
  Description of Artificial Sequence: Synthetic oligonucleotide
  Sense strand starting at position 335 of SEQ ID NO: 588992
ugguaagaauuccuacaua

SEQ ID NO: 903527 - RNA, 19 nt, Artificial Sequence
  Description of Artificial Sequence: Synthetic oligonucleotide
  Antisense strand to SEQ ID NO: 903526
uauguaggaauucuuacca

SEQ ID NO: 903528 - RNA, 19 nt, Artificial Sequence
  Description of Artificial Sequence: Synthetic oligonucleotide
  Sense strand starting at position 364 of SEQ ID NO: 588992
gcuaguuagcguuucagua

SEQ ID NO: 903529 - RNA, 19 nt, Artificial Sequence
  Description of Artificial Sequence: Synthetic oligonucleotide
  Antisense strand to SEQ ID NO: 903528
uacugaaacgcuaacuagc

SEQ ID NO: 903530 - RNA, 19 nt, Artificial Sequence
  Description of Artificial Sequence: Synthetic oligonucleotide
  Sense strand starting at position 393 of SEQ ID NO: 588992
uuaauuuguguguagcuuu

SEQ ID NO: 903531 - RNA, 19 nt, Artificial Sequence
  Description of Artificial Sequence: Synthetic oligonucleotide
  Antisense strand to SEQ ID NO: 903530
aaagcuacacacaaauuaa

SEQ ID NO: 903532 - RNA, 19 nt, Artificial Sequence
  Description of Artificial Sequence: Synthetic oligonucleotide
  Sense strand starting at position 434 of SEQ ID NO: 588992
ggugaaacgcuacaucauu

SEQ ID NO: 903533 - RNA, 19 nt, Artificial Sequence
  Description of Artificial Sequence: Synthetic oligonucleotide
  Antisense strand to SEQ ID NO: 903532
aaugauguagcguuucacc

SEQ ID NO: 903534 - RNA, 19 nt, Artificial Sequence
  Description of Artificial Sequence: Synthetic oligonucleotide
  Sense strand starting at position 464 of SEQ ID NO: 588992
gacugagaaucguuucuau

SEQ ID NO: 903535 - RNA, 19 nt, Artificial Sequence
  Description of Artificial Sequence: Synthetic oligonucleotide
  Antisense strand to SEQ ID NO: 903534
auagaaacgauucucaguc

SEQ ID NO: 903536 - RNA, 19 nt, Artificial Sequence
  Description of Artificial Sequence: Synthetic oligonucleotide
  Sense strand starting at position 681 of SEQ ID NO: 588992
gcauaauuacuauauugug

SEQ ID NO: 903537 - RNA, 19 nt, Artificial Sequence
  Description of Artificial Sequence: Synthetic oligonucleotide
  Antisense strand to SEQ ID NO: 903536
cacaauauaguaauuaugc

SEQ ID NO: 903538 - RNA, 19 nt, Artificial Sequence
  Description of Artificial Sequence: Synthetic oligonucleotide
  Sense strand starting at position 697 of SEQ ID NO: 588992
gugagcuucgcuuuaucau

SEQ ID NO: 903539 - RNA, 19 nt, Artificial Sequence
  Description of Artificial Sequence: Synthetic oligonucleotide
  Antisense strand to SEQ ID NO: 903538
augauaaagcgaagcucac

SEQ ID NO: 903540 - RNA, 19 nt, Artificial Sequence
  Description of Artificial Sequence: Synthetic oligonucleotide
  Sense strand starting at position 893 of SEQ ID NO: 588992
guuaucucagaauaguuau

SEQ ID NO: 903541 - RNA, 19 nt, Artificial Sequence
  Description of Artificial Sequence: Synthetic oligonucleotide
  Antisense strand to SEQ ID NO: 903540
auaacuauucugagauaac

SEQ ID NO: 903542 - RNA, 19 nt, Artificial Sequence
  Description of Artificial Sequence: Synthetic oligonucleotide
  Sense strand starting at position 1110 of SEQ ID NO: 588992
aagguagaauggucacaua

SEQ ID NO: 903543 - RNA, 19 nt, Artificial Sequence
  Description of Artificial Sequence: Synthetic oligonucleotide
  Antisense strand to SEQ ID NO: 903542
uaugugaccauucuaccuu

SEQ ID NO: 903544 - RNA, 19 nt, Artificial Sequence
  Description of Artificial Sequence: Synthetic oligonucleotide
  Sense strand starting at position 1121 of SEQ ID NO: 588992
gucacauaaccaugacuga

SEQ ID NO: 903545 - RNA, 19 nt, Artificial Sequence
  Description of Artificial Sequence: Synthetic oligonucleotide
  Antisense strand to SEQ ID NO: 903544
ucagucaugguuaugugac

SEQ ID NO: 903546 - RNA, 19 nt, Artificial Sequence
  Description of Artificial Sequence: Synthetic oligonucleotide
  Sense strand starting at position 1195 of SEQ ID NO: 588992
ugauguguaauagggaagu

SEQ ID NO: 903547 - RNA, 19 nt, Artificial Sequence
  Description of Artificial Sequence: Synthetic oligonucleotide
  Antisense strand to SEQ ID NO: 903546
acuucccuauuacacauca

SEQ ID NO: 903548 - RNA, 19 nt, Artificial Sequence
  Description of Artificial Sequence: Synthetic oligonucleotide
  Sense strand starting at position 1197 of SEQ ID NO: 588992
auguguaauagggaagugu

SEQ ID NO: 903549 - RNA, 19 nt, Artificial Sequence
  Description of Artificial Sequence: Synthetic oligonucleotide
  Antisense strand to SEQ ID NO: 903548
acacuucccuauuacacau

SEQ ID NO: 903550 - RNA, 19 nt, Artificial Sequence
  Description of Artificial Sequence: Synthetic oligonucleotide
  Sense strand starting at position 1507 of SEQ ID NO: 588992
gaaucaaguucuccaggca

SEQ ID NO: 903551 - RNA, 19 nt, Artificial Sequence
  Description of Artificial Sequence: Synthetic oligonucleotide
  Antisense strand to SEQ ID NO: 903550
ugccuggagaacuugauuc

SEQ ID NO: 903552 - RNA, 19 nt, Artificial Sequence
  Description of Artificial Sequence: Synthetic oligonucleotide
  Sense strand starting at position 1673 of SEQ ID NO: 588992
aggguccacuaacuuuaua

SEQ ID NO: 903553 - RNA, 19 nt, Artificial Sequence
  Description of Artificial Sequence: Synthetic oligonucleotide
  Antisense strand to SEQ ID NO: 903552
uauaaaguuaguggacccu

SEQ ID NO: 903554 - RNA, 19 nt, Artificial Sequence
  Description of Artificial Sequence: Synthetic oligonucleotide
  Sense strand starting at position 1691 of SEQ ID NO: 588992
aggaacaaauuacaagaaa

SEQ ID NO: 903555 - RNA, 19 nt, Artificial Sequence
  Description of Artificial Sequence: Synthetic oligonucleotide
  Antisense strand to SEQ ID NO: 903554
uuucuuguaauuuguuccu

SEQ ID NO: 903556 - RNA, 19 nt, Artificial Sequence
  Description of Artificial Sequence: Synthetic oligonucleotide
  Sense strand starting at position 2088 of SEQ ID NO: 588992
ucaaguaagcaaugaacuu

SEQ ID NO: 903557 - RNA, 19 nt, Artificial Sequence
  Description of Artificial Sequence: Synthetic oligonucleotide
  Antisense strand to SEQ ID NO: 903556
aaguucauugcuuacuuga

SEQ ID NO: 903558 - RNA, 19 nt, Artificial Sequence
  Description of Artificial Sequence: Synthetic oligonucleotide
  Sense strand starting at position 2097 of SEQ ID NO: 588992
caaugaacuugggcagauu

SEQ ID NO: 903559 - RNA, 19 nt, Artificial Sequence
  Description of Artificial Sequence: Synthetic oligonucleotide
  Antisense strand to SEQ ID NO: 903558
aaucugcccaaguucauug

SEQ ID NO: 903560 - RNA, 19 nt, Artificial Sequence
  Description of Artificial Sequence: Synthetic oligonucleotide
  Sense strand starting at position 2138 of SEQ ID NO: 588992
cgggauuagccucacuaag

SEQ ID NO: 903561 - RNA, 19 nt, Artificial Sequence
  Description of Artificial Sequence: Synthetic oligonucleotide
  Antisense strand to SEQ ID NO: 903560
cuuagugaggcuaaucccg

SEQ ID NO: 903562 - RNA, 19 nt, Artificial Sequence
  Description of Artificial Sequence: Synthetic oligonucleotide
  Sense strand starting at position 2140 of SEQ ID NO: 588992
ggauuagccucacuaagaa

SEQ ID NO: 903563 - RNA, 19 nt, Artificial Sequence
  Description of Artificial Sequence: Synthetic oligonucleotide
  Antisense strand to SEQ ID NO: 903562
uucuuagugaggcuaaucc

SEQ ID NO: 903564 - RNA, 19 nt, Artificial Sequence
  Description of Artificial Sequence: Synthetic oligonucleotide
  Sense strand starting at position 2208 of SEQ ID NO: 588992
cuaaucugacgccagaaga

SEQ ID NO: 903565 - RNA, 19 nt, Artificial Sequence
  Description of Artificial Sequence: Synthetic oligonucleotide
  Antisense strand to SEQ ID NO: 903564
ucuucuggcgucagauuag

SEQ ID NO: 903566 - RNA, 19 nt, Artificial Sequence
  Description of Artificial Sequence: Synthetic oligonucleotide
  Sense strand starting at position 2540 of SEQ ID NO: 588992
gccuaagaagaaugaaguu

SEQ ID NO: 903567 - RNA, 19 nt, Artificial Sequence
  Description of Artificial Sequence: Synthetic oligonucleotide
  Antisense strand to SEQ ID NO: 903566
aacuucauucuucuuaggc

SEQ ID NO: 903568 - RNA, 19 nt, Artificial Sequence
  Description of Artificial Sequence: Synthetic oligonucleotide
  Sense strand starting at position 2546 of SEQ ID NO: 588992
gaagaaugaaguuggaguu

SEQ ID NO: 903569 - RNA, 19 nt, Artificial Sequence
  Description of Artificial Sequence: Synthetic oligonucleotide
  Antisense strand to SEQ ID NO: 903568
aacuccaacuucauucuuc

SEQ ID NO: 903570 - RNA, 19 nt, Artificial Sequence
  Description of Artificial Sequence: Synthetic oligonucleotide
  Sense strand starting at position 2650 of SEQ ID NO: 588992
gcaaauguaugauuagaaa

SEQ ID NO: 903571 - RNA, 19 nt, Artificial Sequence
  Description of Artificial Sequence: Synthetic oligonucleotide
  Antisense strand to SEQ ID NO: 903570
uuucuaaucauacauuugc

SEQ ID NO: 903572 - RNA, 19 nt, Artificial Sequence
  Description of Artificial Sequence: Synthetic oligonucleotide
  Sense strand starting at position 2717 of SEQ ID NO: 588992
ggccuauggaugcagauca

SEQ ID NO: 903573 - RNA, 19 nt, Artificial Sequence
  Description of Artificial Sequence: Synthetic oligonucleotide
  Antisense strand to SEQ ID NO: 903572
ugaucugcauccauaggcc

SEQ ID NO: 903574 - RNA, 19 nt, Artificial Sequence
  Description of Artificial Sequence: Synthetic oligonucleotide
  Sense strand starting at position 2855 of SEQ ID NO: 588992
uaguauucuugauuggaua

SEQ ID NO: 903575 - RNA, 19 nt, Artificial Sequence
  Description of Artificial Sequence: Synthetic oligonucleotide
  Antisense strand to SEQ ID NO: 903574
uauccaaucaagaauacua

SEQ ID NO: 903576 - RNA, 19 nt, Artificial Sequence
  Description of Artificial Sequence: Synthetic oligonucleotide
  Sense strand starting at position 2856 of SEQ ID NO: 588992
aguauucuugauuggauaa

SEQ ID NO: 903577 - RNA, 19 nt, Artificial Sequence
  Description of Artificial Sequence: Synthetic oligonucleotide
  Antisense strand to SEQ ID NO: 903576
uuauccaaucaagaauacu

SEQ ID NO: 903578 - RNA, 19 nt, Artificial Sequence
  Description of Artificial Sequence: Synthetic oligonucleotide
  Sense strand starting at position 2857 of SEQ ID NO: 588992
guauucuugauuggauaag

SEQ ID NO: 903579 - RNA, 19 nt, Artificial Sequence
  Description of Artificial Sequence: Synthetic oligonucleotide
  Antisense strand to SEQ ID NO: 903578
cuuauccaaucaagaauac

SEQ ID NO: 903580 - RNA, 19 nt, Artificial Sequence
  Description of Artificial Sequence: Synthetic oligonucleotide
  Sense strand starting at position 3081 of SEQ ID NO: 588992
ucuguuaaugcgccuagua

SEQ ID NO: 903581 - RNA, 19 nt, Artificial Sequence
  Description of Artificial Sequence: Synthetic oligonucleotide
  Antisense strand to SEQ ID NO: 903580
uacuaggcgcauuaacaga

SEQ ID NO: 903582 - RNA, 19 nt, Artificial Sequence
  Description of Artificial Sequence: Synthetic oligonucleotide
  Sense strand starting at position 3415 of SEQ ID NO: 588992
uggugacagccuuaaugac

SEQ ID NO: 903583 - RNA, 19 nt, Artificial Sequence
  Description of Artificial Sequence: Synthetic oligonucleotide
  Antisense strand to SEQ ID NO: 903582
gucauuaaggcugucacca

SEQ ID NO: 903584 - RNA, 19 nt, Artificial Sequence
  Description of Artificial Sequence: Synthetic oligonucleotide
  Sense strand starting at position 3604 of SEQ ID NO: 588992
augccauuugguggugaua

SEQ ID NO: 903585 - RNA, 19 nt, Artificial Sequence
  Description of Artificial Sequence: Synthetic oligonucleotide
  Antisense strand to SEQ ID NO: 903584
uaucaccaccaaauggcau

SEQ ID NO: 903586 - RNA, 19 nt, Artificial Sequence
  Description of Artificial Sequence: Synthetic oligonucleotide
  Sense strand starting at position 3613 of SEQ ID NO: 588992
gguggugauaaucagguuu

SEQ ID NO: 903587 - RNA, 19 nt, Artificial Sequence
  Description of Artificial Sequence: Synthetic oligonucleotide
  Antisense strand to SEQ ID NO: 903586
aaaccugauuaucaccacc

SEQ ID NO: 903588 - RNA, 19 nt, Artificial Sequence
  Description of Artificial Sequence: Synthetic oligonucleotide
  Sense strand starting at position 3640 of SEQ ID NO: 588992
ugcuuaauuacguagagaa

SEQ ID NO: 903589 - RNA, 19 nt, Artificial Sequence
  Description of Artificial Sequence: Synthetic oligonucleotide
  Antisense strand to SEQ ID NO: 903588
uucucuacguaauuaagca

SEQ ID NO: 903590 - RNA, 19 nt, Artificial Sequence
  Description of Artificial Sequence: Synthetic oligonucleotide
  Sense strand starting at position 3927 of SEQ ID NO: 588992
gagguuauuacggaugagu

SEQ ID NO: 903591 - RNA, 19 nt, Artificial Sequence
  Description of Artificial Sequence: Synthetic oligonucleotide
  Antisense strand to SEQ ID NO: 903590
acucauccguaauaaccuc

SEQ ID NO: 903592 - RNA, 19 nt, Artificial Sequence
  Description of Artificial Sequence: Synthetic oligonucleotide
  Sense strand starting at position 3930 of SEQ ID NO: 588992
guuauuacggaugaguauc

SEQ ID NO: 903593 - RNA, 19 nt, Artificial Sequence
  Description of Artificial Sequence: Synthetic oligonucleotide
  Antisense strand to SEQ ID NO: 903592
gauacucauccguaauaac

SEQ ID NO: 903594 - RNA, 19 nt, Artificial Sequence
  Description of Artificial Sequence: Synthetic oligonucleotide
  Sense strand starting at position 24 of SEQ ID NO: 588993
uuggguuaaagcugauaca

SEQ ID NO: 903595 - RNA, 19 nt, Artificial Sequence
  Description of Artificial Sequence: Synthetic oligonucleotide
  Antisense strand to SEQ ID NO: 903594
uguaucagcuuuaacccaa

SEQ ID NO: 903596 - RNA, 19 nt, Artificial Sequence
  Description of Artificial Sequence: Synthetic oligonucleotide
  Sense strand starting at position 25 of SEQ ID NO: 588993
uggguuaaagcugauacau

SEQ ID NO: 903597 - RNA, 19 nt, Artificial Sequence
  Description of Artificial Sequence: Synthetic oligonucleotide
  Antisense strand to SEQ ID NO: 903596
auguaucagcuuuaaccca

SEQ ID NO: 903598 - RNA, 19 nt, Artificial Sequence
  Description of Artificial Sequence: Synthetic oligonucleotide
  Sense strand starting at position 76 of SEQ ID NO: 588993
uucgaauuacuggaguuga

SEQ ID NO: 903599 - RNA, 19 nt, Artificial Sequence
  Description of Artificial Sequence: Synthetic oligonucleotide
  Antisense strand to SEQ ID NO: 903598
ucaacuccaguaauucgaa

SEQ ID NO: 903600 - RNA, 19 nt, Artificial Sequence
  Description of Artificial Sequence: Synthetic oligonucleotide
  Sense strand starting at position 107 of SEQ ID NO: 588993
agacuuagauaugcccauu

SEQ ID NO: 903601 - RNA, 19 nt, Artificial Sequence
  Description of Artificial Sequence: Synthetic oligonucleotide
  Antisense strand to SEQ ID NO: 903600
aaugggcauaucuaagucu

SEQ ID NO: 903602 - RNA, 19 nt, Artificial Sequence
  Description of Artificial Sequence: Synthetic oligonucleotide
  Sense strand starting at position 301 of SEQ ID NO: 588993
ccuaaauagucccuaggga

SEQ ID NO: 903603 - RNA, 19 nt, Artificial Sequence
  Description of Artificial Sequence: Synthetic oligonucleotide
  Antisense strand to SEQ ID NO: 903602
ucccuagggacuauuuagg

SEQ ID NO: 903604 - RNA, 19 nt, Artificial Sequence
  Description of Artificial Sequence: Synthetic oligonucleotide
  Sense strand starting at position 338 of SEQ ID NO: 588993
caaccauaugaugggaguu

SEQ ID NO: 903605 - RNA, 19 nt, Artificial Sequence
  Description of Artificial Sequence: Synthetic oligonucleotide
  Antisense strand to SEQ ID NO: 903604
aacucccaucauaugguug

SEQ ID NO: 903606 - RNA, 19 nt, Artificial Sequence
  Description of Artificial Sequence: Synthetic oligonucleotide
  Sense strand starting at position 456 of SEQ ID NO: 588993
accacuuagcuguauggaa

SEQ ID NO: 903607 - RNA, 19 nt, Artificial Sequence
  Description of Artificial Sequence: Synthetic oligonucleotide
  Antisense strand to SEQ ID NO: 903606
uuccauacagcuaaguggu

SEQ ID NO: 903608 - RNA, 19 nt, Artificial Sequence
  Description of Artificial Sequence: Synthetic oligonucleotide
  Sense strand starting at position 658 of SEQ ID NO: 588993
uuuaacuucgaauggauau

SEQ ID NO: 903609 - RNA, 19 nt, Artificial Sequence
  Description of Artificial Sequence: Synthetic oligonucleotide
  Antisense strand to SEQ ID NO: 903608
auauccauucgaaguuaaa

SEQ ID NO: 903610 - RNA, 19 nt, Artificial Sequence
  Description of Artificial Sequence: Synthetic oligonucleotide
  Sense strand starting at position 803 of SEQ ID NO: 588993
gguggauuaguacagaguu

SEQ ID NO: 903611 - RNA, 19 nt, Artificial Sequence
  Description of Artificial Sequence: Synthetic oligonucleotide
  Antisense strand to SEQ ID NO: 903610
aacucuguacuaauccacc

SEQ ID NO: 903612 - RNA, 19 nt, Artificial Sequence
  Description of Artificial Sequence: Synthetic oligonucleotide
  Sense strand starting at position 805 of SEQ ID NO: 588993
uggauuaguacagaguugu

SEQ ID NO: 903613 - RNA, 19 nt, Artificial Sequence
  Description of Artificial Sequence: Synthetic oligonucleotide
  Antisense strand to SEQ ID NO: 903612
acaacucuguacuaaucca

SEQ ID NO: 903614 - RNA, 19 nt, Artificial Sequence
  Description of Artificial Sequence: Synthetic oligonucleotide
  Sense strand starting at position 813 of SEQ ID NO: 588993
uacagaguuguauggacuu

SEQ ID NO: 903615 - RNA, 19 nt, Artificial Sequence
  Description of Artificial Sequence: Synthetic oligonucleotide
  Antisense strand to SEQ ID NO: 903614
aaguccauacaacucugua

SEQ ID NO: 903616 - RNA, 19 nt, Artificial Sequence
  Description of Artificial Sequence: Synthetic oligonucleotide
  Sense strand starting at position 1123 of SEQ ID NO: 588993
ugaggagaauccuuuguuc

SEQ ID NO: 903617 - RNA, 19 nt, Artificial Sequence
  Description of Artificial Sequence: Synthetic oligonucleotide
  Antisense strand to SEQ ID NO: 903616
gaacaaaggauucuccuca

SEQ ID NO: 903618 - RNA, 19 nt, Artificial Sequence
  Description of Artificial Sequence: Synthetic oligonucleotide
  Sense strand starting at position 1125 of SEQ ID NO: 588993
aggagaauccuuuguucuc

SEQ ID NO: 903619 - RNA, 19 nt, Artificial Sequence
  Description of Artificial Sequence: Synthetic oligonucleotide
  Antisense strand to SEQ ID NO: 903618
gagaacaaaggauucuccu

SEQ ID NO: 903620 - RNA, 19 nt, Artificial Sequence
  Description of Artificial Sequence: Synthetic oligonucleotide
  Sense strand starting at position 1126 of SEQ ID NO: 588993
ggagaauccuuuguucucu

SEQ ID NO: 903621 - RNA, 19 nt, Artificial Sequence
  Description of Artificial Sequence: Synthetic oligonucleotide
  Antisense strand to SEQ ID NO: 903620
agagaacaaaggauucucc

SEQ ID NO: 903622 - RNA, 19 nt, Artificial Sequence
  Description of Artificial Sequence: Synthetic oligonucleotide
  Sense strand starting at position 1777 of SEQ ID NO: 588993
ugcaaauuccauuagggca

SEQ ID NO: 903623 - RNA, 19 nt, Artificial Sequence
  Description of Artificial Sequence: Synthetic oligonucleotide
  Antisense strand to SEQ ID NO: 903622
ugcccuaauggaauuugca

SEQ ID NO: 903624 - RNA, 19 nt, Artificial Sequence
  Description of Artificial Sequence: Synthetic oligonucleotide
  Sense strand starting at position 1811 of SEQ ID NO: 588993
uuggaagacuagucaagua

SEQ ID NO: 903625 - RNA, 19 nt, Artificial Sequence
  Description of Artificial Sequence: Synthetic oligonucleotide
  Antisense strand to SEQ ID NO: 903624
uacuugacuagucuuccaa

SEQ ID NO: 903626 - RNA, 19 nt, Artificial Sequence
  Description of Artificial Sequence: Synthetic oligonucleotide
  Sense strand starting at position 1988 of SEQ ID NO: 588993
gccuguggucggagucaaa

SEQ ID NO: 903627 - RNA, 19 nt, Artificial Sequence
  Description of Artificial Sequence: Synthetic oligonucleotide
  Antisense strand to SEQ ID NO: 903626
uuugacuccgaccacaggc

SEQ ID NO: 903628 - RNA, 19 nt, Artificial Sequence
  Description of Artificial Sequence: Synthetic oligonucleotide
  Sense strand starting at position 2184 of SEQ ID NO: 588993
agcaucuuugagggacuga

SEQ ID NO: 903629 - RNA, 19 nt, Artificial Sequence
  Description of Artificial Sequence: Synthetic oligonucleotide
  Antisense strand to SEQ ID NO: 903628
ucagucccucaaagaugcu

SEQ ID NO: 903630 - RNA, 19 nt, Artificial Sequence
  Description of Artificial Sequence: Synthetic oligonucleotide
  Sense strand starting at position 2246 of SEQ ID NO: 588993
gugccuccgaaugaugaga

SEQ ID NO: 903631 - RNA, 19 nt, Artificial Sequence
  Description of Artificial Sequence: Synthetic oligonucleotide
  Antisense strand to SEQ ID NO: 903630
ucucaucauucggaggcac

SEQ ID NO: 903632 - RNA, 19 nt, Artificial Sequence
  Description of Artificial Sequence: Synthetic oligonucleotide
  Sense strand starting at position 2260 of SEQ ID NO: 588993
ugagauaaaugcuucccuu

SEQ ID NO: 903633 - RNA, 19 nt, Artificial Sequence
  Description of Artificial Sequence: Synthetic oligonucleotide
  Antisense strand to SEQ ID NO: 903632
aagggaagcauuuaucuca

SEQ ID NO: 903634 - RNA, 19 nt, Artificial Sequence
  Description of Artificial Sequence: Synthetic oligonucleotide
  Sense strand starting at position 2359 of SEQ ID NO: 588993
uuuauuaaccgugauugac

SEQ ID NO: 903635 - RNA, 19 nt, Artificial Sequence
  Description of Artificial Sequence: Synthetic oligonucleotide
  Antisense strand to SEQ ID NO: 903634
gucaaucacgguuaauaaa

SEQ ID NO: 903636 - RNA, 19 nt, Artificial Sequence
  Description of Artificial Sequence: Synthetic oligonucleotide
  Sense strand starting at position 2394 of SEQ ID NO: 588993
aucgguugcauagaugaca

SEQ ID NO: 903637 - RNA, 19 nt, Artificial Sequence
  Description of Artificial Sequence: Synthetic oligonucleotide
  Antisense strand to SEQ ID NO: 903636
ugucaucuaugcaaccgau

SEQ ID NO: 903638 - RNA, 19 nt, Artificial Sequence
  Description of Artificial Sequence: Synthetic oligonucleotide
  Sense strand starting at position 2591 of SEQ ID NO: 588993
augggaugcugucuauaaa

SEQ ID NO: 903639 - RNA, 19 nt, Artificial Sequence
  Description of Artificial Sequence: Synthetic oligonucleotide
  Antisense strand to SEQ ID NO: 903638
uuuauagacagcaucccau

SEQ ID NO: 903640 - RNA, 19 nt, Artificial Sequence
  Description of Artificial Sequence: Synthetic oligonucleotide
  Sense strand starting at position 2592 of SEQ ID NO: 588993
ugggaugcugucuauaaag

SEQ ID NO: 903641 - RNA, 19 nt, Artificial Sequence
  Description of Artificial Sequence: Synthetic oligonucleotide
  Antisense strand to SEQ ID NO: 903640
cuuuauagacagcauccca

SEQ ID NO: 903642 - RNA, 19 nt, Artificial Sequence
  Description of Artificial Sequence: Synthetic oligonucleotide
  Sense strand starting at position 2669 of SEQ ID NO: 588993
aauaguugcugaguuggaa

SEQ ID NO: 903643 - RNA, 19 nt, Artificial Sequence
  Description of Artificial Sequence: Synthetic oligonucleotide
  Antisense strand to SEQ ID NO: 903642
uuccaacucagcaacuauu

SEQ ID NO: 903644 - RNA, 19 nt, Artificial Sequence
  Description of Artificial Sequence: Synthetic oligonucleotide
  Sense strand starting at position 2686 of SEQ ID NO: 588993
aauguauagucuuuaggac

SEQ ID NO: 903645 - RNA, 19 nt, Artificial Sequence
  Description of Artificial Sequence: Synthetic oligonucleotide
  Antisense strand to SEQ ID NO: 903644
guccuaaagacuauacauu

SEQ ID NO: 903646 - RNA, 19 nt, Artificial Sequence
  Description of Artificial Sequence: Synthetic oligonucleotide
  Sense strand starting at position 2687 of SEQ ID NO: 588993
auguauagucuuuaggacu

SEQ ID NO: 903647 - RNA, 19 nt, Artificial Sequence
  Description of Artificial Sequence: Synthetic oligonucleotide
  Antisense strand to SEQ ID NO: 903646
aguccuaaagacuauacau

SEQ ID NO: 903648 - RNA, 19 nt, Artificial Sequence
  Description of Artificial Sequence: Synthetic oligonucleotide
  Sense strand starting at position 2863 of SEQ ID NO: 588993
agcaguugaccugacaacu

SEQ ID NO: 903649 - RNA, 19 nt, Artificial Sequence
  Description of Artificial Sequence: Synthetic oligonucleotide
  Antisense strand to SEQ ID NO: 903648
aguugucaggucaacugcu

SEQ ID NO: 903650 - RNA, 19 nt, Artificial Sequence
  Description of Artificial Sequence: Synthetic oligonucleotide
  Sense strand starting at position 3214 of SEQ ID NO: 588993
accuaccucguauaguaaa

SEQ ID NO: 903651 - RNA, 19 nt, Artificial Sequence
  Description of Artificial Sequence: Synthetic oligonucleotide
  Antisense strand to SEQ ID NO: 903650
uuuacuauacgagguaggu

SEQ ID NO: 903652 - RNA, 19 nt, Artificial Sequence
  Description of Artificial Sequence: Synthetic oligonucleotide
  Sense strand starting at position 3235 of SEQ ID NO: 588993
uuaugucucugauuaucua

SEQ ID NO: 903653 - RNA, 19 nt, Artificial Sequence
  Description of Artificial Sequence: Synthetic oligonucleotide
  Antisense strand to SEQ ID NO: 903652
uagauaaucagagacauaa

SEQ ID NO: 903654 - RNA, 19 nt, Artificial Sequence
  Description of Artificial Sequence: Synthetic oligonucleotide
  Sense strand starting at position 3453 of SEQ ID NO: 588993
gcaagugagguccagagaa

SEQ ID NO: 903655 - RNA, 19 nt, Artificial Sequence
  Description of Artificial Sequence: Synthetic oligonucleotide
  Antisense strand to SEQ ID NO: 903654
uucucuggaccucacuugc

SEQ ID NO: 903656 - RNA, 19 nt, Artificial Sequence
  Description of Artificial Sequence: Synthetic oligonucleotide
  Sense strand starting at position 3647 of SEQ ID NO: 588993
agaagaaacgcucagcauu

SEQ ID NO: 903657 - RNA, 19 nt, Artificial Sequence
  Description of Artificial Sequence: Synthetic oligonucleotide
  Antisense strand to SEQ ID NO: 903656
aaugcugagcguuucuucu

SEQ ID NO: 903658 - RNA, 19 nt, Artificial Sequence
  Description of Artificial Sequence: Synthetic oligonucleotide
  Sense strand starting at position 3674 of SEQ ID NO: 588993
auuauuacuuuggucugau

SEQ ID NO: 903659 - RNA, 19 nt, Artificial Sequence
  Description of Artificial Sequence: Synthetic oligonucleotide
  Antisense strand to SEQ ID NO: 903658
aucagaccaaaguaauaau

SEQ ID NO: 903660 - RNA, 19 nt, Artificial Sequence
  Description of Artificial Sequence: Synthetic oligonucleotide
  Sense strand starting at position 3675 of SEQ ID NO: 588993
uuauuacuuuggucugaug

SEQ ID NO: 903661 - RNA, 19 nt, Artificial Sequence
  Description of Artificial Sequence: Synthetic oligonucleotide
  Antisense strand to SEQ ID NO: 903660
caucagaccaaaguaauaa

SEQ ID NO: 903662 - RNA, 19 nt, Artificial Sequence
  Description of Artificial Sequence: Synthetic oligonucleotide
  Sense strand starting at position 3684 of SEQ ID NO: 588993
uggucugauguugauguau

SEQ ID NO: 903663 - RNA, 19 nt, Artificial Sequence
  Description of Artificial Sequence: Synthetic oligonucleotide
  Antisense strand to SEQ ID NO: 903662
auacaucaacaucagacca

SEQ ID NO: 903664 - RNA, 19 nt, Artificial Sequence
  Description of Artificial Sequence: Synthetic oligonucleotide
  Sense strand starting at position 3701 of SEQ ID NO: 588993
auuaguuaacagcaugaau

SEQ ID NO: 903665 - RNA, 19 nt, Artificial Sequence
  Description of Artificial Sequence: Synthetic oligonucleotide
  Antisense strand to SEQ ID NO: 903664
auucaugcuguuaacuaau

SEQ ID NO: 903666 - RNA, 19 nt, Artificial Sequence
  Description of Artificial Sequence: Synthetic oligonucleotide
  Sense strand starting at position 3756 of SEQ ID NO: 588993
gaagcuagucuugggagau

SEQ ID NO: 903667 - RNA, 19 nt, Artificial Sequence
  Description of Artificial Sequence: Synthetic oligonucleotide
  Antisense strand to SEQ ID NO: 903666
aucucccaagacuagcuuc

SEQ ID NO: 903668 - RNA, 19 nt, Artificial Sequence
  Description of Artificial Sequence: Synthetic oligonucleotide
  Sense strand starting at position 3799 of SEQ ID NO: 588993
aguccuuauccguacaaug

SEQ ID NO: 903669 - RNA, 19 nt, Artificial Sequence
  Description of Artificial Sequence: Synthetic oligonucleotide
  Antisense strand to SEQ ID NO: 903668
cauuguacggauaaggacu

SEQ ID NO: 903670 - RNA, 19 nt, Artificial Sequence
  Description of Artificial Sequence: Synthetic oligonucleotide
  Sense strand starting at position 3801 of SEQ ID NO: 588993
uccuuauccguacaaugga

SEQ ID NO: 903671 - RNA, 19 nt, Artificial Sequence
  Description of Artificial Sequence: Synthetic oligonucleotide
  Antisense strand to SEQ ID NO: 903670
uccauuguacggauaagga

SEQ ID NO: 903672 - RNA, 19 nt, Artificial Sequence
  Description of Artificial Sequence: Synthetic oligonucleotide
  Sense strand starting at position 3960 of SEQ ID NO: 588993
cuggaagcccacugacaau

SEQ ID NO: 903673 - RNA, 19 nt, Artificial Sequence
  Description of Artificial Sequence: Synthetic oligonucleotide
  Antisense strand to SEQ ID NO: 903672
auugucagugggcuuccag

SEQ ID NO: 903674 - RNA, 19 nt, Artificial Sequence
  Description of Artificial Sequence: Synthetic oligonucleotide
  Sense strand starting at position 391 of SEQ ID NO: 588994
ucaccucugguauaaugau

SEQ ID NO: 903675 - RNA, 19 nt, Artificial Sequence
  Description of Artificial Sequence: Synthetic oligonucleotide
  Antisense strand to SEQ ID NO: 903674
aucauuauaccagagguga

SEQ ID NO: 903676 - RNA, 19 nt, Artificial Sequence
  Description of Artificial Sequence: Synthetic oligonucleotide
  Sense strand starting at position 397 of SEQ ID NO: 588994
cugguauaaugaucucaaa

SEQ ID NO: 903677 - RNA, 19 nt, Artificial Sequence
  Description of Artificial Sequence: Synthetic oligonucleotide
  Antisense strand to SEQ ID NO: 903676
uuugagaucauuauaccag

SEQ ID NO: 903678 - RNA, 19 nt, Artificial Sequence
  Description of Artificial Sequence: Synthetic oligonucleotide
  Sense strand starting at position 429 of SEQ ID NO: 588994
cuugucuaucaagacaagu

SEQ ID NO: 903679 - RNA, 19 nt, Artificial Sequence
  Description of Artificial Sequence: Synthetic oligonucleotide
  Antisense strand to SEQ ID NO: 903678
acuugucuugauagacaag

SEQ ID NO: 903680 - RNA, 19 nt, Artificial Sequence
  Description of Artificial Sequence: Synthetic oligonucleotide
  Sense strand starting at position 609 of SEQ ID NO: 588994
uuaucaguccuguaagaac

SEQ ID NO: 903681 - RNA, 19 nt, Artificial Sequence
  Description of Artificial Sequence: Synthetic oligonucleotide
  Antisense strand to SEQ ID NO: 903680
guucuuacaggacugauaa

SEQ ID NO: 903682 - RNA, 19 nt, Artificial Sequence
  Description of Artificial Sequence: Synthetic oligonucleotide
  Sense strand starting at position 632 of SEQ ID NO: 588994
agcagaugacagugaaaca

SEQ ID NO: 903683 - RNA, 19 nt, Artificial Sequence
  Description of Artificial Sequence: Synthetic oligonucleotide
  Antisense strand to SEQ ID NO: 903682
uguuucacugucaucugcu

SEQ ID NO: 903684 - RNA, 19 nt, Artificial Sequence
  Description of Artificial Sequence: Synthetic oligonucleotide
  Sense strand starting at position 744 of SEQ ID NO: 588994
aaaugauguguaugacuag

SEQ ID NO: 903685 - RNA, 19 nt, Artificial Sequence
  Description of Artificial Sequence: Synthetic oligonucleotide
  Antisense strand to SEQ ID NO: 903684
cuagucauacacaucauuu

SEQ ID NO: 903686 - RNA, 19 nt, Artificial Sequence
  Description of Artificial Sequence: Synthetic oligonucleotide
  Sense strand starting at position 747 of SEQ ID NO: 588994
ugauguguaugacuagaac

SEQ ID NO: 903687 - RNA, 19 nt, Artificial Sequence
  Description of Artificial Sequence: Synthetic oligonucleotide
  Antisense strand to SEQ ID NO: 903686
guucuagucauacacauca

SEQ ID NO: 903688 - RNA, 19 nt, Artificial Sequence
  Description of Artificial Sequence: Synthetic oligonucleotide
  Sense strand starting at position 750 of SEQ ID NO: 588994
uguguaugacuagaacauc

SEQ ID NO: 903689 - RNA, 19 nt, Artificial Sequence
  Description of Artificial Sequence: Synthetic oligonucleotide
  Antisense strand to SEQ ID NO: 903688
gauguucuagucauacaca

SEQ ID NO: 903690 - RNA, 19 nt, Artificial Sequence
  Description of Artificial Sequence: Synthetic oligonucleotide
  Sense strand starting at position 937 of SEQ ID NO: 588994
ggauuacugccaggaugaa

SEQ ID NO: 903691 - RNA, 19 nt, Artificial Sequence
  Description of Artificial Sequence: Synthetic oligonucleotide
  Antisense strand to SEQ ID NO: 903690
uucauccuggcaguaaucc

SEQ ID NO: 903692 - RNA, 19 nt, Artificial Sequence
  Description of Artificial Sequence: Synthetic oligonucleotide
  Sense strand starting at position 1084 of SEQ ID NO: 588994
agccgaagaacagauguua

SEQ ID NO: 903693 - RNA, 19 nt, Artificial Sequence
  Description of Artificial Sequence: Synthetic oligonucleotide
  Antisense strand to SEQ ID NO: 903692
uaacaucuguucuucggcu

SEQ ID NO: 903694 - RNA, 19 nt, Artificial Sequence
  Description of Artificial Sequence: Synthetic oligonucleotide
  Sense strand starting at position 1209 of SEQ ID NO: 588994
cuaagcugccuggacuauu

SEQ ID NO: 903695 - RNA, 19 nt, Artificial Sequence
  Description of Artificial Sequence: Synthetic oligonucleotide
  Antisense strand to SEQ ID NO: 903694
aauaguccaggcagcuuag

SEQ ID NO: 903696 - RNA, 19 nt, Artificial Sequence
  Description of Artificial Sequence: Synthetic oligonucleotide
  Sense strand starting at position 1217 of SEQ ID NO: 588994
ccuggacuauuccugaaau

SEQ ID NO: 903697 - RNA, 19 nt, Artificial Sequence
  Description of Artificial Sequence: Synthetic oligonucleotide
  Antisense strand to SEQ ID NO: 903696
auuucaggaauaguccagg

SEQ ID NO: 903698 - RNA, 19 nt, Artificial Sequence
  Description of Artificial Sequence: Synthetic oligonucleotide
  Sense strand starting at position 1262 of SEQ ID NO: 588994
ucauacacagugugagaaa

SEQ ID NO: 903699 - RNA, 19 nt, Artificial Sequence
  Description of Artificial Sequence: Synthetic oligonucleotide
  Antisense strand to SEQ ID NO: 903698
uuucucacacuguguauga

SEQ ID NO: 903700 - RNA, 19 nt, Artificial Sequence
  Description of Artificial Sequence: Synthetic oligonucleotide
  Sense strand starting at position 1919 of SEQ ID NO: 588994
ggauaaucaucuuugggug

SEQ ID NO: 903701 - RNA, 19 nt, Artificial Sequence
  Description of Artificial Sequence: Synthetic oligonucleotide
  Antisense strand to SEQ ID NO: 903700
cacccaaagaugauuaucc

SEQ ID NO: 903702 - RNA, 19 nt, Artificial Sequence
  Description of Artificial Sequence: Synthetic oligonucleotide
  Sense strand starting at position 1923 of SEQ ID NO: 588994
aaucaucuuuggguggaga

SEQ ID NO: 903703 - RNA, 19 nt, Artificial Sequence
  Description of Artificial Sequence: Synthetic oligonucleotide
  Antisense strand to SEQ ID NO: 903702
ucuccacccaaagaugauu

SEQ ID NO: 903704 - RNA, 19 nt, Artificial Sequence
  Description of Artificial Sequence: Synthetic oligonucleotide
  Sense strand starting at position 1984 of SEQ ID NO: 588994
cuagauccucguuagaugu

SEQ ID NO: 903705 - RNA, 19 nt, Artificial Sequence
  Description of Artificial Sequence: Synthetic oligonucleotide
  Antisense strand to SEQ ID NO: 903704
acaucuaacgaggaucuag

SEQ ID NO: 903706 - RNA, 19 nt, Artificial Sequence
  Description of Artificial Sequence: Synthetic oligonucleotide
  Sense strand starting at position 2233 of SEQ ID NO: 588994
cccaguggaucugucacaa

SEQ ID NO: 903707 - RNA, 19 nt, Artificial Sequence
  Description of Artificial Sequence: Synthetic oligonucleotide
  Antisense strand to SEQ ID NO: 903706
uugugacagauccacuggg

SEQ ID NO: 903708 - RNA, 19 nt, Artificial Sequence
  Description of Artificial Sequence: Synthetic oligonucleotide
  Sense strand starting at position 2357 of SEQ ID NO: 588994
acagacauccuuuguagua

SEQ ID NO: 903709 - RNA, 19 nt, Artificial Sequence
  Description of Artificial Sequence: Synthetic oligonucleotide
  Antisense strand to SEQ ID NO: 903708
uacuacaaaggaugucugu

SEQ ID NO: 903710 - RNA, 19 nt, Artificial Sequence
  Description of Artificial Sequence: Synthetic oligonucleotide
  Sense strand starting at position 2405 of SEQ ID NO: 588994
gcgugaggagaucagagau

SEQ ID NO: 903711 - RNA, 19 nt, Artificial Sequence
  Description of Artificial Sequence: Synthetic oligonucleotide
  Antisense strand to SEQ ID NO: 903710
aucucugaucuccucacgc

SEQ ID NO: 903712 - RNA, 19 nt, Artificial Sequence
  Description of Artificial Sequence: Synthetic oligonucleotide
  Sense strand starting at position 2453 of SEQ ID NO: 588994
ugacuuauugggcauguca

SEQ ID NO: 903713 - RNA, 19 nt, Artificial Sequence
  Description of Artificial Sequence: Synthetic oligonucleotide
  Antisense strand to SEQ ID NO: 903712
ugacaugcccaauaaguca

SEQ ID NO: 903714 - RNA, 19 nt, Artificial Sequence
  Description of Artificial Sequence: Synthetic oligonucleotide
  Sense strand starting at position 2455 of SEQ ID NO: 588994
acuuauugggcaugucaag

SEQ ID NO: 903715 - RNA, 19 nt, Artificial Sequence
  Description of Artificial Sequence: Synthetic oligonucleotide
  Antisense strand to SEQ ID NO: 903714
cuugacaugcccaauaagu

SEQ ID NO: 903716 - RNA, 19 nt, Artificial Sequence
  Description of Artificial Sequence: Synthetic oligonucleotide
  Sense strand starting at position 2485 of SEQ ID NO: 588994
uuaucuaugcaaugggaau

SEQ ID NO: 903717 - RNA, 19 nt, Artificial Sequence
  Description of Artificial Sequence: Synthetic oligonucleotide
  Antisense strand to SEQ ID NO: 903716
auucccauugcauagauaa

SEQ ID NO: 903718 - RNA, 19 nt, Artificial Sequence
  Description of Artificial Sequence: Synthetic oligonucleotide
  Sense strand starting at position 2647 of SEQ ID NO: 588994
gguggauuccucuggauag

SEQ ID NO: 903719 - RNA, 19 nt, Artificial Sequence
  Description of Artificial Sequence: Synthetic oligonucleotide
  Antisense strand to SEQ ID NO: 903718
cuauccagaggaauccacc

SEQ ID NO: 903720 - RNA, 19 nt, Artificial Sequence
  Description of Artificial Sequence: Synthetic oligonucleotide
  Sense strand starting at position 2651 of SEQ ID NO: 588994
gauuccucuggauaggcau

SEQ ID NO: 903721 - RNA, 19 nt, Artificial Sequence
  Description of Artificial Sequence: Synthetic oligonucleotide
  Antisense strand to SEQ ID NO: 903720
augccuauccagaggaauc

SEQ ID NO: 903722 - RNA, 19 nt, Artificial Sequence
  Description of Artificial Sequence: Synthetic oligonucleotide
  Sense strand starting at position 2860 of SEQ ID NO: 588994
cagagaguaguugggacua

SEQ ID NO: 903723 - RNA, 19 nt, Artificial Sequence
  Description of Artificial Sequence: Synthetic oligonucleotide
  Antisense strand to SEQ ID NO: 903722
uagucccaacuacucucug

SEQ ID NO: 903724 - RNA, 19 nt, Artificial Sequence
  Description of Artificial Sequence: Synthetic oligonucleotide
  Sense strand starting at position 3070 of SEQ ID NO: 588994
cuaggcagucuugauuaag

SEQ ID NO: 903725 - RNA, 19 nt, Artificial Sequence
  Description of Artificial Sequence: Synthetic oligonucleotide
  Antisense strand to SEQ ID NO: 903724
cuuaaucaagacugccuag

SEQ ID NO: 903726 - RNA, 19 nt, Artificial Sequence
  Description of Artificial Sequence: Synthetic oligonucleotide
  Sense strand starting at position 3073 of SEQ ID NO: 588994
ggcagucuugauuaagguu

SEQ ID NO: 903727 - RNA, 19 nt, Artificial Sequence
  Description of Artificial Sequence: Synthetic oligonucleotide
  Antisense strand to SEQ ID NO: 903726
aaccuuaaucaagacugcc

SEQ ID NO: 903728 - RNA, 19 nt, Artificial Sequence
  Description of Artificial Sequence: Synthetic oligonucleotide
  Sense strand starting at position 3085 of SEQ ID NO: 588994
uaagguuguggucagugau

SEQ ID NO: 903729 - RNA, 19 nt, Artificial Sequence
  Description of Artificial Sequence: Synthetic oligonucleotide
  Antisense strand to SEQ ID NO: 903728
aucacugaccacaaccuua

SEQ ID NO: 903730 - RNA, 19 nt, Artificial Sequence
  Description of Artificial Sequence: Synthetic oligonucleotide
  Sense strand starting at position 3306 of SEQ ID NO: 588994
cucauuucucaaugugguu

SEQ ID NO: 903731 - RNA, 19 nt, Artificial Sequence
  Description of Artificial Sequence: Synthetic oligonucleotide
  Antisense strand to SEQ ID NO: 903730
aaccacauugagaaaugag

SEQ ID NO: 903732 - RNA, 19 nt, Artificial Sequence
  Description of Artificial Sequence: Synthetic oligonucleotide
  Sense strand starting at position 3661 of SEQ ID NO: 588994
cccuaagugcuaggcauuu

SEQ ID NO: 903733 - RNA, 19 nt, Artificial Sequence
  Description of Artificial Sequence: Synthetic oligonucleotide
  Antisense strand to SEQ ID NO: 903732
aaaugccuagcacuuaggg

SEQ ID NO: 903734 - RNA, 19 nt, Artificial Sequence
  Description of Artificial Sequence: Synthetic oligonucleotide
  Sense strand starting at position 3673 of SEQ ID NO: 588994
ggcauuuguuguucuucua

SEQ ID NO: 903735 - RNA, 19 nt, Artificial Sequence
  Description of Artificial Sequence: Synthetic oligonucleotide
  Antisense strand to SEQ ID NO: 903734
uagaagaacaacaaaugcc

SEQ ID NO: 903736 - RNA, 19 nt, Artificial Sequence
  Description of Artificial Sequence: Synthetic oligonucleotide
  Sense strand starting at position 3680 of SEQ ID NO: 588994
guuguucuucuauaaacac

SEQ ID NO: 903737 - RNA, 19 nt, Artificial Sequence
  Description of Artificial Sequence: Synthetic oligonucleotide
  Antisense strand to SEQ ID NO: 903736
guguuuauagaagaacaac

SEQ ID NO: 903738 - RNA, 19 nt, Artificial Sequence
  Description of Artificial Sequence: Synthetic oligonucleotide
  Sense strand starting at position 3738 of SEQ ID NO: 588994
agcguuaaucuguaaacag

SEQ ID NO: 903739 - RNA, 19 nt, Artificial Sequence
  Description of Artificial Sequence: Synthetic oligonucleotide
  Antisense strand to SEQ ID NO: 903738
cuguuuacagauuaacgcu

SEQ ID NO: 903740 - RNA, 19 nt, Artificial Sequence
  Description of Artificial Sequence: Synthetic oligonucleotide
  Sense strand starting at position 3766 of SEQ ID NO: 588994
ucugaaagcucuucuaagg

SEQ ID NO: 903741 - RNA, 19 nt, Artificial Sequence
  Description of Artificial Sequence: Synthetic oligonucleotide
  Antisense strand to SEQ ID NO: 903740
ccuuagaagagcuuucaga

SEQ ID NO: 903742 - RNA, 19 nt, Artificial Sequence
  Description of Artificial Sequence: Synthetic oligonucleotide
  Sense strand starting at position 3851 of SEQ ID NO: 588994
gucagagaguucucagaaa

SEQ ID NO: 903743 - RNA, 19 nt, Artificial Sequence
  Description of Artificial Sequence: Synthetic oligonucleotide
  Antisense strand to SEQ ID NO: 903742
uuucugagaacucucugac

SEQ ID NO: 903744 - RNA, 19 nt, Artificial Sequence
  Description of Artificial Sequence: Synthetic oligonucleotide
  Sense strand starting at position 3904 of SEQ ID NO: 588994
acucaagauuuguaagaag

SEQ ID NO: 903745 - RNA, 19 nt, Artificial Sequence
  Description of Artificial Sequence: Synthetic oligonucleotide
  Antisense strand to SEQ ID NO: 903744
cuucuuacaaaucuugagu

SEQ ID NO: 903746 - RNA, 19 nt, Artificial Sequence
  Description of Artificial Sequence: Synthetic oligonucleotide
  Sense strand starting at position 3907 of SEQ ID NO: 588994
caagauuuguaagaagucu

SEQ ID NO: 903747 - RNA, 19 nt, Artificial Sequence
  Description of Artificial Sequence: Synthetic oligonucleotide
  Antisense strand to SEQ ID NO: 903746
agacuucuuacaaaucuug

SEQ ID NO: 903748 - RNA, 19 nt, Artificial Sequence
  Description of Artificial Sequence: Synthetic oligonucleotide
  Sense strand starting at position 3913 of SEQ ID NO: 588994
uuguaagaagucuaccauc

SEQ ID NO: 903749 - RNA, 19 nt, Artificial Sequence
  Description of Artificial Sequence: Synthetic oligonucleotide
  Antisense strand to SEQ ID NO: 903748
gaugguagacuucuuacaa

SEQ ID NO: 903750 - RNA, 19 nt, Artificial Sequence
  Description of Artificial Sequence: Synthetic oligonucleotide
  Sense strand starting at position 3948 of SEQ ID NO: 588994
uugguaaaccuacauguua

SEQ ID NO: 903751 - RNA, 19 nt, Artificial Sequence
  Description of Artificial Sequence: Synthetic oligonucleotide
  Antisense strand to SEQ ID NO: 903750
uaacauguagguuuaccaa

SEQ ID NO: 903752 - RNA, 19 nt, Artificial Sequence
  Description of Artificial Sequence: Synthetic oligonucleotide
  Sense strand starting at position 3961 of SEQ ID NO: 588994
auguuaggaugaucauaua

SEQ ID NO: 903753 - RNA, 19 nt, Artificial Sequence
  Description of Artificial Sequence: Synthetic oligonucleotide
  Antisense strand to SEQ ID NO: 903752
uauaugaucauccuaacau

SEQ ID NO: 903754 - RNA, 19 nt, Artificial Sequence
  Description of Artificial Sequence: Synthetic oligonucleotide
  Sense strand starting at position 292 of SEQ ID NO: 588995
gacuucugaugugucacaa

SEQ ID NO: 903755 - RNA, 19 nt, Artificial Sequence
  Description of Artificial Sequence: Synthetic oligonucleotide
  Antisense strand to SEQ ID NO: 903754
uugugacacaucagaaguc

SEQ ID NO: 903756 - RNA, 19 nt, Artificial Sequence
  Description of Artificial Sequence: Synthetic oligonucleotide
  Sense strand starting at position 317 of SEQ ID NO: 588995
aacugaguuauagguagga

SEQ ID NO: 903757 - RNA, 19 nt, Artificial Sequence
  Description of Artificial Sequence: Synthetic oligonucleotide
  Antisense strand to SEQ ID NO: 903756
uccuaccuauaacucaguu

SEQ ID NO: 903758 - RNA, 19 nt, Artificial Sequence
  Description of Artificial Sequence: Synthetic oligonucleotide
  Sense strand starting at position 321 of SEQ ID NO: 588995
gaguuauagguaggauggu

SEQ ID NO: 903759 - RNA, 19 nt, Artificial Sequence
  Description of Artificial Sequence: Synthetic oligonucleotide
  Antisense strand to SEQ ID NO: 903758
accauccuaccuauaacuc

SEQ ID NO: 903760 - RNA, 19 nt, Artificial Sequence
  Description of Artificial Sequence: Synthetic oligonucleotide
  Sense strand starting at position 635 of SEQ ID NO: 588995
uuaccaaaugcuugauagu

SEQ ID NO: 903761 - RNA, 19 nt, Artificial Sequence
  Description of Artificial Sequence: Synthetic oligonucleotide
  Antisense strand to SEQ ID NO: 903760
acuaucaagcauuugguaa

SEQ ID NO: 903762 - RNA, 19 nt, Artificial Sequence
  Description of Artificial Sequence: Synthetic oligonucleotide
  Sense strand starting at position 764 of SEQ ID NO: 588995
ucaccucugguauaaugau

SEQ ID NO: 903763 - RNA, 19 nt, Artificial Sequence
  Description of Artificial Sequence: Synthetic oligonucleotide
  Antisense strand to SEQ ID NO: 903762
aucauuauaccagagguga

SEQ ID NO: 903764 - RNA, 19 nt, Artificial Sequence
  Description of Artificial Sequence: Synthetic oligonucleotide
  Sense strand starting at position 770 of SEQ ID NO: 588995
cugguauaaugaucucaaa

SEQ ID NO: 903765 - RNA, 19 nt, Artificial Sequence
  Description of Artificial Sequence: Synthetic oligonucleotide
  Antisense strand to SEQ ID NO: 903764
uuugagaucauuauaccag

SEQ ID NO: 903766 - RNA, 19 nt, Artificial Sequence
  Description of Artificial Sequence: Synthetic oligonucleotide
  Sense strand starting at position 802 of SEQ ID NO: 588995
cuugucuaucaagacaagu

SEQ ID NO: 903767 - RNA, 19 nt, Artificial Sequence
  Description of Artificial Sequence: Synthetic oligonucleotide
  Antisense strand to SEQ ID NO: 903766
acuugucuugauagacaag

SEQ ID NO: 903768 - RNA, 19 nt, Artificial Sequence
  Description of Artificial Sequence: Synthetic oligonucleotide
  Sense strand starting at position 982 of SEQ ID NO: 588995
uuaucaguccuguaagaac

SEQ ID NO: 903769 - RNA, 19 nt, Artificial Sequence
  Description of Artificial Sequence: Synthetic oligonucleotide
  Antisense strand to SEQ ID NO: 903768
guucuuacaggacugauaa

SEQ ID NO: 903770 - RNA, 19 nt, Artificial Sequence
  Description of Artificial Sequence: Synthetic oligonucleotide
  Sense strand starting at position 1005 of SEQ ID NO: 588995
agcagaugacagugaaaca

SEQ ID NO: 903771 - RNA, 19 nt, Artificial Sequence
  Description of Artificial Sequence: Synthetic oligonucleotide
  Antisense strand to SEQ ID NO: 903770
uguuucacugucaucugcu

SEQ ID NO: 903772 - RNA, 19 nt, Artificial Sequence
  Description of Artificial Sequence: Synthetic oligonucleotide
  Sense strand starting at position 1052 of SEQ ID NO: 588995
uugaauaacucguuuccca

SEQ ID NO: 903773 - RNA, 19 nt, Artificial Sequence
  Description of Artificial Sequence: Synthetic oligonucleotide
  Antisense strand to SEQ ID NO: 903772
ugggaaacgaguuauucaa

SEQ ID NO: 903774 - RNA, 19 nt, Artificial Sequence
  Description of Artificial Sequence: Synthetic oligonucleotide
  Sense strand starting at position 1117 of SEQ ID NO: 588995
aaaugauguguaugacuag

SEQ ID NO: 903775 - RNA, 19 nt, Artificial Sequence
  Description of Artificial Sequence: Synthetic oligonucleotide
  Antisense strand to SEQ ID NO: 903774
cuagucauacacaucauuu

SEQ ID NO: 903776 - RNA, 19 nt, Artificial Sequence
  Description of Artificial Sequence: Synthetic oligonucleotide
  Sense strand starting at position 1120 of SEQ ID NO: 588995
ugauguguaugacuagaac

SEQ ID NO: 903777 - RNA, 19 nt, Artificial Sequence
  Description of Artificial Sequence: Synthetic oligonucleotide
  Antisense strand to SEQ ID NO: 903776
guucuagucauacacauca

SEQ ID NO: 903778 - RNA, 19 nt, Artificial Sequence
  Description of Artificial Sequence: Synthetic oligonucleotide
  Sense strand starting at position 1123 of SEQ ID NO: 588995
uguguaugacuagaacauc

SEQ ID NO: 903779 - RNA, 19 nt, Artificial Sequence
  Description of Artificial Sequence: Synthetic oligonucleotide
  Antisense strand to SEQ ID NO: 903778
gauguucuagucauacaca

SEQ ID NO: 903780 - RNA, 19 nt, Artificial Sequence
  Description of Artificial Sequence: Synthetic oligonucleotide
  Sense strand starting at position 1263 of SEQ ID NO: 588995
ccuguaaaccgguggagau

SEQ ID NO: 903781 - RNA, 19 nt, Artificial Sequence
  Description of Artificial Sequence: Synthetic oligonucleotide
  Antisense strand to SEQ ID NO: 903780
aucuccaccgguuuacagg

SEQ ID NO: 903782 - RNA, 19 nt, Artificial Sequence
  Description of Artificial Sequence: Synthetic oligonucleotide
  Sense strand starting at position 1310 of SEQ ID NO: 588995
ggauuacugccaggaugaa

SEQ ID NO: 903783 - RNA, 19 nt, Artificial Sequence
  Description of Artificial Sequence: Synthetic oligonucleotide
  Antisense strand to SEQ ID NO: 903782
uucauccuggcaguaaucc

SEQ ID NO: 903784 - RNA, 19 nt, Artificial Sequence
  Description of Artificial Sequence: Synthetic oligonucleotide
  Sense strand starting at position 1457 of SEQ ID NO: 588995
agccgaagaacagauguua

SEQ ID NO: 903785 - RNA, 19 nt, Artificial Sequence
  Description of Artificial Sequence: Synthetic oligonucleotide
  Antisense strand to SEQ ID NO: 903784
uaacaucuguucuucggcu

SEQ ID NO: 903786 - RNA, 19 nt, Artificial Sequence
  Description of Artificial Sequence: Synthetic oligonucleotide
  Sense strand starting at position 1537 of SEQ ID NO: 588995
gagcauauguucuuaucag

SEQ ID NO: 903787 - RNA, 19 nt, Artificial Sequence
  Description of Artificial Sequence: Synthetic oligonucleotide
  Antisense strand to SEQ ID NO: 903786
cugauaagaacauaugcuc

SEQ ID NO: 903788 - RNA, 19 nt, Artificial Sequence
  Description of Artificial Sequence: Synthetic oligonucleotide
  Sense strand starting at position 1561 of SEQ ID NO: 588995
gcugaaaugagcuaacguu

SEQ ID NO: 903789 - RNA, 19 nt, Artificial Sequence
  Description of Artificial Sequence: Synthetic oligonucleotide
  Antisense strand to SEQ ID NO: 903788
aacguuagcucauuucagc

SEQ ID NO: 903790 - RNA, 19 nt, Artificial Sequence
  Description of Artificial Sequence: Synthetic oligonucleotide
  Sense strand starting at position 1582 of SEQ ID NO: 588995
cuaagcugccuggacuauu

SEQ ID NO: 903791 - RNA, 19 nt, Artificial Sequence
  Description of Artificial Sequence: Synthetic oligonucleotide
  Antisense strand to SEQ ID NO: 903790
aauaguccaggcagcuuag

SEQ ID NO: 903792 - RNA, 19 nt, Artificial Sequence
  Description of Artificial Sequence: Synthetic oligonucleotide
  Sense strand starting at position 1590 of SEQ ID NO: 588995
ccuggacuauuccugaaau

SEQ ID NO: 903793 - RNA, 19 nt, Artificial Sequence
  Description of Artificial Sequence: Synthetic oligonucleotide
  Antisense strand to SEQ ID NO: 903792
auuucaggaauaguccagg

SEQ ID NO: 903794 - RNA, 19 nt, Artificial Sequence
  Description of Artificial Sequence: Synthetic oligonucleotide
  Sense strand starting at position 1635 of SEQ ID NO: 588995
ucauacacagugugagaaa

SEQ ID NO: 903795 - RNA, 19 nt, Artificial Sequence
  Description of Artificial Sequence: Synthetic oligonucleotide
  Antisense strand to SEQ ID NO: 903794
uuucucacacuguguauga

SEQ ID NO: 903796 - RNA, 19 nt, Artificial Sequence
  Description of Artificial Sequence: Synthetic oligonucleotide
  Sense strand starting at position 2292 of SEQ ID NO: 588995
ggauaaucaucuuugggug

SEQ ID NO: 903797 - RNA, 19 nt, Artificial Sequence
  Description of Artificial Sequence: Synthetic oligonucleotide
  Antisense strand to SEQ ID NO: 903796
cacccaaagaugauuaucc

SEQ ID NO: 903798 - RNA, 19 nt, Artificial Sequence
  Description of Artificial Sequence: Synthetic oligonucleotide
  Sense strand starting at position 2296 of SEQ ID NO: 588995
aaucaucuuuggguggaga

SEQ ID NO: 903799 - RNA, 19 nt, Artificial Sequence
  Description of Artificial Sequence: Synthetic oligonucleotide
  Antisense strand to SEQ ID NO: 903798
ucuccacccaaagaugauu

SEQ ID NO: 903800 - RNA, 19 nt, Artificial Sequence
  Description of Artificial Sequence: Synthetic oligonucleotide
  Sense strand starting at position 2354 of SEQ ID NO: 588995
auucuagauccucguuaga

SEQ ID NO: 903801 - RNA, 19 nt, Artificial Sequence
  Description of Artificial Sequence: Synthetic oligonucleotide
  Antisense strand to SEQ ID NO: 903800
ucuaacgaggaucuagaau

SEQ ID NO: 903802 - RNA, 19 nt, Artificial Sequence
  Description of Artificial Sequence: Synthetic oligonucleotide
  Sense strand starting at position 2356 of SEQ ID NO: 588995
ucuagauccucguuagaug

SEQ ID NO: 903803 - RNA, 19 nt, Artificial Sequence
  Description of Artificial Sequence: Synthetic oligonucleotide
  Antisense strand to SEQ ID NO: 903802
caucuaacgaggaucuaga

SEQ ID NO: 903804 - RNA, 19 nt, Artificial Sequence
  Description of Artificial Sequence: Synthetic oligonucleotide
  Sense strand starting at position 2357 of SEQ ID NO: 588995
cuagauccucguuagaugu

SEQ ID NO: 903805 - RNA, 19 nt, Artificial Sequence
  Description of Artificial Sequence: Synthetic oligonucleotide
  Antisense strand to SEQ ID NO: 903804
acaucuaacgaggaucuag

SEQ ID NO: 903806 - RNA, 19 nt, Artificial Sequence
  Description of Artificial Sequence: Synthetic oligonucleotide
  Sense strand starting at position 2606 of SEQ ID NO: 588995
cccaguggaucugucacaa

SEQ ID NO: 903807 - RNA, 19 nt, Artificial Sequence
  Description of Artificial Sequence: Synthetic oligonucleotide
  Antisense strand to SEQ ID NO: 903806
uugugacagauccacuggg

SEQ ID NO: 903808 - RNA, 19 nt, Artificial Sequence
  Description of Artificial Sequence: Synthetic oligonucleotide
  Sense strand starting at position 2716 of SEQ ID NO: 588995
uggccacugucaucacaga

SEQ ID NO: 903809 - RNA, 19 nt, Artificial Sequence
  Description of Artificial Sequence: Synthetic oligonucleotide
  Antisense strand to SEQ ID NO: 903808
ucugugaugacaguggcca

SEQ ID NO: 903810 - RNA, 19 nt, Artificial Sequence
  Description of Artificial Sequence: Synthetic oligonucleotide
  Sense strand starting at position 2730 of SEQ ID NO: 588995
acagacauccuuuguagua

SEQ ID NO: 903811 - RNA, 19 nt, Artificial Sequence
  Description of Artificial Sequence: Synthetic oligonucleotide
  Antisense strand to SEQ ID NO: 903810
uacuacaaaggaugucugu

SEQ ID NO: 903812 - RNA, 19 nt, Artificial Sequence
  Description of Artificial Sequence: Synthetic oligonucleotide
  Sense strand starting at position 2778 of SEQ ID NO: 588995
gcgugaggagaucagagau

SEQ ID NO: 903813 - RNA, 19 nt, Artificial Sequence
  Description of Artificial Sequence: Synthetic oligonucleotide
  Antisense strand to SEQ ID NO: 903812
aucucugaucuccucacgc

SEQ ID NO: 903814 - RNA, 19 nt, Artificial Sequence
  Description of Artificial Sequence: Synthetic oligonucleotide
  Sense strand starting at position 2826 of SEQ ID NO: 588995
ugacuuauugggcauguca

SEQ ID NO: 903815 - RNA, 19 nt, Artificial Sequence
  Description of Artificial Sequence: Synthetic oligonucleotide
  Antisense strand to SEQ ID NO: 903814
ugacaugcccaauaaguca

SEQ ID NO: 903816 - RNA, 19 nt, Artificial Sequence
  Description of Artificial Sequence: Synthetic oligonucleotide
  Sense strand starting at position 2828 of SEQ ID NO: 588995
acuuauugggcaugucaag

SEQ ID NO: 903817 - RNA, 19 nt, Artificial Sequence
  Description of Artificial Sequence: Synthetic oligonucleotide
  Antisense strand to SEQ ID NO: 903816
cuugacaugcccaauaagu

SEQ ID NO: 903818 - RNA, 19 nt, Artificial Sequence
  Description of Artificial Sequence: Synthetic oligonucleotide
  Sense strand starting at position 2858 of SEQ ID NO: 588995
uuaucuaugcaaugggaau

SEQ ID NO: 903819 - RNA, 19 nt, Artificial Sequence
  Description of Artificial Sequence: Synthetic oligonucleotide
  Antisense strand to SEQ ID NO: 903818
auucccauugcauagauaa

SEQ ID NO: 903820 - RNA, 19 nt, Artificial Sequence
  Description of Artificial Sequence: Synthetic oligonucleotide
  Sense strand starting at position 3020 of SEQ ID NO: 588995
gguggauuccucuggauag

SEQ ID NO: 903821 - RNA, 19 nt, Artificial Sequence
  Description of Artificial Sequence: Synthetic oligonucleotide
  Antisense strand to SEQ ID NO: 903820
cuauccagaggaauccacc

SEQ ID NO: 903822 - RNA, 19 nt, Artificial Sequence
  Description of Artificial Sequence: Synthetic oligonucleotide
  Sense strand starting at position 3024 of SEQ ID NO: 588995
gauuccucuggauaggcau

SEQ ID NO: 903823 - RNA, 19 nt, Artificial Sequence
  Description of Artificial Sequence: Synthetic oligonucleotide
  Antisense strand to SEQ ID NO: 903822
augccuauccagaggaauc

SEQ ID NO: 903824 - RNA, 19 nt, Artificial Sequence
  Description of Artificial Sequence: Synthetic oligonucleotide
  Sense strand starting at position 3233 of SEQ ID NO: 588995
cagagaguaguugggacua

SEQ ID NO: 903825 - RNA, 19 nt, Artificial Sequence
  Description of Artificial Sequence: Synthetic oligonucleotide
  Antisense strand to SEQ ID NO: 903824
uagucccaacuacucucug

SEQ ID NO: 903826 - RNA, 19 nt, Artificial Sequence
  Description of Artificial Sequence: Synthetic oligonucleotide
  Sense strand starting at position 3443 of SEQ ID NO: 588995
cuaggcagucuugauuaag

SEQ ID NO: 903827 - RNA, 19 nt, Artificial Sequence
  Description of Artificial Sequence: Synthetic oligonucleotide
  Antisense strand to SEQ ID NO: 903826
cuuaaucaagacugccuag

SEQ ID NO: 903828 - RNA, 19 nt, Artificial Sequence
  Description of Artificial Sequence: Synthetic oligonucleotide
  Sense strand starting at position 3446 of SEQ ID NO: 588995
ggcagucuugauuaagguu

SEQ ID NO: 903829 - RNA, 19 nt, Artificial Sequence
  Description of Artificial Sequence: Synthetic oligonucleotide
  Antisense strand to SEQ ID NO: 903828
aaccuuaaucaagacugcc

SEQ ID NO: 903830 - RNA, 19 nt, Artificial Sequence
  Description of Artificial Sequence: Synthetic oligonucleotide
  Sense strand starting at position 3458 of SEQ ID NO: 588995
uaagguuguggucagugau

SEQ ID NO: 903831 - RNA, 19 nt, Artificial Sequence
  Description of Artificial Sequence: Synthetic oligonucleotide
  Antisense strand to SEQ ID NO: 903830
aucacugaccacaaccuua

SEQ ID NO: 903832 - RNA, 19 nt, Artificial Sequence
  Description of Artificial Sequence: Synthetic oligonucleotide
  Sense strand starting at position 3679 of SEQ ID NO: 588995
cucauuucucaaugugguu

SEQ ID NO: 903833 - RNA, 19 nt, Artificial Sequence
  Description of Artificial Sequence: Synthetic oligonucleotide
  Antisense strand to SEQ ID NO: 903832
aaccacauugagaaaugag

SEQ ID NO: 903834 - RNA, 19 nt, Artificial Sequence
  Description of Artificial Sequence: Synthetic oligonucleotide
  Sense strand starting at position 17 of SEQ ID NO: 588996
ucaccucugguauaaugau

SEQ ID NO: 903835 - RNA, 19 nt, Artificial Sequence
  Description of Artificial Sequence: Synthetic oligonucleotide
  Antisense strand to SEQ ID NO: 903834
aucauuauaccagagguga

SEQ ID NO: 903836 - RNA, 19 nt, Artificial Sequence
  Description of Artificial Sequence: Synthetic oligonucleotide
  Sense strand starting at position 23 of SEQ ID NO: 588996
cugguauaaugaucucaaa

SEQ ID NO: 903837 - RNA, 19 nt, Artificial Sequence
  Description of Artificial Sequence: Synthetic oligonucleotide
  Antisense strand to SEQ ID NO: 903836
uuugagaucauuauaccag

SEQ ID NO: 903838 - RNA, 19 nt, Artificial Sequence
  Description of Artificial Sequence: Synthetic oligonucleotide
  Sense strand starting at position 55 of SEQ ID NO: 588996
cuugucuaucaagacaagu

SEQ ID NO: 903839 - RNA, 19 nt, Artificial Sequence
  Description of Artificial Sequence: Synthetic oligonucleotide
  Antisense strand to SEQ ID NO: 903838
acuugucuugauagacaag

SEQ ID NO: 903840 - RNA, 19 nt, Artificial Sequence
  Description of Artificial Sequence: Synthetic oligonucleotide
  Sense strand starting at position 235 of SEQ ID NO: 588996
uuaucaguccuguaagaac

SEQ ID NO: 903841 - RNA, 19 nt, Artificial Sequence
  Description of Artificial Sequence: Synthetic oligonucleotide
  Antisense strand to SEQ ID NO: 903840
guucuuacaggacugauaa

SEQ ID NO: 903842 - RNA, 19 nt, Artificial Sequence
  Description of Artificial Sequence: Synthetic oligonucleotide
  Sense strand starting at position 258 of SEQ ID NO: 588996
agcagaugacagugaaaca

SEQ ID NO: 903843 - RNA, 19 nt, Artificial Sequence
  Description of Artificial Sequence: Synthetic oligonucleotide
  Antisense strand to SEQ ID NO: 903842
uguuucacugucaucugcu

SEQ ID NO: 903844 - RNA, 19 nt, Artificial Sequence
  Description of Artificial Sequence: Synthetic oligonucleotide
  Sense strand starting at position 370 of SEQ ID NO: 588996
aaaugauguguaugacuag

SEQ ID NO: 903845 - RNA, 19 nt, Artificial Sequence
  Description of Artificial Sequence: Synthetic oligonucleotide
  Antisense strand to SEQ ID NO: 903844
cuagucauacacaucauuu

SEQ ID NO: 903846 - RNA, 19 nt, Artificial Sequence
  Description of Artificial Sequence: Synthetic oligonucleotide
  Sense strand starting at position 373 of SEQ ID NO: 588996
ugauguguaugacuagaac

SEQ ID NO: 903847 - RNA, 19 nt, Artificial Sequence
  Description of Artificial Sequence: Synthetic oligonucleotide
  Antisense strand to SEQ ID NO: 903846
guucuagucauacacauca

SEQ ID NO: 903848 - RNA, 19 nt, Artificial Sequence
  Description of Artificial Sequence: Synthetic oligonucleotide
  Sense strand starting at position 376 of SEQ ID NO: 588996
uguguaugacuagaacauc

SEQ ID NO: 903849 - RNA, 19 nt, Artificial Sequence
  Description of Artificial Sequence: Synthetic oligonucleotide
  Antisense strand to SEQ ID NO: 903848
gauguucuagucauacaca

SEQ ID NO: 903850 - RNA, 19 nt, Artificial Sequence
  Description of Artificial Sequence: Synthetic oligonucleotide
  Sense strand starting at position 563 of SEQ ID NO: 588996
ggauuacugccaggaugaa

SEQ ID NO: 903851 - RNA, 19 nt, Artificial Sequence
  Description of Artificial Sequence: Synthetic oligonucleotide
  Antisense strand to SEQ ID NO: 903850
uucauccuggcaguaaucc

SEQ ID NO: 903852 - RNA, 19 nt, Artificial Sequence
  Description of Artificial Sequence: Synthetic oligonucleotide
  Sense strand starting at position 710 of SEQ ID NO: 588996
agccgaagaacagauguua

SEQ ID NO: 903853 - RNA, 19 nt, Artificial Sequence
  Description of Artificial Sequence: Synthetic oligonucleotide
  Antisense strand to SEQ ID NO: 903852
uaacaucuguucuucggcu

SEQ ID NO: 903854 - RNA, 19 nt, Artificial Sequence
  Description of Artificial Sequence: Synthetic oligonucleotide
  Sense strand starting at position 835 of SEQ ID NO: 588996
cuaagcugccuggacuauu

SEQ ID NO: 903855 - RNA, 19 nt, Artificial Sequence
  Description of Artificial Sequence: Synthetic oligonucleotide
  Antisense strand to SEQ ID NO: 903854
aauaguccaggcagcuuag

SEQ ID NO: 903856 - RNA, 19 nt, Artificial Sequence
  Description of Artificial Sequence: Synthetic oligonucleotide
  Sense strand starting at position 843 of SEQ ID NO: 588996
ccuggacuauuccugaaau

SEQ ID NO: 903857 - RNA, 19 nt, Artificial Sequence
  Description of Artificial Sequence: Synthetic oligonucleotide
  Antisense strand to SEQ ID NO: 903856
auuucaggaauaguccagg

SEQ ID NO: 903858 - RNA, 19 nt, Artificial Sequence
  Description of Artificial Sequence: Synthetic oligonucleotide
  Sense strand starting at position 888 of SEQ ID NO: 588996
ucauacacagugugagaaa

SEQ ID NO: 903859 - RNA, 19 nt, Artificial Sequence
  Description of Artificial Sequence: Synthetic oligonucleotide
  Antisense strand to SEQ ID NO: 903858
uuucucacacuguguauga

SEQ ID NO: 903860 - RNA, 19 nt, Artificial Sequence
  Description of Artificial Sequence: Synthetic oligonucleotide
  Sense strand starting at position 1545 of SEQ ID NO: 588996
ggauaaucaucuuugggug

SEQ ID NO: 903861 - RNA, 19 nt, Artificial Sequence
  Description of Artificial Sequence: Synthetic oligonucleotide
  Antisense strand to SEQ ID NO: 903860
cacccaaagaugauuaucc

SEQ ID NO: 903862 - RNA, 19 nt, Artificial Sequence
  Description of Artificial Sequence: Synthetic oligonucleotide
  Sense strand starting at position 1549 of SEQ ID NO: 588996
aaucaucuuuggguggaga

SEQ ID NO: 903863 - RNA, 19 nt, Artificial Sequence
  Description of Artificial Sequence: Synthetic oligonucleotide
  Antisense strand to SEQ ID NO: 903862
ucuccacccaaagaugauu

SEQ ID NO: 903864 - RNA, 19 nt, Artificial Sequence
  Description of Artificial Sequence: Synthetic oligonucleotide
  Sense strand starting at position 1859 of SEQ ID NO: 588996
cccaguggaucugucacaa

SEQ ID NO: 903865 - RNA, 19 nt, Artificial Sequence
  Description of Artificial Sequence: Synthetic oligonucleotide
  Antisense strand to SEQ ID NO: 903864
uugugacagauccacuggg

SEQ ID NO: 903866 - RNA, 19 nt, Artificial Sequence
  Description of Artificial Sequence: Synthetic oligonucleotide
  Sense strand starting at position 1983 of SEQ ID NO: 588996
acagacauccuuuguagua

SEQ ID NO: 903867 - RNA, 19 nt, Artificial Sequence
  Description of Artificial Sequence: Synthetic oligonucleotide
  Antisense strand to SEQ ID NO: 903866
uacuacaaaggaugucugu

SEQ ID NO: 903868 - RNA, 19 nt, Artificial Sequence
  Description of Artificial Sequence: Synthetic oligonucleotide
  Sense strand starting at position 2031 of SEQ ID NO: 588996
gcgugaggagaucagagau

SEQ ID NO: 903869 - RNA, 19 nt, Artificial Sequence
  Description of Artificial Sequence: Synthetic oligonucleotide
  Antisense strand to SEQ ID NO: 903868
aucucugaucuccucacgc

SEQ ID NO: 903870 - RNA, 19 nt, Artificial Sequence
  Description of Artificial Sequence: Synthetic oligonucleotide
  Sense strand starting at position 2079 of SEQ ID NO: 588996
ugacuuauugggcauguca

SEQ ID NO: 903871 - RNA, 19 nt, Artificial Sequence
  Description of Artificial Sequence: Synthetic oligonucleotide
  Antisense strand to SEQ ID NO: 903870
ugacaugcccaauaaguca

SEQ ID NO: 903872 - RNA, 19 nt, Artificial Sequence
  Description of Artificial Sequence: Synthetic oligonucleotide
  Sense strand starting at position 2111 of SEQ ID NO: 588996
uuaucuaugcaaugggaau

SEQ ID NO: 903873 - RNA, 19 nt, Artificial Sequence
  Description of Artificial Sequence: Synthetic oligonucleotide
  Antisense strand to SEQ ID NO: 903872
auucccauugcauagauaa

SEQ ID NO: 903874 - RNA, 19 nt, Artificial Sequence
  Description of Artificial Sequence: Synthetic oligonucleotide
  Sense strand starting at position 2273 of SEQ ID NO: 588996
gguggauuccucuggauag

SEQ ID NO: 903875 - RNA, 19 nt, Artificial Sequence
  Description of Artificial Sequence: Synthetic oligonucleotide
  Antisense strand to SEQ ID NO: 903874
cuauccagaggaauccacc

SEQ ID NO: 903876 - RNA, 19 nt, Artificial Sequence
  Description of Artificial Sequence: Synthetic oligonucleotide
  Sense strand starting at position 2277 of SEQ ID NO: 588996
gauuccucuggauaggcau

SEQ ID NO: 903877 - RNA, 19 nt, Artificial Sequence
  Description of Artificial Sequence: Synthetic oligonucleotide
  Antisense strand to SEQ ID NO: 903876
augccuauccagaggaauc

SEQ ID NO: 903878 - RNA, 19 nt, Artificial Sequence
  Description of Artificial Sequence: Synthetic oligonucleotide
  Sense strand starting at position 2486 of SEQ ID NO: 588996
cagagaguaguugggacua

SEQ ID NO: 903879 - RNA, 19 nt, Artificial Sequence
  Description of Artificial Sequence: Synthetic oligonucleotide
  Antisense strand to SEQ ID NO: 903878
uagucccaacuacucucug

SEQ ID NO: 903880 - RNA, 19 nt, Artificial Sequence
  Description of Artificial Sequence: Synthetic oligonucleotide
  Sense strand starting at position 2696 of SEQ ID NO: 588996
cuaggcagucuugauuaag

SEQ ID NO: 903881 - RNA, 19 nt, Artificial Sequence
  Description of Artificial Sequence: Synthetic oligonucleotide
  Antisense strand to SEQ ID NO: 903880
cuuaaucaagacugccuag

SEQ ID NO: 903882 - RNA, 19 nt, Artificial Sequence
  Description of Artificial Sequence: Synthetic oligonucleotide
  Sense strand starting at position 2699 of SEQ ID NO: 588996
ggcagucuugauuaagguu

SEQ ID NO: 903883 - RNA, 19 nt, Artificial Sequence
  Description of Artificial Sequence: Synthetic oligonucleotide
  Antisense strand to SEQ ID NO: 903882
aaccuuaaucaagacugcc

SEQ ID NO: 903884 - RNA, 19 nt, Artificial Sequence
  Description of Artificial Sequence: Synthetic oligonucleotide
  Sense strand starting at position 2932 of SEQ ID NO: 588996
cucauuucucaaugugguu

SEQ ID NO: 903885 - RNA, 19 nt, Artificial Sequence
  Description of Artificial Sequence: Synthetic oligonucleotide
  Antisense strand to SEQ ID NO: 903884
aaccacauugagaaaugag

SEQ ID NO: 903886 - RNA, 19 nt, Artificial Sequence
  Description of Artificial Sequence: Synthetic oligonucleotide
  Sense strand starting at position 3287 of SEQ ID NO: 588996
cccuaagugcuaggcauuu

SEQ ID NO: 903887 - RNA, 19 nt, Artificial Sequence
  Description of Artificial Sequence: Synthetic oligonucleotide
  Antisense strand to SEQ ID NO: 903886
aaaugccuagcacuuaggg

SEQ ID NO: 903888 - RNA, 19 nt, Artificial Sequence
  Description of Artificial Sequence: Synthetic oligonucleotide
  Sense strand starting at position 3299 of SEQ ID NO: 588996
ggcauuuguuguucuucua

SEQ ID NO: 903889 - RNA, 19 nt, Artificial Sequence
  Description of Artificial Sequence: Synthetic oligonucleotide
  Antisense strand to SEQ ID NO: 903888
uagaagaacaacaaaugcc

SEQ ID NO: 903890 - RNA, 19 nt, Artificial Sequence
  Description of Artificial Sequence: Synthetic oligonucleotide
  Sense strand starting at position 3306 of SEQ ID NO: 588996
guuguucuucuauaaacac

SEQ ID NO: 903891 - RNA, 19 nt, Artificial Sequence
  Description of Artificial Sequence: Synthetic oligonucleotide
  Antisense strand to SEQ ID NO: 903890
guguuuauagaagaacaac

SEQ ID NO: 903892 - RNA, 19 nt, Artificial Sequence
  Description of Artificial Sequence: Synthetic oligonucleotide
  Sense strand starting at position 3364 of SEQ ID NO: 588996
agcguuaaucuguaaacag

SEQ ID NO: 903893 - RNA, 19 nt, Artificial Sequence
  Description of Artificial Sequence: Synthetic oligonucleotide
  Antisense strand to SEQ ID NO: 903892
cuguuuacagauuaacgcu

SEQ ID NO: 903894 - RNA, 19 nt, Artificial Sequence
  Description of Artificial Sequence: Synthetic oligonucleotide
  Sense strand starting at position 3392 of SEQ ID NO: 588996
ucugaaagcucuucuaagg

SEQ ID NO: 903895 - RNA, 19 nt, Artificial Sequence
  Description of Artificial Sequence: Synthetic oligonucleotide
  Antisense strand to SEQ ID NO: 903894
ccuuagaagagcuuucaga

SEQ ID NO: 903896 - RNA, 19 nt, Artificial Sequence
  Description of Artificial Sequence: Synthetic oligonucleotide
  Sense strand starting at position 3477 of SEQ ID NO: 588996
gucagagaguucucagaaa

SEQ ID NO: 903897 - RNA, 19 nt, Artificial Sequence
  Description of Artificial Sequence: Synthetic oligonucleotide
  Antisense strand to SEQ ID NO: 903896
uuucugagaacucucugac

SEQ ID NO: 903898 - RNA, 19 nt, Artificial Sequence
  Description of Artificial Sequence: Synthetic oligonucleotide
  Sense strand starting at position 3530 of SEQ ID NO: 588996
acucaagauuuguaagaag

SEQ ID NO: 903899 - RNA, 19 nt, Artificial Sequence
  Description of Artificial Sequence: Synthetic oligonucleotide
  Antisense strand to SEQ ID NO: 903898
cuucuuacaaaucuugagu

SEQ ID NO: 903900 - RNA, 19 nt, Artificial Sequence
  Description of Artificial Sequence: Synthetic oligonucleotide
  Sense strand starting at position 3539 of SEQ ID NO: 588996
uuguaagaagucuaccauc

SEQ ID NO: 903901 - RNA, 19 nt, Artificial Sequence
  Description of Artificial Sequence: Synthetic oligonucleotide
  Antisense strand to SEQ ID NO: 903900
gaugguagacuucuuacaa

SEQ ID NO: 903902 - RNA, 19 nt, Artificial Sequence
  Description of Artificial Sequence: Synthetic oligonucleotide
  Sense strand starting at position 3574 of SEQ ID NO: 588996
uugguaaaccuacauguua

SEQ ID NO: 903903 - RNA, 19 nt, Artificial Sequence
  Description of Artificial Sequence: Synthetic oligonucleotide
  Antisense strand to SEQ ID NO: 903902
uaacauguagguuuaccaa

SEQ ID NO: 903904 - RNA, 19 nt, Artificial Sequence
  Description of Artificial Sequence: Synthetic oligonucleotide
  Sense strand starting at position 3587 of SEQ ID NO: 588996
auguuaggaugaucauaua

SEQ ID NO: 903905 - RNA, 19 nt, Artificial Sequence
  Description of Artificial Sequence: Synthetic oligonucleotide
  Antisense strand to SEQ ID NO: 903904
uauaugaucauccuaacau

SEQ ID NO: 903906 - RNA, 19 nt, Artificial Sequence
  Description of Artificial Sequence: Synthetic oligonucleotide
  Sense strand starting at position 3656 of SEQ ID NO: 588996
augugaagugcuuaaagca

SEQ ID NO: 903907 - RNA, 19 nt, Artificial Sequence
  Description of Artificial Sequence: Synthetic oligonucleotide
  Antisense strand to SEQ ID NO: 903906
ugcuuuaagcacuucacau

SEQ ID NO: 903908 - RNA, 19 nt, Artificial Sequence
  Description of Artificial Sequence: Synthetic oligonucleotide
  Sense strand starting at position 3705 of SEQ ID NO: 588996
guucccaagcuguaucaga

SEQ ID NO: 903909 - RNA, 19 nt, Artificial Sequence
  Description of Artificial Sequence: Synthetic oligonucleotide
  Antisense strand to SEQ ID NO: 903908
ucugauacagcuugggaac

SEQ ID NO: 903910 - RNA, 19 nt, Artificial Sequence
  Description of Artificial Sequence: Synthetic oligonucleotide
  Sense strand starting at position 3839 of SEQ ID NO: 588996
uuuaaucaguugucaaacu

SEQ ID NO: 903911 - RNA, 19 nt, Artificial Sequence
  Description of Artificial Sequence: Synthetic oligonucleotide
  Antisense strand to SEQ ID NO: 903910
aguuugacaacugauuaaa

SEQ ID NO: 903912 - RNA, 19 nt, Artificial Sequence
  Description of Artificial Sequence: Synthetic oligonucleotide
  Sense strand starting at position 3943 of SEQ ID NO: 588996
acucaugauuucgagacca

SEQ ID NO: 903913 - RNA, 19 nt, Artificial Sequence
  Description of Artificial Sequence: Synthetic oligonucleotide
  Antisense strand to SEQ ID NO: 903912
uggucucgaaaucaugagu

SEQ ID NO: 903914 - RNA, 19 nt, Artificial Sequence
  Description of Artificial Sequence: Synthetic oligonucleotide
  Sense strand starting at position 701 of SEQ ID NO: 588997
gcaucaccuugaguggauu

SEQ ID NO: 903915 - RNA, 19 nt, Artificial Sequence
  Description of Artificial Sequence: Synthetic oligonucleotide
  Antisense strand to SEQ ID NO: 903914
aauccacucaaggugaugc

SEQ ID NO: 903916 - RNA, 19 nt, Artificial Sequence
  Description of Artificial Sequence: Synthetic oligonucleotide
  Sense strand starting at position 915 of SEQ ID NO: 588997
cuaggcucauuccuuuaga

SEQ ID NO: 903917 - RNA, 19 nt, Artificial Sequence
  Description of Artificial Sequence: Synthetic oligonucleotide
  Antisense strand to SEQ ID NO: 903916
ucuaaaggaaugagccuag

SEQ ID NO: 903918 - RNA, 19 nt, Artificial Sequence
  Description of Artificial Sequence: Synthetic oligonucleotide
  Sense strand starting at position 918 of SEQ ID NO: 588997
ggcucauuccuuuagauac

SEQ ID NO: 903919 - RNA, 19 nt, Artificial Sequence
  Description of Artificial Sequence: Synthetic oligonucleotide
  Antisense strand to SEQ ID NO: 903918
guaucuaaaggaaugagcc

SEQ ID NO: 903920 - RNA, 19 nt, Artificial Sequence
  Description of Artificial Sequence: Synthetic oligonucleotide
  Sense strand starting at position 929 of SEQ ID NO: 588997
uuagauacugucuauagcu

SEQ ID NO: 903921 - RNA, 19 nt, Artificial Sequence
  Description of Artificial Sequence: Synthetic oligonucleotide
  Antisense strand to SEQ ID NO: 903920
agcuauagacaguaucuaa

SEQ ID NO: 903922 - RNA, 19 nt, Artificial Sequence
  Description of Artificial Sequence: Synthetic oligonucleotide
  Sense strand starting at position 974 of SEQ ID NO: 588997
gcaguuccaacggaaauca

SEQ ID NO: 903923 - RNA, 19 nt, Artificial Sequence
  Description of Artificial Sequence: Synthetic oligonucleotide
  Antisense strand to SEQ ID NO: 903922
ugauuuccguuggaacugc

SEQ ID NO: 903924 - RNA, 19 nt, Artificial Sequence
  Description of Artificial Sequence: Synthetic oligonucleotide
  Sense strand starting at position 1024 of SEQ ID NO: 588997
ggcccuuuccaaggaaauc

SEQ ID NO: 903925 - RNA, 19 nt, Artificial Sequence
  Description of Artificial Sequence: Synthetic oligonucleotide
  Antisense strand to SEQ ID NO: 903924
gauuuccuuggaaagggcc

SEQ ID NO: 903926 - RNA, 19 nt, Artificial Sequence
  Description of Artificial Sequence: Synthetic oligonucleotide
  Sense strand starting at position 1042 of SEQ ID NO: 588997
cugccaauuccuggucuaa

SEQ ID NO: 903927 - RNA, 19 nt, Artificial Sequence
  Description of Artificial Sequence: Synthetic oligonucleotide
  Antisense strand to SEQ ID NO: 903926
uuagaccaggaauuggcag

SEQ ID NO: 903928 - RNA, 19 nt, Artificial Sequence
  Description of Artificial Sequence: Synthetic oligonucleotide
  Sense strand starting at position 1044 of SEQ ID NO: 588997
gccaauuccuggucuaaua

SEQ ID NO: 903929 - RNA, 19 nt, Artificial Sequence
  Description of Artificial Sequence: Synthetic oligonucleotide
  Antisense strand to SEQ ID NO: 903928
uauuagaccaggaauuggc

SEQ ID NO: 903930 - RNA, 19 nt, Artificial Sequence
  Description of Artificial Sequence: Synthetic oligonucleotide
  Sense strand starting at position 1100 of SEQ ID NO: 588997
gaaucugagcacugggaca

SEQ ID NO: 903931 - RNA, 19 nt, Artificial Sequence
  Description of Artificial Sequence: Synthetic oligonucleotide
  Antisense strand to SEQ ID NO: 903930
ugucccagugcucagauuc

SEQ ID NO: 903932 - RNA, 19 nt, Artificial Sequence
  Description of Artificial Sequence: Synthetic oligonucleotide
  Sense strand starting at position 1132 of SEQ ID NO: 588997
gggauuuccugggaaguga

SEQ ID NO: 903933 - RNA, 19 nt, Artificial Sequence
  Description of Artificial Sequence: Synthetic oligonucleotide
  Antisense strand to SEQ ID NO: 903932
ucacuucccaggaaauccc

SEQ ID NO: 903934 - RNA, 19 nt, Artificial Sequence
  Description of Artificial Sequence: Synthetic oligonucleotide
  Sense strand starting at position 1154 of SEQ ID NO: 588997
acaggauccugcuuaaauc

SEQ ID NO: 903935 - RNA, 19 nt, Artificial Sequence
  Description of Artificial Sequence: Synthetic oligonucleotide
  Antisense strand to SEQ ID NO: 903934
gauuuaagcaggauccugu

SEQ ID NO: 903936 - RNA, 19 nt, Artificial Sequence
  Description of Artificial Sequence: Synthetic oligonucleotide
  Sense strand starting at position 1302 of SEQ ID NO: 588997
ggcauugagaccugaacac

SEQ ID NO: 903937 - RNA, 19 nt, Artificial Sequence
  Description of Artificial Sequence: Synthetic oligonucleotide
  Antisense strand to SEQ ID NO: 903936
guguucaggucucaaugcc

SEQ ID NO: 903938 - RNA, 19 nt, Artificial Sequence
  Description of Artificial Sequence: Synthetic oligonucleotide
  Sense strand starting at position 1515 of SEQ ID NO: 588997
cgaugcugaccaggaauau

SEQ ID NO: 903939 - RNA, 19 nt, Artificial Sequence
  Description of Artificial Sequence: Synthetic oligonucleotide
  Antisense strand to SEQ ID NO: 903938
auauuccuggucagcaucg

SEQ ID NO: 903940 - RNA, 19 nt, Artificial Sequence
  Description of Artificial Sequence: Synthetic oligonucleotide
  Sense strand starting at position 1526 of SEQ ID NO: 588997
aggaauaucuuguucuguc

SEQ ID NO: 903941 - RNA, 19 nt, Artificial Sequence
  Description of Artificial Sequence: Synthetic oligonucleotide
  Antisense strand to SEQ ID NO: 903940
gacagaacaagauauuccu

SEQ ID NO: 903942 - RNA, 19 nt, Artificial Sequence
  Description of Artificial Sequence: Synthetic oligonucleotide
  Sense strand starting at position 1530 of SEQ ID NO: 588997
auaucuuguucuguccaaa

SEQ ID NO: 903943 - RNA, 19 nt, Artificial Sequence
  Description of Artificial Sequence: Synthetic oligonucleotide
  Antisense strand to SEQ ID NO: 903942
uuuggacagaacaagauau

SEQ ID NO: 903944 - RNA, 19 nt, Artificial Sequence
  Description of Artificial Sequence: Synthetic oligonucleotide
  Sense strand starting at position 1569 of SEQ ID NO: 588997
agggaaguaugauguagaa

SEQ ID NO: 903945 - RNA, 19 nt, Artificial Sequence
  Description of Artificial Sequence: Synthetic oligonucleotide
  Antisense strand to SEQ ID NO: 903944
uucuacaucauacuucccu

SEQ ID NO: 903946 - RNA, 19 nt, Artificial Sequence
  Description of Artificial Sequence: Synthetic oligonucleotide
  Sense strand starting at position 1616 of SEQ ID NO: 588997
gcaguauagcaguaguuaa

SEQ ID NO: 903947 - RNA, 19 nt, Artificial Sequence
  Description of Artificial Sequence: Synthetic oligonucleotide
  Antisense strand to SEQ ID NO: 903946
uuaacuacugcuauacugc

SEQ ID NO: 903948 - RNA, 19 nt, Artificial Sequence
  Description of Artificial Sequence: Synthetic oligonucleotide
  Sense strand starting at position 1666 of SEQ ID NO: 588997
guaguaaccgugugacaag

SEQ ID NO: 903949 - RNA, 19 nt, Artificial Sequence
  Description of Artificial Sequence: Synthetic oligonucleotide
  Antisense strand to SEQ ID NO: 903948
cuugucacacgguuacuac

SEQ ID NO: 903950 - RNA, 19 nt, Artificial Sequence
  Description of Artificial Sequence: Synthetic oligonucleotide
  Sense strand starting at position 1673 of SEQ ID NO: 588997
ccgugugacaaggaacaau

SEQ ID NO: 903951 - RNA, 19 nt, Artificial Sequence
  Description of Artificial Sequence: Synthetic oligonucleotide
  Antisense strand to SEQ ID NO: 903950
auuguuccuugucacacgg

SEQ ID NO: 903952 - RNA, 19 nt, Artificial Sequence
  Description of Artificial Sequence: Synthetic oligonucleotide
  Sense strand starting at position 1685 of SEQ ID NO: 588997
gaacaauacugagucaguu

SEQ ID NO: 903953 - RNA, 19 nt, Artificial Sequence
  Description of Artificial Sequence: Synthetic oligonucleotide
  Antisense strand to SEQ ID NO: 903952
aacugacucaguauuguuc

SEQ ID NO: 903954 - RNA, 19 nt, Artificial Sequence
  Description of Artificial Sequence: Synthetic oligonucleotide
  Sense strand starting at position 1748 of SEQ ID NO: 588997
agaacaggcguuugggaaa

SEQ ID NO: 903955 - RNA, 19 nt, Artificial Sequence
  Description of Artificial Sequence: Synthetic oligonucleotide
  Antisense strand to SEQ ID NO: 903954
uuucccaaacgccuguucu

SEQ ID NO: 903956 - RNA, 19 nt, Artificial Sequence
  Description of Artificial Sequence: Synthetic oligonucleotide
  Sense strand starting at position 1778 of SEQ ID NO: 588997
aggugaauaggucacguga

SEQ ID NO: 903957 - RNA, 19 nt, Artificial Sequence
  Description of Artificial Sequence: Synthetic oligonucleotide
  Antisense strand to SEQ ID NO: 903956
ucacgugaccuauucaccu

SEQ ID NO: 903958 - RNA, 19 nt, Artificial Sequence
  Description of Artificial Sequence: Synthetic oligonucleotide
  Sense strand starting at position 1937 of SEQ ID NO: 588997
gggcuuauagaccgcgaaa

SEQ ID NO: 903959 - RNA, 19 nt, Artificial Sequence
  Description of Artificial Sequence: Synthetic oligonucleotide
  Antisense strand to SEQ ID NO: 903958
uuucgcggucuauaagccc

SEQ ID NO: 903960 - RNA, 19 nt, Artificial Sequence
  Description of Artificial Sequence: Synthetic oligonucleotide
  Sense strand starting at position 2088 of SEQ ID NO: 588997
ccggaagagguucgcauuu

SEQ ID NO: 903961 - RNA, 19 nt, Artificial Sequence
  Description of Artificial Sequence: Synthetic oligonucleotide
  Antisense strand to SEQ ID NO: 903960
aaaugcgaaccucuuccgg

SEQ ID NO: 903962 - RNA, 19 nt, Artificial Sequence
  Description of Artificial Sequence: Synthetic oligonucleotide
  Sense strand starting at position 2917 of SEQ ID NO: 588997
gggagaaaugggcgugaaa

SEQ ID NO: 903963 - RNA, 19 nt, Artificial Sequence
  Description of Artificial Sequence: Synthetic oligonucleotide
  Antisense strand to SEQ ID NO: 903962
uuucacgcccauuucuccc

SEQ ID NO: 903964 - RNA, 19 nt, Artificial Sequence
  Description of Artificial Sequence: Synthetic oligonucleotide
  Sense strand starting at position 2934 of SEQ ID NO: 588997
aaccgaaagucugucuuua

SEQ ID NO: 903965 - RNA, 19 nt, Artificial Sequence
  Description of Artificial Sequence: Synthetic oligonucleotide
  Antisense strand to SEQ ID NO: 903964
uaaagacagacuuucgguu

SEQ ID NO: 903966 - RNA, 19 nt, Artificial Sequence
  Description of Artificial Sequence: Synthetic oligonucleotide
  Sense strand starting at position 2936 of SEQ ID NO: 588997
ccgaaagucugucuuuaaa

SEQ ID NO: 903967 - RNA, 19 nt, Artificial Sequence
  Description of Artificial Sequence: Synthetic oligonucleotide
  Antisense strand to SEQ ID NO: 903966
uuuaaagacagacuuucgg

SEQ ID NO: 903968 - RNA, 19 nt, Artificial Sequence
  Description of Artificial Sequence: Synthetic oligonucleotide
  Sense strand starting at position 2950 of SEQ ID NO: 588997
uuaaacuacuugggagaau

SEQ ID NO: 903969 - RNA, 19 nt, Artificial Sequence
  Description of Artificial Sequence: Synthetic oligonucleotide
  Antisense strand to SEQ ID NO: 903968
auucucccaaguaguuuaa

SEQ ID NO: 903970 - RNA, 19 nt, Artificial Sequence
  Description of Artificial Sequence: Synthetic oligonucleotide
  Sense strand starting at position 3015 of SEQ ID NO: 588997
auaaguaccgaucaguuua

SEQ ID NO: 903971 - RNA, 19 nt, Artificial Sequence
  Description of Artificial Sequence: Synthetic oligonucleotide
  Antisense strand to SEQ ID NO: 903970
uaaacugaucgguacuuau

SEQ ID NO: 903972 - RNA, 19 nt, Artificial Sequence
  Description of Artificial Sequence: Synthetic oligonucleotide
  Sense strand starting at position 3017 of SEQ ID NO: 588997
aaguaccgaucaguuuaua

SEQ ID NO: 903973 - RNA, 19 nt, Artificial Sequence
  Description of Artificial Sequence: Synthetic oligonucleotide
  Antisense strand to SEQ ID NO: 903972
uauaaacugaucgguacuu

SEQ ID NO: 903974 - RNA, 19 nt, Artificial Sequence
  Description of Artificial Sequence: Synthetic oligonucleotide
  Sense strand starting at position 3140 of SEQ ID NO: 588997
aaauguuugcuggaugugu

SEQ ID NO: 903975 - RNA, 19 nt, Artificial Sequence
  Description of Artificial Sequence: Synthetic oligonucleotide
  Antisense strand to SEQ ID NO: 903974
acacauccagcaaacauuu

SEQ ID NO: 903976 - RNA, 19 nt, Artificial Sequence
  Description of Artificial Sequence: Synthetic oligonucleotide
  Sense strand starting at position 3142 of SEQ ID NO: 588997
auguuugcuggauguguga

SEQ ID NO: 903977 - RNA, 19 nt, Artificial Sequence
  Description of Artificial Sequence: Synthetic oligonucleotide
  Antisense strand to SEQ ID NO: 903976
ucacacauccagcaaacau

SEQ ID NO: 903978 - RNA, 19 nt, Artificial Sequence
  Description of Artificial Sequence: Synthetic oligonucleotide
  Sense strand starting at position 3149 of SEQ ID NO: 588997
cuggaugugugacuagaac

SEQ ID NO: 903979 - RNA, 19 nt, Artificial Sequence
  Description of Artificial Sequence: Synthetic oligonucleotide
  Antisense strand to SEQ ID NO: 903978
guucuagucacacauccag

SEQ ID NO: 903980 - RNA, 19 nt, Artificial Sequence
  Description of Artificial Sequence: Synthetic oligonucleotide
  Sense strand starting at position 3155 of SEQ ID NO: 588997
gugugacuagaacauucua

SEQ ID NO: 903981 - RNA, 19 nt, Artificial Sequence
  Description of Artificial Sequence: Synthetic oligonucleotide
  Antisense strand to SEQ ID NO: 903980
uagaauguucuagucacac

SEQ ID NO: 903982 - RNA, 19 nt, Artificial Sequence
  Description of Artificial Sequence: Synthetic oligonucleotide
  Sense strand starting at position 3160 of SEQ ID NO: 588997
acuagaacauucuaggguu

SEQ ID NO: 903983 - RNA, 19 nt, Artificial Sequence
  Description of Artificial Sequence: Synthetic oligonucleotide
  Antisense strand to SEQ ID NO: 903982
aacccuagaauguucuagu

SEQ ID NO: 903984 - RNA, 19 nt, Artificial Sequence
  Description of Artificial Sequence: Synthetic oligonucleotide
  Sense strand starting at position 3249 of SEQ ID NO: 588997
caggcuaggcgcuauuaua

SEQ ID NO: 903985 - RNA, 19 nt, Artificial Sequence
  Description of Artificial Sequence: Synthetic oligonucleotide
  Antisense strand to SEQ ID NO: 903984
uauaauagcgccuagccug

SEQ ID NO: 903986 - RNA, 19 nt, Artificial Sequence
  Description of Artificial Sequence: Synthetic oligonucleotide
  Sense strand starting at position 3412 of SEQ ID NO: 588997
gcuguauucccaggcugag

SEQ ID NO: 903987 - RNA, 19 nt, Artificial Sequence
  Description of Artificial Sequence: Synthetic oligonucleotide
  Antisense strand to SEQ ID NO: 903986
cucagccugggaauacagc

SEQ ID NO: 903988 - RNA, 19 nt, Artificial Sequence
  Description of Artificial Sequence: Synthetic oligonucleotide
  Sense strand starting at position 3463 of SEQ ID NO: 588997
acugcaguaaguugugauu

SEQ ID NO: 903989 - RNA, 19 nt, Artificial Sequence
  Description of Artificial Sequence: Synthetic oligonucleotide
  Antisense strand to SEQ ID NO: 903988
aaucacaacuuacugcagu

SEQ ID NO: 903990 - RNA, 19 nt, Artificial Sequence
  Description of Artificial Sequence: Synthetic oligonucleotide
  Sense strand starting at position 3474 of SEQ ID NO: 588997
uugugauugcgccauugca

SEQ ID NO: 903991 - RNA, 19 nt, Artificial Sequence
  Description of Artificial Sequence: Synthetic oligonucleotide
  Antisense strand to SEQ ID NO: 903990
ugcaauggcgcaaucacaa

SEQ ID NO: 903992 - RNA, 19 nt, Artificial Sequence
  Description of Artificial Sequence: Synthetic oligonucleotide
  Sense strand starting at position 3624 of SEQ ID NO: 588997
ggcgcaaucucagcucuau

SEQ ID NO: 903993 - RNA, 19 nt, Artificial Sequence
  Description of Artificial Sequence: Synthetic oligonucleotide
  Antisense strand to SEQ ID NO: 903992
auagagcugagauugcgcc

SEQ ID NO: 903994 - RNA, 19 nt, Artificial Sequence
  Description of Artificial Sequence: Synthetic oligonucleotide
  Sense strand starting at position 10 of SEQ ID NO: 588998
ccugcuuucuaaccaggaa

SEQ ID NO: 903995 - RNA, 19 nt, Artificial Sequence
  Description of Artificial Sequence: Synthetic oligonucleotide
  Antisense strand to SEQ ID NO: 903994
uuccugguuagaaagcagg

SEQ ID NO: 903996 - RNA, 19 nt, Artificial Sequence
  Description of Artificial Sequence: Synthetic oligonucleotide
  Sense strand starting at position 22 of SEQ ID NO: 588998
ccaggaauuuaggaacgua

SEQ ID NO: 903997 - RNA, 19 nt, Artificial Sequence
  Description of Artificial Sequence: Synthetic oligonucleotide
  Antisense strand to SEQ ID NO: 903996
uacguuccuaaauuccugg

SEQ ID NO: 903998 - RNA, 19 nt, Artificial Sequence
  Description of Artificial Sequence: Synthetic oligonucleotide
  Sense strand starting at position 38 of SEQ ID NO: 588998
guaccaaguguuuaugaca

SEQ ID NO: 903999 - RNA, 19 nt, Artificial Sequence
  Description of Artificial Sequence: Synthetic oligonucleotide
  Antisense strand to SEQ ID NO: 903998
ugucauaaacacuugguac

SEQ ID NO: 904000 - RNA, 19 nt, Artificial Sequence
  Description of Artificial Sequence: Synthetic oligonucleotide
  Sense strand starting at position 233 of SEQ ID NO: 588998
ggcaauagcaaagaauguu

SEQ ID NO: 904001 - RNA, 19 nt, Artificial Sequence
  Description of Artificial Sequence: Synthetic oligonucleotide
  Antisense strand to SEQ ID NO: 904000
aacauucuuugcuauugcc

SEQ ID NO: 904002 - RNA, 19 nt, Artificial Sequence
  Description of Artificial Sequence: Synthetic oligonucleotide
  Sense strand starting at position 278 of SEQ ID NO: 588998
ccugaugcaugacuguuaa

SEQ ID NO: 904003 - RNA, 19 nt, Artificial Sequence
  Description of Artificial Sequence: Synthetic oligonucleotide
  Antisense strand to SEQ ID NO: 904002
uuaacagucaugcaucagg

SEQ ID NO: 904004 - RNA, 19 nt, Artificial Sequence
  Description of Artificial Sequence: Synthetic oligonucleotide
  Sense strand starting at position 569 of SEQ ID NO: 588998
cgugaaguguuauuuguau

SEQ ID NO: 904005 - RNA, 19 nt, Artificial Sequence
  Description of Artificial Sequence: Synthetic oligonucleotide
  Antisense strand to SEQ ID NO: 904004
auacaaauaacacuucacg

SEQ ID NO: 904006 - RNA, 19 nt, Artificial Sequence
  Description of Artificial Sequence: Synthetic oligonucleotide
  Sense strand starting at position 575 of SEQ ID NO: 588998
guguuauuuguaugcuuuc

SEQ ID NO: 904007 - RNA, 19 nt, Artificial Sequence
  Description of Artificial Sequence: Synthetic oligonucleotide
  Antisense strand to SEQ ID NO: 904006
gaaagcauacaaauaacac

SEQ ID NO: 904008 - RNA, 19 nt, Artificial Sequence
  Description of Artificial Sequence: Synthetic oligonucleotide
  Sense strand starting at position 644 of SEQ ID NO: 588998
ucaguaaacucaucaguuu

SEQ ID NO: 904009 - RNA, 19 nt, Artificial Sequence
  Description of Artificial Sequence: Synthetic oligonucleotide
  Antisense strand to SEQ ID NO: 904008
aaacugaugaguuuacuga

SEQ ID NO: 904010 - RNA, 19 nt, Artificial Sequence
  Description of Artificial Sequence: Synthetic oligonucleotide
  Sense strand starting at position 795 of SEQ ID NO: 588998
ugcauaaaccuuggcuaaa

SEQ ID NO: 904011 - RNA, 19 nt, Artificial Sequence
  Description of Artificial Sequence: Synthetic oligonucleotide
  Antisense strand to SEQ ID NO: 904010
uuuagccaagguuuaugca

SEQ ID NO: 904012 - RNA, 19 nt, Artificial Sequence
  Description of Artificial Sequence: Synthetic oligonucleotide
  Sense strand starting at position 796 of SEQ ID NO: 588998
gcauaaaccuuggcuaaau

SEQ ID NO: 904013 - RNA, 19 nt, Artificial Sequence
  Description of Artificial Sequence: Synthetic oligonucleotide
  Antisense strand to SEQ ID NO: 904012
auuuagccaagguuuaugc

SEQ ID NO: 904014 - RNA, 19 nt, Artificial Sequence
  Description of Artificial Sequence: Synthetic oligonucleotide
  Sense strand starting at position 837 of SEQ ID NO: 588998
gccagcuuugaucaaauaa

SEQ ID NO: 904015 - RNA, 19 nt, Artificial Sequence
  Description of Artificial Sequence: Synthetic oligonucleotide
  Antisense strand to SEQ ID NO: 904014
uuauuugaucaaagcuggc

SEQ ID NO: 904016 - RNA, 19 nt, Artificial Sequence
  Description of Artificial Sequence: Synthetic oligonucleotide
  Sense strand starting at position 869 of SEQ ID NO: 588998
gagucauaucuuuggaguc

SEQ ID NO: 904017 - RNA, 19 nt, Artificial Sequence
  Description of Artificial Sequence: Synthetic oligonucleotide
  Antisense strand to SEQ ID NO: 904016
gacuccaaagauaugacuc

SEQ ID NO: 904018 - RNA, 19 nt, Artificial Sequence
  Description of Artificial Sequence: Synthetic oligonucleotide
  Sense strand starting at position 933 of SEQ ID NO: 588998
ugugaacuuaggcaaagua

SEQ ID NO: 904019 - RNA, 19 nt, Artificial Sequence
  Description of Artificial Sequence: Synthetic oligonucleotide
  Antisense strand to SEQ ID NO: 904018
uacuuugccuaaguucaca

SEQ ID NO: 904020 - RNA, 19 nt, Artificial Sequence
  Description of Artificial Sequence: Synthetic oligonucleotide
  Sense strand starting at position 984 of SEQ ID NO: 588998
ugagaagauuggagguguu

SEQ ID NO: 904021 - RNA, 19 nt, Artificial Sequence
  Description of Artificial Sequence: Synthetic oligonucleotide
  Antisense strand to SEQ ID NO: 904020
aacaccuccaaucuucuca

SEQ ID NO: 904022 - RNA, 19 nt, Artificial Sequence
  Description of Artificial Sequence: Synthetic oligonucleotide
  Sense strand starting at position 987 of SEQ ID NO: 588998
gaagauuggagguguuaac

SEQ ID NO: 904023 - RNA, 19 nt, Artificial Sequence
  Description of Artificial Sequence: Synthetic oligonucleotide
  Antisense strand to SEQ ID NO: 904022
guuaacaccuccaaucuuc

SEQ ID NO: 904024 - RNA, 19 nt, Artificial Sequence
  Description of Artificial Sequence: Synthetic oligonucleotide
  Sense strand starting at position 1022 of SEQ ID NO: 588998
cuuugucgugaggaccaaa

SEQ ID NO: 904025 - RNA, 19 nt, Artificial Sequence
  Description of Artificial Sequence: Synthetic oligonucleotide
  Antisense strand to SEQ ID NO: 904024
uuugguccucacgacaaag

SEQ ID NO: 904026 - RNA, 19 nt, Artificial Sequence
  Description of Artificial Sequence: Synthetic oligonucleotide
  Sense strand starting at position 1085 of SEQ ID NO: 588998
agagcacuccauuaacguu

SEQ ID NO: 904027 - RNA, 19 nt, Artificial Sequence
  Description of Artificial Sequence: Synthetic oligonucleotide
  Antisense strand to SEQ ID NO: 904026
aacguuaauggagugcucu

SEQ ID NO: 904028 - RNA, 19 nt, Artificial Sequence
  Description of Artificial Sequence: Synthetic oligonucleotide
  Sense strand starting at position 1099 of SEQ ID NO: 588998
acguuagcuguuguucuua

SEQ ID NO: 904029 - RNA, 19 nt, Artificial Sequence
  Description of Artificial Sequence: Synthetic oligonucleotide
  Antisense strand to SEQ ID NO: 904028
uaagaacaacagcuaacgu

SEQ ID NO: 904030 - RNA, 19 nt, Artificial Sequence
  Description of Artificial Sequence: Synthetic oligonucleotide
  Sense strand starting at position 1202 of SEQ ID NO: 588998
gcuuuaauucuacaagguc

SEQ ID NO: 904031 - RNA, 19 nt, Artificial Sequence
  Description of Artificial Sequence: Synthetic oligonucleotide
  Antisense strand to SEQ ID NO: 904030
gaccuuguagaauuaaagc

SEQ ID NO: 904032 - RNA, 19 nt, Artificial Sequence
  Description of Artificial Sequence: Synthetic oligonucleotide
  Sense strand starting at position 1370 of SEQ ID NO: 588998
cccagagcgagucaugcaa

SEQ ID NO: 904033 - RNA, 19 nt, Artificial Sequence
  Description of Artificial Sequence: Synthetic oligonucleotide
  Antisense strand to SEQ ID NO: 904032
uugcaugacucgcucuggg

SEQ ID NO: 904034 - RNA, 19 nt, Artificial Sequence
  Description of Artificial Sequence: Synthetic oligonucleotide
  Sense strand starting at position 1731 of SEQ ID NO: 588998
ggagauagcguguaauaag

SEQ ID NO: 904035 - RNA, 19 nt, Artificial Sequence
  Description of Artificial Sequence: Synthetic oligonucleotide
  Antisense strand to SEQ ID NO: 904034
cuuauuacacgcuaucucc

SEQ ID NO: 904036 - RNA, 19 nt, Artificial Sequence
  Description of Artificial Sequence: Synthetic oligonucleotide
  Sense strand starting at position 2141 of SEQ ID NO: 588998
auguggguuggacgagaaa

SEQ ID NO: 904037 - RNA, 19 nt, Artificial Sequence
  Description of Artificial Sequence: Synthetic oligonucleotide
  Antisense strand to SEQ ID NO: 904036
uuucucguccaacccacau

SEQ ID NO: 904038 - RNA, 19 nt, Artificial Sequence
  Description of Artificial Sequence: Synthetic oligonucleotide
  Sense strand starting at position 2343 of SEQ ID NO: 588998
ggcggagaggcguaaacaa

SEQ ID NO: 904039 - RNA, 19 nt, Artificial Sequence
  Description of Artificial Sequence: Synthetic oligonucleotide
  Antisense strand to SEQ ID NO: 904038
uuguuuacgccucuccgcc

SEQ ID NO: 904040 - RNA, 19 nt, Artificial Sequence
  Description of Artificial Sequence: Synthetic oligonucleotide
  Sense strand starting at position 2746 of SEQ ID NO: 588998
ccguuuccugcugaaacaa

SEQ ID NO: 904041 - RNA, 19 nt, Artificial Sequence
  Description of Artificial Sequence: Synthetic oligonucleotide
  Antisense strand to SEQ ID NO: 904040
uuguuucagcaggaaacgg

SEQ ID NO: 904042 - RNA, 19 nt, Artificial Sequence
  Description of Artificial Sequence: Synthetic oligonucleotide
  Sense strand starting at position 2817 of SEQ ID NO: 588998
acaucugugacgugaagaa

SEQ ID NO: 904043 - RNA, 19 nt, Artificial Sequence
  Description of Artificial Sequence: Synthetic oligonucleotide
  Antisense strand to SEQ ID NO: 904042
uucuucacgucacagaugu

SEQ ID NO: 904044 - RNA, 19 nt, Artificial Sequence
  Description of Artificial Sequence: Synthetic oligonucleotide
  Sense strand starting at position 2821 of SEQ ID NO: 588998
cugugacgugaagaaucaa

SEQ ID NO: 904045 - RNA, 19 nt, Artificial Sequence
  Description of Artificial Sequence: Synthetic oligonucleotide
  Antisense strand to SEQ ID NO: 904044
uugauucuucacgucacag

SEQ ID NO: 904046 - RNA, 19 nt, Artificial Sequence
  Description of Artificial Sequence: Synthetic oligonucleotide
  Sense strand starting at position 2868 of SEQ ID NO: 588998
cagaguccugcgccuagua

SEQ ID NO: 904047 - RNA, 19 nt, Artificial Sequence
  Description of Artificial Sequence: Synthetic oligonucleotide
  Antisense strand to SEQ ID NO: 904046
uacuaggcgcaggacucug

SEQ ID NO: 904048 - RNA, 19 nt, Artificial Sequence
  Description of Artificial Sequence: Synthetic oligonucleotide
  Sense strand starting at position 2899 of SEQ ID NO: 588998
cuagauagguggccuuuau

SEQ ID NO: 904049 - RNA, 19 nt, Artificial Sequence
  Description of Artificial Sequence: Synthetic oligonucleotide
  Antisense strand to SEQ ID NO: 904048
auaaaggccaccuaucuag

SEQ ID NO: 904050 - RNA, 19 nt, Artificial Sequence
  Description of Artificial Sequence: Synthetic oligonucleotide
  Sense strand starting at position 3226 of SEQ ID NO: 588998
gggugaguuaugggaauaa

SEQ ID NO: 904051 - RNA, 19 nt, Artificial Sequence
  Description of Artificial Sequence: Synthetic oligonucleotide
  Antisense strand to SEQ ID NO: 904050
uuauucccauaacucaccc

SEQ ID NO: 904052 - RNA, 19 nt, Artificial Sequence
  Description of Artificial Sequence: Synthetic oligonucleotide
  Sense strand starting at position 3393 of SEQ ID NO: 588998
uagggccuuggugagaauu

SEQ ID NO: 904053 - RNA, 19 nt, Artificial Sequence
  Description of Artificial Sequence: Synthetic oligonucleotide
  Antisense strand to SEQ ID NO: 904052
aauucucaccaaggcccua

SEQ ID NO: 904054 - RNA, 19 nt, Artificial Sequence
  Description of Artificial Sequence: Synthetic oligonucleotide
  Sense strand starting at position 3547 of SEQ ID NO: 588998
acugaugauuccucuguuc

SEQ ID NO: 904055 - RNA, 19 nt, Artificial Sequence
  Description of Artificial Sequence: Synthetic oligonucleotide
  Antisense strand to SEQ ID NO: 904054
gaacagaggaaucaucagu

SEQ ID NO: 904056 - RNA, 19 nt, Artificial Sequence
  Description of Artificial Sequence: Synthetic oligonucleotide
  Sense strand starting at position 3549 of SEQ ID NO: 588998
ugaugauuccucuguucua

SEQ ID NO: 904057 - RNA, 19 nt, Artificial Sequence
  Description of Artificial Sequence: Synthetic oligonucleotide
  Antisense strand to SEQ ID NO: 904056
uagaacagaggaaucauca

SEQ ID NO: 904058 - RNA, 19 nt, Artificial Sequence
  Description of Artificial Sequence: Synthetic oligonucleotide
  Sense strand starting at position 3614 of SEQ ID NO: 588998
agaguuugaauguagguuu

SEQ ID NO: 904059 - RNA, 19 nt, Artificial Sequence
  Description of Artificial Sequence: Synthetic oligonucleotide
  Antisense strand to SEQ ID NO: 904058
aaaccuacauucaaacucu

SEQ ID NO: 904060 - RNA, 19 nt, Artificial Sequence
  Description of Artificial Sequence: Synthetic oligonucleotide
  Sense strand starting at position 3676 of SEQ ID NO: 588998
gcaacauagggcuaauaau

SEQ ID NO: 904061 - RNA, 19 nt, Artificial Sequence
  Description of Artificial Sequence: Synthetic oligonucleotide
  Antisense strand to SEQ ID NO: 904060
auuauuagcccuauguugc

SEQ ID NO: 904062 - RNA, 19 nt, Artificial Sequence
  Description of Artificial Sequence: Synthetic oligonucleotide
  Sense strand starting at position 3718 of SEQ ID NO: 588998
ggugaagucagugagucau

SEQ ID NO: 904063 - RNA, 19 nt, Artificial Sequence
  Description of Artificial Sequence: Synthetic oligonucleotide
  Antisense strand to SEQ ID NO: 904062
augacucacugacuucacc

SEQ ID NO: 904064 - RNA, 19 nt, Artificial Sequence
  Description of Artificial Sequence: Synthetic oligonucleotide
  Sense strand starting at position 3720 of SEQ ID NO: 588998
ugaagucagugagucauua

SEQ ID NO: 904065 - RNA, 19 nt, Artificial Sequence
  Description of Artificial Sequence: Synthetic oligonucleotide
  Antisense strand to SEQ ID NO: 904064
uaaugacucacugacuuca

SEQ ID NO: 904066 - RNA, 19 nt, Artificial Sequence
  Description of Artificial Sequence: Synthetic oligonucleotide
  Sense strand starting at position 3728 of SEQ ID NO: 588998
gugagucauuaagcucuaa

SEQ ID NO: 904067 - RNA, 19 nt, Artificial Sequence
  Description of Artificial Sequence: Synthetic oligonucleotide
  Antisense strand to SEQ ID NO: 904066
uuagagcuuaaugacucac

SEQ ID NO: 904068 - RNA, 19 nt, Artificial Sequence
  Description of Artificial Sequence: Synthetic oligonucleotide
  Sense strand starting at position 3839 of SEQ ID NO: 588998
acacuaaauucuucugugu

SEQ ID NO: 904069 - RNA, 19 nt, Artificial Sequence
  Description of Artificial Sequence: Synthetic oligonucleotide
  Antisense strand to SEQ ID NO: 904068
acacagaagaauuuagugu

SEQ ID NO: 904070 - RNA, 19 nt, Artificial Sequence
  Description of Artificial Sequence: Synthetic oligonucleotide
  Sense strand starting at position 3892 of SEQ ID NO: 588998
auggaaaggucgagggaaa

SEQ ID NO: 904071 - RNA, 19 nt, Artificial Sequence
  Description of Artificial Sequence: Synthetic oligonucleotide
  Antisense strand to SEQ ID NO: 904070
uuucccucgaccuuuccau

SEQ ID NO: 904072 - RNA, 19 nt, Artificial Sequence
  Description of Artificial Sequence: Synthetic oligonucleotide
  Sense strand starting at position 3963 of SEQ ID NO: 588998
ggaacagacucuucccuuu

SEQ ID NO: 904073 - RNA, 19 nt, Artificial Sequence
  Description of Artificial Sequence: Synthetic oligonucleotide
  Antisense strand to SEQ ID NO: 904072
aaagggaagagucuguucc

SEQ ID NO: 904074 - RNA, 19 nt, Artificial Sequence
  Description of Artificial Sequence: Synthetic oligonucleotide
  Sense strand starting at position 38 of SEQ ID NO: 588999
ucuguaauugccgcuacuu

SEQ ID NO: 904075 - RNA, 19 nt, Artificial Sequence
  Description of Artificial Sequence: Synthetic oligonucleotide
  Antisense strand to SEQ ID NO: 904074
aaguagcggcaauuacaga

SEQ ID NO: 904076 - RNA, 19 nt, Artificial Sequence
  Description of Artificial Sequence: Synthetic oligonucleotide
  Sense strand starting at position 202 of SEQ ID NO: 588999
cuuggauaauguccaaagu

SEQ ID NO: 904077 - RNA, 19 nt, Artificial Sequence
  Description of Artificial Sequence: Synthetic oligonucleotide
  Antisense strand to SEQ ID NO: 904076
acuuuggacauuauccaag

SEQ ID NO: 904078 - RNA, 19 nt, Artificial Sequence
  Description of Artificial Sequence: Synthetic oligonucleotide
  Sense strand starting at position 211 of SEQ ID NO: 588999
uguccaaaguccucacaga

SEQ ID NO: 904079 - RNA, 19 nt, Artificial Sequence
  Description of Artificial Sequence: Synthetic oligonucleotide
  Antisense strand to SEQ ID NO: 904078
ucugugaggacuuuggaca

SEQ ID NO: 904080 - RNA, 19 nt, Artificial Sequence
  Description of Artificial Sequence: Synthetic oligonucleotide
  Sense strand starting at position 292 of SEQ ID NO: 588999
gcacuauuuguggguauuc

SEQ ID NO: 904081 - RNA, 19 nt, Artificial Sequence
  Description of Artificial Sequence: Synthetic oligonucleotide
  Antisense strand to SEQ ID NO: 904080
gaauacccacaaauagugc

SEQ ID NO: 904082 - RNA, 19 nt, Artificial Sequence
  Description of Artificial Sequence: Synthetic oligonucleotide
  Sense strand starting at position 311 of SEQ ID NO: 588999
cugaaugggucguuagaau

SEQ ID NO: 904083 - RNA, 19 nt, Artificial Sequence
  Description of Artificial Sequence: Synthetic oligonucleotide
  Antisense strand to SEQ ID NO: 904082
auucuaacgacccauucag

SEQ ID NO: 904084 - RNA, 19 nt, Artificial Sequence
  Description of Artificial Sequence: Synthetic oligonucleotide
  Sense strand starting at position 325 of SEQ ID NO: 588999
agaauauaucagcgccaag

SEQ ID NO: 904085 - RNA, 19 nt, Artificial Sequence
  Description of Artificial Sequence: Synthetic oligonucleotide
  Antisense strand to SEQ ID NO: 904084
cuuggcgcugauauauucu

SEQ ID NO: 904086 - RNA, 19 nt, Artificial Sequence
  Description of Artificial Sequence: Synthetic oligonucleotide
  Sense strand starting at position 328 of SEQ ID NO: 588999
auauaucagcgccaagaga

SEQ ID NO: 904087 - RNA, 19 nt, Artificial Sequence
  Description of Artificial Sequence: Synthetic oligonucleotide
  Antisense strand to SEQ ID NO: 904086
ucucuuggcgcugauauau

SEQ ID NO: 904088 - RNA, 19 nt, Artificial Sequence
  Description of Artificial Sequence: Synthetic oligonucleotide
  Sense strand starting at position 454 of SEQ ID NO: 588999
aacagugauuggguaacca

SEQ ID NO: 904089 - RNA, 19 nt, Artificial Sequence
  Description of Artificial Sequence: Synthetic oligonucleotide
  Antisense strand to SEQ ID NO: 904088
ugguuacccaaucacuguu

SEQ ID NO: 904090 - RNA, 19 nt, Artificial Sequence
  Description of Artificial Sequence: Synthetic oligonucleotide
  Sense strand starting at position 458 of SEQ ID NO: 588999
gugauuggguaaccaaaga

SEQ ID NO: 904091 - RNA, 19 nt, Artificial Sequence
  Description of Artificial Sequence: Synthetic oligonucleotide
  Antisense strand to SEQ ID NO: 904090
ucuuugguuacccaaucac

SEQ ID NO: 904092 - RNA, 19 nt, Artificial Sequence
  Description of Artificial Sequence: Synthetic oligonucleotide
  Sense strand starting at position 617 of SEQ ID NO: 588999
cagaaagagugguuggagu

SEQ ID NO: 904093 - RNA, 19 nt, Artificial Sequence
  Description of Artificial Sequence: Synthetic oligonucleotide
  Antisense strand to SEQ ID NO: 904092
acuccaaccacucuuucug

SEQ ID NO: 904094 - RNA, 19 nt, Artificial Sequence
  Description of Artificial Sequence: Synthetic oligonucleotide
  Sense strand starting at position 684 of SEQ ID NO: 588999
uggaaagucguaggagacu

SEQ ID NO: 904095 - RNA, 19 nt, Artificial Sequence
  Description of Artificial Sequence: Synthetic oligonucleotide
  Antisense strand to SEQ ID NO: 904094
agucuccuacgacuuucca

SEQ ID NO: 904096 - RNA, 19 nt, Artificial Sequence
  Description of Artificial Sequence: Synthetic oligonucleotide
  Sense strand starting at position 853 of SEQ ID NO: 588999
acacuaggcucagcuaauu

SEQ ID NO: 904097 - RNA, 19 nt, Artificial Sequence
  Description of Artificial Sequence: Synthetic oligonucleotide
  Antisense strand to SEQ ID NO: 904096
aauuagcugagccuagugu

SEQ ID NO: 904098 - RNA, 19 nt, Artificial Sequence
  Description of Artificial Sequence: Synthetic oligonucleotide
  Sense strand starting at position 1190 of SEQ ID NO: 588999
ggagaauuaggccgggaga

SEQ ID NO: 904099 - RNA, 19 nt, Artificial Sequence
  Description of Artificial Sequence: Synthetic oligonucleotide
  Antisense strand to SEQ ID NO: 904098
ucucccggccuaauucucc

SEQ ID NO: 904100 - RNA, 19 nt, Artificial Sequence
  Description of Artificial Sequence: Synthetic oligonucleotide
  Sense strand starting at position 1192 of SEQ ID NO: 588999
agaauuaggccgggagagu

SEQ ID NO: 904101 - RNA, 19 nt, Artificial Sequence
  Description of Artificial Sequence: Synthetic oligonucleotide
  Antisense strand to SEQ ID NO: 904100
acucucccggccuaauucu

SEQ ID NO: 904102 - RNA, 19 nt, Artificial Sequence
  Description of Artificial Sequence: Synthetic oligonucleotide
  Sense strand starting at position 1294 of SEQ ID NO: 588999
gcauauagguacccaauaa

SEQ ID NO: 904103 - RNA, 19 nt, Artificial Sequence
  Description of Artificial Sequence: Synthetic oligonucleotide
  Antisense strand to SEQ ID NO: 904102
uuauuggguaccuauaugc

SEQ ID NO: 904104 - RNA, 19 nt, Artificial Sequence
  Description of Artificial Sequence: Synthetic oligonucleotide
  Sense strand starting at position 1543 of SEQ ID NO: 588999
gggaguagaugagcacaua

SEQ ID NO: 904105 - RNA, 19 nt, Artificial Sequence
  Description of Artificial Sequence: Synthetic oligonucleotide
  Antisense strand to SEQ ID NO: 904104
uaugugcucaucuacuccc

SEQ ID NO: 904106 - RNA, 19 nt, Artificial Sequence
  Description of Artificial Sequence: Synthetic oligonucleotide
  Sense strand starting at position 1570 of SEQ ID NO: 588999
uccugauccuuucuaaggu

SEQ ID NO: 904107 - RNA, 19 nt, Artificial Sequence
  Description of Artificial Sequence: Synthetic oligonucleotide
  Antisense strand to SEQ ID NO: 904106
accuuagaaaggaucagga

SEQ ID NO: 904108 - RNA, 19 nt, Artificial Sequence
  Description of Artificial Sequence: Synthetic oligonucleotide
  Sense strand starting at position 1656 of SEQ ID NO: 588999
ccgcguauuuggguagaaa

SEQ ID NO: 904109 - RNA, 19 nt, Artificial Sequence
  Description of Artificial Sequence: Synthetic oligonucleotide
  Antisense strand to SEQ ID NO: 904108
uuucuacccaaauacgcgg

SEQ ID NO: 904110 - RNA, 19 nt, Artificial Sequence
  Description of Artificial Sequence: Synthetic oligonucleotide
  Sense strand starting at position 2442 of SEQ ID NO: 588999
gccgauccucgggaaagaa

SEQ ID NO: 904111 - RNA, 19 nt, Artificial Sequence
  Description of Artificial Sequence: Synthetic oligonucleotide
  Antisense strand to SEQ ID NO: 904110
uucuuucccgaggaucggc

SEQ ID NO: 904112 - RNA, 19 nt, Artificial Sequence
  Description of Artificial Sequence: Synthetic oligonucleotide
  Sense strand starting at position 2479 of SEQ ID NO: 588999
gguagacccuuggucucua

SEQ ID NO: 904113 - RNA, 19 nt, Artificial Sequence
  Description of Artificial Sequence: Synthetic oligonucleotide
  Antisense strand to SEQ ID NO: 904112
uagagaccaagggucuacc

SEQ ID NO: 904114 - RNA, 19 nt, Artificial Sequence
  Description of Artificial Sequence: Synthetic oligonucleotide
  Sense strand starting at position 2483 of SEQ ID NO: 588999
gacccuuggucucuaagga

SEQ ID NO: 904115 - RNA, 19 nt, Artificial Sequence
  Description of Artificial Sequence: Synthetic oligonucleotide
  Antisense strand to SEQ ID NO: 904114
uccuuagagaccaaggguc

SEQ ID NO: 904116 - RNA, 19 nt, Artificial Sequence
  Description of Artificial Sequence: Synthetic oligonucleotide
  Sense strand starting at position 2484 of SEQ ID NO: 588999
acccuuggucucuaaggau

SEQ ID NO: 904117 - RNA, 19 nt, Artificial Sequence
  Description of Artificial Sequence: Synthetic oligonucleotide
  Antisense strand to SEQ ID NO: 904116
auccuuagagaccaagggu

SEQ ID NO: 904118 - RNA, 19 nt, Artificial Sequence
  Description of Artificial Sequence: Synthetic oligonucleotide
  Sense strand starting at position 2683 of SEQ ID NO: 588999
cucuguuccgguagugguu

SEQ ID NO: 904119 - RNA, 19 nt, Artificial Sequence
  Description of Artificial Sequence: Synthetic oligonucleotide
  Antisense strand to SEQ ID NO: 904118
aaccacuaccggaacagag

SEQ ID NO: 904120 - RNA, 19 nt, Artificial Sequence
  Description of Artificial Sequence: Synthetic oligonucleotide
  Sense strand starting at position 2696 of SEQ ID NO: 588999
gugguuauccguugauuuc

SEQ ID NO: 904121 - RNA, 19 nt, Artificial Sequence
  Description of Artificial Sequence: Synthetic oligonucleotide
  Antisense strand to SEQ ID NO: 904120
gaaaucaacggauaaccac

SEQ ID NO: 904122 - RNA, 19 nt, Artificial Sequence
  Description of Artificial Sequence: Synthetic oligonucleotide
  Sense strand starting at position 3098 of SEQ ID NO: 588999
uauaguagugguuaagaga

SEQ ID NO: 904123 - RNA, 19 nt, Artificial Sequence
  Description of Artificial Sequence: Synthetic oligonucleotide
  Antisense strand to SEQ ID NO: 904122
ucucuuaaccacuacuaua

SEQ ID NO: 904124 - RNA, 19 nt, Artificial Sequence
  Description of Artificial Sequence: Synthetic oligonucleotide
  Sense strand starting at position 3105 of SEQ ID NO: 588999
gugguuaagagaugagacu

SEQ ID NO: 904125 - RNA, 19 nt, Artificial Sequence
  Description of Artificial Sequence: Synthetic oligonucleotide
  Antisense strand to SEQ ID NO: 904124
agucucaucucuuaaccac

SEQ ID NO: 904126 - RNA, 19 nt, Artificial Sequence
  Description of Artificial Sequence: Synthetic oligonucleotide
  Sense strand starting at position 3123 of SEQ ID NO: 588999
uuuggaaccagaggguuua

SEQ ID NO: 904127 - RNA, 19 nt, Artificial Sequence
  Description of Artificial Sequence: Synthetic oligonucleotide
  Antisense strand to SEQ ID NO: 904126
uaaacccucugguuccaaa

SEQ ID NO: 904128 - RNA, 19 nt, Artificial Sequence
  Description of Artificial Sequence: Synthetic oligonucleotide
  Sense strand starting at position 3171 of SEQ ID NO: 588999
ggugaucuuguccagguua

SEQ ID NO: 904129 - RNA, 19 nt, Artificial Sequence
  Description of Artificial Sequence: Synthetic oligonucleotide
  Antisense strand to SEQ ID NO: 904128
uaaccuggacaagaucacc

SEQ ID NO: 904130 - RNA, 19 nt, Artificial Sequence
  Description of Artificial Sequence: Synthetic oligonucleotide
  Sense strand starting at position 3176 of SEQ ID NO: 588999
ucuuguccagguuaugaaa

SEQ ID NO: 904131 - RNA, 19 nt, Artificial Sequence
  Description of Artificial Sequence: Synthetic oligonucleotide
  Antisense strand to SEQ ID NO: 904130
uuucauaaccuggacaaga

SEQ ID NO: 904132 - RNA, 19 nt, Artificial Sequence
  Description of Artificial Sequence: Synthetic oligonucleotide
  Sense strand starting at position 3198 of SEQ ID NO: 588999
ccuuaaacuuuagucugua

SEQ ID NO: 904133 - RNA, 19 nt, Artificial Sequence
  Description of Artificial Sequence: Synthetic oligonucleotide
  Antisense strand to SEQ ID NO: 904132
uacagacuaaaguuuaagg

SEQ ID NO: 904134 - RNA, 19 nt, Artificial Sequence
  Description of Artificial Sequence: Synthetic oligonucleotide
  Sense strand starting at position 3199 of SEQ ID NO: 588999
cuuaaacuuuagucuguaa

SEQ ID NO: 904135 - RNA, 19 nt, Artificial Sequence
  Description of Artificial Sequence: Synthetic oligonucleotide
  Antisense strand to SEQ ID NO: 904134
uuacagacuaaaguuuaag

SEQ ID NO: 904136 - RNA, 19 nt, Artificial Sequence
  Description of Artificial Sequence: Synthetic oligonucleotide
  Sense strand starting at position 3298 of SEQ ID NO: 588999
aucauuugccaacgcuuaa

SEQ ID NO: 904137 - RNA, 19 nt, Artificial Sequence
  Description of Artificial Sequence: Synthetic oligonucleotide
  Antisense strand to SEQ ID NO: 904136
uuaagcguuggcaaaugau

SEQ ID NO: 904138 - RNA, 19 nt, Artificial Sequence
  Description of Artificial Sequence: Synthetic oligonucleotide
  Sense strand starting at position 3320 of SEQ ID NO: 588999
gcgguaaacguuagcagau

SEQ ID NO: 904139 - RNA, 19 nt, Artificial Sequence
  Description of Artificial Sequence: Synthetic oligonucleotide
  Antisense strand to SEQ ID NO: 904138
aucugcuaacguuuaccgc

SEQ ID NO: 904140 - RNA, 19 nt, Artificial Sequence
  Description of Artificial Sequence: Synthetic oligonucleotide
  Sense strand starting at position 3335 of SEQ ID NO: 588999
agaugcugucaauguaaga

SEQ ID NO: 904141 - RNA, 19 nt, Artificial Sequence
  Description of Artificial Sequence: Synthetic oligonucleotide
  Antisense strand to SEQ ID NO: 904140
ucuuacauugacagcaucu

SEQ ID NO: 904142 - RNA, 19 nt, Artificial Sequence
  Description of Artificial Sequence: Synthetic oligonucleotide
  Sense strand starting at position 3417 of SEQ ID NO: 588999
gaguguuguggcaguugag

SEQ ID NO: 904143 - RNA, 19 nt, Artificial Sequence
  Description of Artificial Sequence: Synthetic oligonucleotide
  Antisense strand to SEQ ID NO: 904142
cucaacugccacaacacuc

SEQ ID NO: 904144 - RNA, 19 nt, Artificial Sequence
  Description of Artificial Sequence: Synthetic oligonucleotide
  Sense strand starting at position 3441 of SEQ ID NO: 588999
ggcagaaucgcaugcauuu

SEQ ID NO: 904145 - RNA, 19 nt, Artificial Sequence
  Description of Artificial Sequence: Synthetic oligonucleotide
  Antisense strand to SEQ ID NO: 904144
aaaugcaugcgauucugcc

SEQ ID NO: 904146 - RNA, 19 nt, Artificial Sequence
  Description of Artificial Sequence: Synthetic oligonucleotide
  Sense strand starting at position 3475 of SEQ ID NO: 588999
acaccagauuucuacgaag

SEQ ID NO: 904147 - RNA, 19 nt, Artificial Sequence
  Description of Artificial Sequence: Synthetic oligonucleotide
  Antisense strand to SEQ ID NO: 904146
cuucguagaaaucuggugu

SEQ ID NO: 904148 - RNA, 19 nt, Artificial Sequence
  Description of Artificial Sequence: Synthetic oligonucleotide
  Sense strand starting at position 3478 of SEQ ID NO: 588999
ccagauuucuacgaaggaa

SEQ ID NO: 904149 - RNA, 19 nt, Artificial Sequence
  Description of Artificial Sequence: Synthetic oligonucleotide
  Antisense strand to SEQ ID NO: 904148
uuccuucguagaaaucugg

SEQ ID NO: 904150 - RNA, 19 nt, Artificial Sequence
  Description of Artificial Sequence: Synthetic oligonucleotide
  Sense strand starting at position 3506 of SEQ ID NO: 588999
aggauauucuaguccagcu

SEQ ID NO: 904151 - RNA, 19 nt, Artificial Sequence
  Description of Artificial Sequence: Synthetic oligonucleotide
  Antisense strand to SEQ ID NO: 904150
agcuggacuagaauauccu

SEQ ID NO: 904152 - RNA, 19 nt, Artificial Sequence
  Description of Artificial Sequence: Synthetic oligonucleotide
  Sense strand starting at position 3664 of SEQ ID NO: 588999
gugcuuugauuucuaacac

SEQ ID NO: 904153 - RNA, 19 nt, Artificial Sequence
  Description of Artificial Sequence: Synthetic oligonucleotide
  Antisense strand to SEQ ID NO: 904152
guguuagaaaucaaagcac

SEQ ID NO: 904154 - RNA, 19 nt, Artificial Sequence
  Description of Artificial Sequence: Synthetic oligonucleotide
  Sense strand starting at position 89 of SEQ ID NO: 589000
ggacacugucauuauggca

SEQ ID NO: 904155 - RNA, 19 nt, Artificial Sequence
  Description of Artificial Sequence: Synthetic oligonucleotide
  Antisense strand to SEQ ID NO: 904154
ugccauaaugacagugucc

SEQ ID NO: 904156 - RNA, 19 nt, Artificial Sequence
  Description of Artificial Sequence: Synthetic oligonucleotide
  Sense strand starting at position 92 of SEQ ID NO: 589000
cacugucauuauggcagaa

SEQ ID NO: 904157 - RNA, 19 nt, Artificial Sequence
  Description of Artificial Sequence: Synthetic oligonucleotide
  Antisense strand to SEQ ID NO: 904156
uucugccauaaugacagug

SEQ ID NO: 904158 - RNA, 19 nt, Artificial Sequence
  Description of Artificial Sequence: Synthetic oligonucleotide
  Sense strand starting at position 94 of SEQ ID NO: 589000
cugucauuauggcagaaag

SEQ ID NO: 904159 - RNA, 19 nt, Artificial Sequence
  Description of Artificial Sequence: Synthetic oligonucleotide
  Antisense strand to SEQ ID NO: 904158
cuuucugccauaaugacag

SEQ ID NO: 904160 - RNA, 19 nt, Artificial Sequence
  Description of Artificial Sequence: Synthetic oligonucleotide
  Sense strand starting at position 981 of SEQ ID NO: 589000
gaguaaguggcucaaagcu

SEQ ID NO: 904161 - RNA, 19 nt, Artificial Sequence
  Description of Artificial Sequence: Synthetic oligonucleotide
  Antisense strand to SEQ ID NO: 904160
agcuuugagccacuuacuc

SEQ ID NO: 904162 - RNA, 19 nt, Artificial Sequence
  Description of Artificial Sequence: Synthetic oligonucleotide
  Sense strand starting at position 1469 of SEQ ID NO: 589000
gguccucaugcuuacaaca

SEQ ID NO: 904163 - RNA, 19 nt, Artificial Sequence
  Description of Artificial Sequence: Synthetic oligonucleotide
  Antisense strand to SEQ ID NO: 904162
uguuguaagcaugaggacc

SEQ ID NO: 904164 - RNA, 19 nt, Artificial Sequence
  Description of Artificial Sequence: Synthetic oligonucleotide
  Sense strand starting at position 1546 of SEQ ID NO: 589000
cuuugaugucuccagcuca

SEQ ID NO: 904165 - RNA, 19 nt, Artificial Sequence
  Description of Artificial Sequence: Synthetic oligonucleotide
  Antisense strand to SEQ ID NO: 904164
ugagcuggagacaucaaag

SEQ ID NO: 904166 - RNA, 19 nt, Artificial Sequence
  Description of Artificial Sequence: Synthetic oligonucleotide
  Sense strand starting at position 1596 of SEQ ID NO: 589000
ccuacagucccuuggguaa

SEQ ID NO: 904167 - RNA, 19 nt, Artificial Sequence
  Description of Artificial Sequence: Synthetic oligonucleotide
  Antisense strand to SEQ ID NO: 904166
uuacccaagggacuguagg

SEQ ID NO: 904168 - RNA, 19 nt, Artificial Sequence
  Description of Artificial Sequence: Synthetic oligonucleotide
  Sense strand starting at position 1718 of SEQ ID NO: 589000
gccagagaccucuguccaa

SEQ ID NO: 904169 - RNA, 19 nt, Artificial Sequence
  Description of Artificial Sequence: Synthetic oligonucleotide
  Antisense strand to SEQ ID NO: 904168
uuggacagaggucucuggc

SEQ ID NO: 904170 - RNA, 19 nt, Artificial Sequence
  Description of Artificial Sequence: Synthetic oligonucleotide
  Sense strand starting at position 1889 of SEQ ID NO: 589000
uugcguuagucuucuccca

SEQ ID NO: 904171 - RNA, 19 nt, Artificial Sequence
  Description of Artificial Sequence: Synthetic oligonucleotide
  Antisense strand to SEQ ID NO: 904170
ugggagaagacuaacgcaa

SEQ ID NO: 904172 - RNA, 19 nt, Artificial Sequence
  Description of Artificial Sequence: Synthetic oligonucleotide
  Sense strand starting at position 1891 of SEQ ID NO: 589000
gcguuagucuucucccaag

SEQ ID NO: 904173 - RNA, 19 nt, Artificial Sequence
  Description of Artificial Sequence: Synthetic oligonucleotide
  Antisense strand to SEQ ID NO: 904172
cuugggagaagacuaacgc

SEQ ID NO: 904174 - RNA, 19 nt, Artificial Sequence
  Description of Artificial Sequence: Synthetic oligonucleotide
  Sense strand starting at position 2618 of SEQ ID NO: 589000
ccaaauugcugcucuguuu

SEQ ID NO: 904175 - RNA, 19 nt, Artificial Sequence
  Description of Artificial Sequence: Synthetic oligonucleotide
  Antisense strand to SEQ ID NO: 904174
aaacagagcagcaauuugg

SEQ ID NO: 904176 - RNA, 19 nt, Artificial Sequence
  Description of Artificial Sequence: Synthetic oligonucleotide
  Sense strand starting at position 2635 of SEQ ID NO: 589000
uuucuuaacuggugaguuc

SEQ ID NO: 904177 - RNA, 19 nt, Artificial Sequence
  Description of Artificial Sequence: Synthetic oligonucleotide
  Antisense strand to SEQ ID NO: 904176
gaacucaccaguuaagaaa

SEQ ID NO: 904178 - RNA, 19 nt, Artificial Sequence
  Description of Artificial Sequence: Synthetic oligonucleotide
  Sense strand starting at position 3176 of SEQ ID NO: 589000
gagcacuggcugugacaga

SEQ ID NO: 904179 - RNA, 19 nt, Artificial Sequence
  Description of Artificial Sequence: Synthetic oligonucleotide
  Antisense strand to SEQ ID NO: 904178
ucugucacagccagugcuc

SEQ ID NO: 904180 - RNA, 19 nt, Artificial Sequence
  Description of Artificial Sequence: Synthetic oligonucleotide
  Sense strand starting at position 3177 of SEQ ID NO: 589000
agcacuggcugugacagau

SEQ ID NO: 904181 - RNA, 19 nt, Artificial Sequence
  Description of Artificial Sequence: Synthetic oligonucleotide
  Antisense strand to SEQ ID NO: 904180
aucugucacagccagugcu

SEQ ID NO: 904182 - RNA, 19 nt, Artificial Sequence
  Description of Artificial Sequence: Synthetic oligonucleotide
  Sense strand starting at position 3264 of SEQ ID NO: 589000
ucaguuucuuuauauguga

SEQ ID NO: 904183 - RNA, 19 nt, Artificial Sequence
  Description of Artificial Sequence: Synthetic oligonucleotide
  Antisense strand to SEQ ID NO: 904182
ucacauauaaagaaacuga

SEQ ID NO: 904184 - RNA, 19 nt, Artificial Sequence
  Description of Artificial Sequence: Synthetic oligonucleotide
  Sense strand starting at position 3273 of SEQ ID NO: 589000
uuauaugugaagugggauu

SEQ ID NO: 904185 - RNA, 19 nt, Artificial Sequence
  Description of Artificial Sequence: Synthetic oligonucleotide
  Antisense strand to SEQ ID NO: 904184
aaucccacuucacauauaa

SEQ ID NO: 904186 - RNA, 19 nt, Artificial Sequence
  Description of Artificial Sequence: Synthetic oligonucleotide
  Sense strand starting at position 3358 of SEQ ID NO: 589000
ugccguuucccugugcuaa

SEQ ID NO: 904187 - RNA, 19 nt, Artificial Sequence
  Description of Artificial Sequence: Synthetic oligonucleotide
  Antisense strand to SEQ ID NO: 904186
uuagcacagggaaacggca

SEQ ID NO: 904188 - RNA, 19 nt, Artificial Sequence
  Description of Artificial Sequence: Synthetic oligonucleotide
  Sense strand starting at position 3359 of SEQ ID NO: 589000
gccguuucccugugcuaag

SEQ ID NO: 904189 - RNA, 19 nt, Artificial Sequence
  Description of Artificial Sequence: Synthetic oligonucleotide
  Antisense strand to SEQ ID NO: 904188
cuuagcacagggaaacggc

SEQ ID NO: 904190 - RNA, 19 nt, Artificial Sequence
  Description of Artificial Sequence: Synthetic oligonucleotide
  Sense strand starting at position 3403 of SEQ ID NO: 589000
ggaagucuaccuggugcau

SEQ ID NO: 904191 - RNA, 19 nt, Artificial Sequence
  Description of Artificial Sequence: Synthetic oligonucleotide
  Antisense strand to SEQ ID NO: 904190
augcaccagguagacuucc

SEQ ID NO: 904192 - RNA, 19 nt, Artificial Sequence
  Description of Artificial Sequence: Synthetic oligonucleotide
  Sense strand starting at position 3484 of SEQ ID NO: 589000
uccugagauggucaggguu

SEQ ID NO: 904193 - RNA, 19 nt, Artificial Sequence
  Description of Artificial Sequence: Synthetic oligonucleotide
  Antisense strand to SEQ ID NO: 904192
aacccugaccaucucagga

SEQ ID NO: 904194 - RNA, 19 nt, Artificial Sequence
  Description of Artificial Sequence: Synthetic oligonucleotide
  Sense strand starting at position 3490 of SEQ ID NO: 589000
gauggucaggguugggaua

SEQ ID NO: 904195 - RNA, 19 nt, Artificial Sequence
  Description of Artificial Sequence: Synthetic oligonucleotide
  Antisense strand to SEQ ID NO: 904194
uaucccaacccugaccauc

SEQ ID NO: 904196 - RNA, 19 nt, Artificial Sequence
  Description of Artificial Sequence: Synthetic oligonucleotide
  Sense strand starting at position 3666 of SEQ ID NO: 589000
ggaguccguuccugcauua

SEQ ID NO: 904197 - RNA, 19 nt, Artificial Sequence
  Description of Artificial Sequence: Synthetic oligonucleotide
  Antisense strand to SEQ ID NO: 904196
uaaugcaggaacggacucc

SEQ ID NO: 904198 - RNA, 19 nt, Artificial Sequence
  Description of Artificial Sequence: Synthetic oligonucleotide
  Sense strand starting at position 3689 of SEQ ID NO: 589000
ccucaacuccaaugugagu

SEQ ID NO: 904199 - RNA, 19 nt, Artificial Sequence
  Description of Artificial Sequence: Synthetic oligonucleotide
  Antisense strand to SEQ ID NO: 904198
acucacauuggaguugagg

SEQ ID NO: 904200 - RNA, 19 nt, Artificial Sequence
  Description of Artificial Sequence: Synthetic oligonucleotide
  Sense strand starting at position 3936 of SEQ ID NO: 589000
gaccacauccgugagcgaa

SEQ ID NO: 904201 - RNA, 19 nt, Artificial Sequence
  Description of Artificial Sequence: Synthetic oligonucleotide
  Antisense strand to SEQ ID NO: 904200
uucgcucacggaugugguc

SEQ ID NO: 904202 - RNA, 19 nt, Artificial Sequence
  Description of Artificial Sequence: Synthetic oligonucleotide
  Sense strand starting at position 16 of SEQ ID NO: 589001
agugguaaacugugaggga

SEQ ID NO: 904203 - RNA, 19 nt, Artificial Sequence
  Description of Artificial Sequence: Synthetic oligonucleotide
  Antisense strand to SEQ ID NO: 904202
ucccucacaguuuaccacu

SEQ ID NO: 904204 - RNA, 19 nt, Artificial Sequence
  Description of Artificial Sequence: Synthetic oligonucleotide
  Sense strand starting at position 112 of SEQ ID NO: 589001
guaacagaagccuaauagu

SEQ ID NO: 904205 - RNA, 19 nt, Artificial Sequence
  Description of Artificial Sequence: Synthetic oligonucleotide
  Antisense strand to SEQ ID NO: 904204
acuauuaggcuucuguuac

SEQ ID NO: 904206 - RNA, 19 nt, Artificial Sequence
  Description of Artificial Sequence: Synthetic oligonucleotide
  Sense strand starting at position 382 of SEQ ID NO: 589001
gucaaaguaucuccgaaac

SEQ ID NO: 904207 - RNA, 19 nt, Artificial Sequence
  Description of Artificial Sequence: Synthetic oligonucleotide
  Antisense strand to SEQ ID NO: 904206
guuucggagauacuuugac

SEQ ID NO: 904208 - RNA, 19 nt, Artificial Sequence
  Description of Artificial Sequence: Synthetic oligonucleotide
  Sense strand starting at position 458 of SEQ ID NO: 589001
ugcccuaaucuagagaauu

SEQ ID NO: 904209 - RNA, 19 nt, Artificial Sequence
  Description of Artificial Sequence: Synthetic oligonucleotide
  Antisense strand to SEQ ID NO: 904208
aauucucuagauuagggca

SEQ ID NO: 904210 - RNA, 19 nt, Artificial Sequence
  Description of Artificial Sequence: Synthetic oligonucleotide
  Sense strand starting at position 503 of SEQ ID NO: 589001
cuacaaacagaucgggauu

SEQ ID NO: 904211 - RNA, 19 nt, Artificial Sequence
  Description of Artificial Sequence: Synthetic oligonucleotide
  Antisense strand to SEQ ID NO: 904210
aaucccgaucuguuuguag

SEQ ID NO: 904212 - RNA, 19 nt, Artificial Sequence
  Description of Artificial Sequence: Synthetic oligonucleotide
  Sense strand starting at position 987 of SEQ ID NO: 589001
gacugaaggaguggcuaau

SEQ ID NO: 904213 - RNA, 19 nt, Artificial Sequence
  Description of Artificial Sequence: Synthetic oligonucleotide
  Antisense strand to SEQ ID NO: 904212
auuagccacuccuucaguc

SEQ ID NO: 904214 - RNA, 19 nt, Artificial Sequence
  Description of Artificial Sequence: Synthetic oligonucleotide
  Sense strand starting at position 993 of SEQ ID NO: 589001
aggaguggcuaauuacuca

SEQ ID NO: 904215 - RNA, 19 nt, Artificial Sequence
  Description of Artificial Sequence: Synthetic oligonucleotide
  Antisense strand to SEQ ID NO: 904214
ugaguaauuagccacuccu

SEQ ID NO: 904216 - RNA, 19 nt, Artificial Sequence
  Description of Artificial Sequence: Synthetic oligonucleotide
  Sense strand starting at position 997 of SEQ ID NO: 589001
guggcuaauuacucaaaca

SEQ ID NO: 904217 - RNA, 19 nt, Artificial Sequence
  Description of Artificial Sequence: Synthetic oligonucleotide
  Antisense strand to SEQ ID NO: 904216
uguuugaguaauuagccac

SEQ ID NO: 904218 - RNA, 19 nt, Artificial Sequence
  Description of Artificial Sequence: Synthetic oligonucleotide
  Sense strand starting at position 1040 of SEQ ID NO: 589001
gucgguucucaaagugguu

SEQ ID NO: 904219 - RNA, 19 nt, Artificial Sequence
  Description of Artificial Sequence: Synthetic oligonucleotide
  Antisense strand to SEQ ID NO: 904218
aaccacuuugagaaccgac

SEQ ID NO: 904220 - RNA, 19 nt, Artificial Sequence
  Description of Artificial Sequence: Synthetic oligonucleotide
  Sense strand starting at position 1247 of SEQ ID NO: 589001
aaucguaagccuuucgguu

SEQ ID NO: 904221 - RNA, 19 nt, Artificial Sequence
  Description of Artificial Sequence: Synthetic oligonucleotide
  Antisense strand to SEQ ID NO: 904220
aaccgaaaggcuuacgauu

SEQ ID NO: 904222 - RNA, 19 nt, Artificial Sequence
  Description of Artificial Sequence: Synthetic oligonucleotide
  Sense strand starting at position 1261 of SEQ ID NO: 589001
cgguucugccaccaggaaa

SEQ ID NO: 904223 - RNA, 19 nt, Artificial Sequence
  Description of Artificial Sequence: Synthetic oligonucleotide
  Antisense strand to SEQ ID NO: 904222
uuuccugguggcagaaccg

SEQ ID NO: 904224 - RNA, 19 nt, Artificial Sequence
  Description of Artificial Sequence: Synthetic oligonucleotide
  Sense strand starting at position 1281 of SEQ ID NO: 589001
uuccauagaaggugagauu

SEQ ID NO: 904225 - RNA, 19 nt, Artificial Sequence
  Description of Artificial Sequence: Synthetic oligonucleotide
  Antisense strand to SEQ ID NO: 904224
aaucucaccuucuauggaa

SEQ ID NO: 904226 - RNA, 19 nt, Artificial Sequence
  Description of Artificial Sequence: Synthetic oligonucleotide
  Sense strand starting at position 1343 of SEQ ID NO: 589001
ccaggacuucagggucaga

SEQ ID NO: 904227 - RNA, 19 nt, Artificial Sequence
  Description of Artificial Sequence: Synthetic oligonucleotide
  Antisense strand to SEQ ID NO: 904226
ucugacccugaaguccugg

SEQ ID NO: 904228 - RNA, 19 nt, Artificial Sequence
  Description of Artificial Sequence: Synthetic oligonucleotide
  Sense strand starting at position 1353 of SEQ ID NO: 589001
agggucagacuucguaaag

SEQ ID NO: 904229 - RNA, 19 nt, Artificial Sequence
  Description of Artificial Sequence: Synthetic oligonucleotide
  Antisense strand to SEQ ID NO: 904228
cuuuacgaagucugacccu

SEQ ID NO: 904230 - RNA, 19 nt, Artificial Sequence
  Description of Artificial Sequence: Synthetic oligonucleotide
  Sense strand starting at position 1907 of SEQ ID NO: 589001
gagugcagcuacucgauuu

SEQ ID NO: 904231 - RNA, 19 nt, Artificial Sequence
  Description of Artificial Sequence: Synthetic oligonucleotide
  Antisense strand to SEQ ID NO: 904230
aaaucgaguagcugcacuc

SEQ ID NO: 904232 - RNA, 19 nt, Artificial Sequence
  Description of Artificial Sequence: Synthetic oligonucleotide
  Sense strand starting at position 2321 of SEQ ID NO: 589001
ccgagaggccucugacaca

SEQ ID NO: 904233 - RNA, 19 nt, Artificial Sequence
  Description of Artificial Sequence: Synthetic oligonucleotide
  Antisense strand to SEQ ID NO: 904232
ugugucagaggccucucgg

SEQ ID NO: 904234 - RNA, 19 nt, Artificial Sequence
  Description of Artificial Sequence: Synthetic oligonucleotide
  Sense strand starting at position 2493 of SEQ ID NO: 589001
cuccaaacauagguguaua

SEQ ID NO: 904235 - RNA, 19 nt, Artificial Sequence
  Description of Artificial Sequence: Synthetic oligonucleotide
  Antisense strand to SEQ ID NO: 904234
uauacaccuauguuuggag

SEQ ID NO: 904236 - RNA, 19 nt, Artificial Sequence
  Description of Artificial Sequence: Synthetic oligonucleotide
  Sense strand starting at position 2516 of SEQ ID NO: 589001
gugcuugaacuauaaacuc

SEQ ID NO: 904237 - RNA, 19 nt, Artificial Sequence
  Description of Artificial Sequence: Synthetic oligonucleotide
  Antisense strand to SEQ ID NO: 904236
gaguuuauaguucaagcac

SEQ ID NO: 904238 - RNA, 19 nt, Artificial Sequence
  Description of Artificial Sequence: Synthetic oligonucleotide
  Sense strand starting at position 2620 of SEQ ID NO: 589001
gauauuuguuggcugaguu

SEQ ID NO: 904239 - RNA, 19 nt, Artificial Sequence
  Description of Artificial Sequence: Synthetic oligonucleotide
  Antisense strand to SEQ ID NO: 904238
aacucagccaacaaauauc

SEQ ID NO: 904240 - RNA, 19 nt, Artificial Sequence
  Description of Artificial Sequence: Synthetic oligonucleotide
  Sense strand starting at position 2621 of SEQ ID NO: 589001
auauuuguuggcugaguuu

SEQ ID NO: 904241 - RNA, 19 nt, Artificial Sequence
  Description of Artificial Sequence: Synthetic oligonucleotide
  Antisense strand to SEQ ID NO: 904240
aaacucagccaacaaauau

SEQ ID NO: 904242 - RNA, 19 nt, Artificial Sequence
  Description of Artificial Sequence: Synthetic oligonucleotide
  Sense strand starting at position 2686 of SEQ ID NO: 589001
aagcuagaucuuuaagagu

SEQ ID NO: 904243 - RNA, 19 nt, Artificial Sequence
  Description of Artificial Sequence: Synthetic oligonucleotide
  Antisense strand to SEQ ID NO: 904242
acucuuaaagaucuagcuu

SEQ ID NO: 904244 - RNA, 19 nt, Artificial Sequence
  Description of Artificial Sequence: Synthetic oligonucleotide
  Sense strand starting at position 2769 of SEQ ID NO: 589001
agugacaaguguuuacaaa

SEQ ID NO: 904245 - RNA, 19 nt, Artificial Sequence
  Description of Artificial Sequence: Synthetic oligonucleotide
  Antisense strand to SEQ ID NO: 904244
uuuguaaacacuugucacu

SEQ ID NO: 904246 - RNA, 19 nt, Artificial Sequence
  Description of Artificial Sequence: Synthetic oligonucleotide
  Sense strand starting at position 2770 of SEQ ID NO: 589001
gugacaaguguuuacaaag

SEQ ID NO: 904247 - RNA, 19 nt, Artificial Sequence
  Description of Artificial Sequence: Synthetic oligonucleotide
  Antisense strand to SEQ ID NO: 904246
cuuuguaaacacuugucac

SEQ ID NO: 904248 - RNA, 19 nt, Artificial Sequence
  Description of Artificial Sequence: Synthetic oligonucleotide
  Sense strand starting at position 2883 of SEQ ID NO: 589001
aucugcuaucaacaucgau

SEQ ID NO: 904249 - RNA, 19 nt, Artificial Sequence
  Description of Artificial Sequence: Synthetic oligonucleotide
  Antisense strand to SEQ ID NO: 904248
aucgauguugauagcagau

SEQ ID NO: 904250 - RNA, 19 nt, Artificial Sequence
  Description of Artificial Sequence: Synthetic oligonucleotide
  Sense strand starting at position 2898 of SEQ ID NO: 589001
cgauuugccuucucuagaa

SEQ ID NO: 904251 - RNA, 19 nt, Artificial Sequence
  Description of Artificial Sequence: Synthetic oligonucleotide
  Antisense strand to SEQ ID NO: 904250
uucuagagaaggcaaaucg

SEQ ID NO: 904252 - RNA, 19 nt, Artificial Sequence
  Description of Artificial Sequence: Synthetic oligonucleotide
  Sense strand starting at position 2950 of SEQ ID NO: 589001
ccaugucuggcucaugaaa

SEQ ID NO: 904253 - RNA, 19 nt, Artificial Sequence
  Description of Artificial Sequence: Synthetic oligonucleotide
  Antisense strand to SEQ ID NO: 904252
uuucaugagccagacaugg

SEQ ID NO: 904254 - RNA, 19 nt, Artificial Sequence
  Description of Artificial Sequence: Synthetic oligonucleotide
  Sense strand starting at position 2978 of SEQ ID NO: 589001
auagucauccagugauaac

SEQ ID NO: 904255 - RNA, 19 nt, Artificial Sequence
  Description of Artificial Sequence: Synthetic oligonucleotide
  Antisense strand to SEQ ID NO: 904254
guuaucacuggaugacuau

SEQ ID NO: 904256 - RNA, 19 nt, Artificial Sequence
  Description of Artificial Sequence: Synthetic oligonucleotide
  Sense strand starting at position 3008 of SEQ ID NO: 589001
cuaauaguucuugaguccu

SEQ ID NO: 904257 - RNA, 19 nt, Artificial Sequence
  Description of Artificial Sequence: Synthetic oligonucleotide
  Antisense strand to SEQ ID NO: 904256
aggacucaagaacuauuag

SEQ ID NO: 904258 - RNA, 19 nt, Artificial Sequence
  Description of Artificial Sequence: Synthetic oligonucleotide
  Sense strand starting at position 3033 of SEQ ID NO: 589001
gugccaggacucuacugaa

SEQ ID NO: 904259 - RNA, 19 nt, Artificial Sequence
  Description of Artificial Sequence: Synthetic oligonucleotide
  Antisense strand to SEQ ID NO: 904258
uucaguagaguccuggcac

SEQ ID NO: 904260 - RNA, 19 nt, Artificial Sequence
  Description of Artificial Sequence: Synthetic oligonucleotide
  Sense strand starting at position 3146 of SEQ ID NO: 589001
aguaauaugccugaggcca

SEQ ID NO: 904261 - RNA, 19 nt, Artificial Sequence
  Description of Artificial Sequence: Synthetic oligonucleotide
  Antisense strand to SEQ ID NO: 904260
uggccucaggcauauuacu

SEQ ID NO: 904262 - RNA, 19 nt, Artificial Sequence
  Description of Artificial Sequence: Synthetic oligonucleotide
  Sense strand starting at position 3170 of SEQ ID NO: 589001
caguuaaguaaguagggau

SEQ ID NO: 904263 - RNA, 19 nt, Artificial Sequence
  Description of Artificial Sequence: Synthetic oligonucleotide
  Antisense strand to SEQ ID NO: 904262
aucccuacuuacuuaacug

SEQ ID NO: 904264 - RNA, 19 nt, Artificial Sequence
  Description of Artificial Sequence: Synthetic oligonucleotide
  Sense strand starting at position 3308 of SEQ ID NO: 589001
gugcaaguccauuacauac

SEQ ID NO: 904265 - RNA, 19 nt, Artificial Sequence
  Description of Artificial Sequence: Synthetic oligonucleotide
  Antisense strand to SEQ ID NO: 904264
guauguaauggacuugcac

SEQ ID NO: 904266 - RNA, 19 nt, Artificial Sequence
  Description of Artificial Sequence: Synthetic oligonucleotide
  Sense strand starting at position 3490 of SEQ ID NO: 589001
ccuugaauuguguacuuac

SEQ ID NO: 904267 - RNA, 19 nt, Artificial Sequence
  Description of Artificial Sequence: Synthetic oligonucleotide
  Antisense strand to SEQ ID NO: 904266
guaaguacacaauucaagg

SEQ ID NO: 904268 - RNA, 19 nt, Artificial Sequence
  Description of Artificial Sequence: Synthetic oligonucleotide
  Sense strand starting at position 3493 of SEQ ID NO: 589001
ugaauuguguacuuacaau

SEQ ID NO: 904269 - RNA, 19 nt, Artificial Sequence
  Description of Artificial Sequence: Synthetic oligonucleotide
  Antisense strand to SEQ ID NO: 904268
auuguaaguacacaauuca

SEQ ID NO: 904270 - RNA, 19 nt, Artificial Sequence
  Description of Artificial Sequence: Synthetic oligonucleotide
  Sense strand starting at position 3515 of SEQ ID NO: 589001
uggaacuuaugauuaugua

SEQ ID NO: 904271 - RNA, 19 nt, Artificial Sequence
  Description of Artificial Sequence: Synthetic oligonucleotide
  Antisense strand to SEQ ID NO: 904270
uacauaaucauaaguucca

SEQ ID NO: 904272 - RNA, 19 nt, Artificial Sequence
  Description of Artificial Sequence: Synthetic oligonucleotide
  Sense strand starting at position 3607 of SEQ ID NO: 589001
ggauuacagcacugggaga

SEQ ID NO: 904273 - RNA, 19 nt, Artificial Sequence
  Description of Artificial Sequence: Synthetic oligonucleotide
  Antisense strand to SEQ ID NO: 904272
ucucccagugcuguaaucc

SEQ ID NO: 904274 - RNA, 19 nt, Artificial Sequence
  Description of Artificial Sequence: Synthetic oligonucleotide
  Sense strand starting at position 3634 of SEQ ID NO: 589001
ggaggcuaacuugaguuua

SEQ ID NO: 904275 - RNA, 19 nt, Artificial Sequence
  Description of Artificial Sequence: Synthetic oligonucleotide
  Antisense strand to SEQ ID NO: 904274
uaaacucaaguuagccucc

SEQ ID NO: 904276 - RNA, 19 nt, Artificial Sequence
  Description of Artificial Sequence: Synthetic oligonucleotide
  Sense strand starting at position 3639 of SEQ ID NO: 589001
cuaacuugaguuuaggagu

SEQ ID NO: 904277 - RNA, 19 nt, Artificial Sequence
  Description of Artificial Sequence: Synthetic oligonucleotide
  Antisense strand to SEQ ID NO: 904276
acuccuaaacucaaguuag

SEQ ID NO: 904278 - RNA, 19 nt, Artificial Sequence
  Description of Artificial Sequence: Synthetic oligonucleotide
  Sense strand starting at position 3808 of SEQ ID NO: 589001
aucuguaaauugcuuagaa

SEQ ID NO: 904279 - RNA, 19 nt, Artificial Sequence
  Description of Artificial Sequence: Synthetic oligonucleotide
  Antisense strand to SEQ ID NO: 904278
uucuaagcaauuuacagau

SEQ ID NO: 904280 - RNA, 19 nt, Artificial Sequence
  Description of Artificial Sequence: Synthetic oligonucleotide
  Sense strand starting at position 3809 of SEQ ID NO: 589001
ucuguaaauugcuuagaag

SEQ ID NO: 904281 - RNA, 19 nt, Artificial Sequence
  Description of Artificial Sequence: Synthetic oligonucleotide
  Antisense strand to SEQ ID NO: 904280
cuucuaagcaauuuacaga

SEQ ID NO: 904282 - RNA, 19 nt, Artificial Sequence
  Description of Artificial Sequence: Synthetic oligonucleotide
  Sense strand starting at position 142 of SEQ ID NO: 589002
uuaagcauucuagggaucu

SEQ ID NO: 904283 - RNA, 19 nt, Artificial Sequence
  Description of Artificial Sequence: Synthetic oligonucleotide
  Antisense strand to SEQ ID NO: 904282
agaucccuagaaugcuuaa

SEQ ID NO: 904284 - RNA, 19 nt, Artificial Sequence
  Description of Artificial Sequence: Synthetic oligonucleotide
  Sense strand starting at position 177 of SEQ ID NO: 589002
ggcagaauuaguugcaggu

SEQ ID NO: 904285 - RNA, 19 nt, Artificial Sequence
  Description of Artificial Sequence: Synthetic oligonucleotide
  Antisense strand to SEQ ID NO: 904284
accugcaacuaauucugcc

SEQ ID NO: 904286 - RNA, 19 nt, Artificial Sequence
  Description of Artificial Sequence: Synthetic oligonucleotide
  Sense strand starting at position 206 of SEQ ID NO: 589002
ccuauauguuuggccacaa

SEQ ID NO: 904287 - RNA, 19 nt, Artificial Sequence
  Description of Artificial Sequence: Synthetic oligonucleotide
  Antisense strand to SEQ ID NO: 904286
uuguggccaaacauauagg

SEQ ID NO: 904288 - RNA, 19 nt, Artificial Sequence
  Description of Artificial Sequence: Synthetic oligonucleotide
  Sense strand starting at position 207 of SEQ ID NO: 589002
cuauauguuuggccacaaa

SEQ ID NO: 904289 - RNA, 19 nt, Artificial Sequence
  Description of Artificial Sequence: Synthetic oligonucleotide
  Antisense strand to SEQ ID NO: 904288
uuuguggccaaacauauag

SEQ ID NO: 904290 - RNA, 19 nt, Artificial Sequence
  Description of Artificial Sequence: Synthetic oligonucleotide
  Sense strand starting at position 210 of SEQ ID NO: 589002
uauguuuggccacaaagua

SEQ ID NO: 904291 - RNA, 19 nt, Artificial Sequence
  Description of Artificial Sequence: Synthetic oligonucleotide
  Antisense strand to SEQ ID NO: 904290
uacuuuguggccaaacaua

SEQ ID NO: 904292 - RNA, 19 nt, Artificial Sequence
  Description of Artificial Sequence: Synthetic oligonucleotide
  Sense strand starting at position 268 of SEQ ID NO: 589002
gaaauuagguaaucaguuu

SEQ ID NO: 904293 - RNA, 19 nt, Artificial Sequence
  Description of Artificial Sequence: Synthetic oligonucleotide
  Antisense strand to SEQ ID NO: 904292
aaacugauuaccuaauuuc

SEQ ID NO: 904294 - RNA, 19 nt, Artificial Sequence
  Description of Artificial Sequence: Synthetic oligonucleotide
  Sense strand starting at position 313 of SEQ ID NO: 589002
auaucugcuccaugaggga

SEQ ID NO: 904295 - RNA, 19 nt, Artificial Sequence
  Description of Artificial Sequence: Synthetic oligonucleotide
  Antisense strand to SEQ ID NO: 904294
ucccucauggagcagauau

SEQ ID NO: 904296 - RNA, 19 nt, Artificial Sequence
  Description of Artificial Sequence: Synthetic oligonucleotide
  Sense strand starting at position 370 of SEQ ID NO: 589002
uggcaagagcuucguaaca

SEQ ID NO: 904297 - RNA, 19 nt, Artificial Sequence
  Description of Artificial Sequence: Synthetic oligonucleotide
  Antisense strand to SEQ ID NO: 904296
uguuacgaagcucuugcca

SEQ ID NO: 904298 - RNA, 19 nt, Artificial Sequence
  Description of Artificial Sequence: Synthetic oligonucleotide
  Sense strand starting at position 377 of SEQ ID NO: 589002
agcuucguaacagauguaa

SEQ ID NO: 904299 - RNA, 19 nt, Artificial Sequence
  Description of Artificial Sequence: Synthetic oligonucleotide
  Antisense strand to SEQ ID NO: 904298
uuacaucuguuacgaagcu

SEQ ID NO: 904300 - RNA, 19 nt, Artificial Sequence
  Description of Artificial Sequence: Synthetic oligonucleotide
  Sense strand starting at position 447 of SEQ ID NO: 589002
auauaagaucuuugcaagu

SEQ ID NO: 904301 - RNA, 19 nt, Artificial Sequence
  Description of Artificial Sequence: Synthetic oligonucleotide
  Antisense strand to SEQ ID NO: 904300
acuugcaaagaucuuauau

SEQ ID NO: 904302 - RNA, 19 nt, Artificial Sequence
  Description of Artificial Sequence: Synthetic oligonucleotide
  Sense strand starting at position 464 of SEQ ID NO: 589002
guuuaaguaaggcagaauu

SEQ ID NO: 904303 - RNA, 19 nt, Artificial Sequence
  Description of Artificial Sequence: Synthetic oligonucleotide
  Antisense strand to SEQ ID NO: 904302
aauucugccuuacuuaaac

SEQ ID NO: 904304 - RNA, 19 nt, Artificial Sequence
  Description of Artificial Sequence: Synthetic oligonucleotide
  Sense strand starting at position 568 of SEQ ID NO: 589002
guuugaucucuggguggua

SEQ ID NO: 904305 - RNA, 19 nt, Artificial Sequence
  Description of Artificial Sequence: Synthetic oligonucleotide
  Antisense strand to SEQ ID NO: 904304
uaccacccagagaucaaac

SEQ ID NO: 904306 - RNA, 19 nt, Artificial Sequence
  Description of Artificial Sequence: Synthetic oligonucleotide
  Sense strand starting at position 570 of SEQ ID NO: 589002
uugaucucugggugguaga

SEQ ID NO: 904307 - RNA, 19 nt, Artificial Sequence
  Description of Artificial Sequence: Synthetic oligonucleotide
  Antisense strand to SEQ ID NO: 904306
ucuaccacccagagaucaa

SEQ ID NO: 904308 - RNA, 19 nt, Artificial Sequence
  Description of Artificial Sequence: Synthetic oligonucleotide
  Sense strand starting at position 742 of SEQ ID NO: 589002
uuugacuacugaucucuga

SEQ ID NO: 904309 - RNA, 19 nt, Artificial Sequence
  Description of Artificial Sequence: Synthetic oligonucleotide
  Antisense strand to SEQ ID NO: 904308
ucagagaucaguagucaaa

SEQ ID NO: 904310 - RNA, 19 nt, Artificial Sequence
  Description of Artificial Sequence: Synthetic oligonucleotide
  Sense strand starting at position 921 of SEQ ID NO: 589002
aucuuuagagaaugcucaa

SEQ ID NO: 904311 - RNA, 19 nt, Artificial Sequence
  Description of Artificial Sequence: Synthetic oligonucleotide
  Antisense strand to SEQ ID NO: 904310
uugagcauucucuaaagau

SEQ ID NO: 904312 - RNA, 19 nt, Artificial Sequence
  Description of Artificial Sequence: Synthetic oligonucleotide
  Sense strand starting at position 970 of SEQ ID NO: 589002
uucuaacguccaggaaauu

SEQ ID NO: 904313 - RNA, 19 nt, Artificial Sequence
  Description of Artificial Sequence: Synthetic oligonucleotide
  Antisense strand to SEQ ID NO: 904312
aauuuccuggacguuagaa

SEQ ID NO: 904314 - RNA, 19 nt, Artificial Sequence
  Description of Artificial Sequence: Synthetic oligonucleotide
  Sense strand starting at position 1021 of SEQ ID NO: 589002
gacagauguuuagacucca

SEQ ID NO: 904315 - RNA, 19 nt, Artificial Sequence
  Description of Artificial Sequence: Synthetic oligonucleotide
  Antisense strand to SEQ ID NO: 904314
uggagucuaaacaucuguc

SEQ ID NO: 904316 - RNA, 19 nt, Artificial Sequence
  Description of Artificial Sequence: Synthetic oligonucleotide
  Sense strand starting at position 1142 of SEQ ID NO: 589002
uguaaucugcuacaaagag

SEQ ID NO: 904317 - RNA, 19 nt, Artificial Sequence
  Description of Artificial Sequence: Synthetic oligonucleotide
  Antisense strand to SEQ ID NO: 904316
cucuuuguagcagauuaca

SEQ ID NO: 904318 - RNA, 19 nt, Artificial Sequence
  Description of Artificial Sequence: Synthetic oligonucleotide
  Sense strand starting at position 1214 of SEQ ID NO: 589002
caugcuauuucugaggaca

SEQ ID NO: 904319 - RNA, 19 nt, Artificial Sequence
  Description of Artificial Sequence: Synthetic oligonucleotide
  Antisense strand to SEQ ID NO: 904318
uguccucagaaauagcaug

SEQ ID NO: 904320 - RNA, 19 nt, Artificial Sequence
  Description of Artificial Sequence: Synthetic oligonucleotide
  Sense strand starting at position 1216 of SEQ ID NO: 589002
ugcuauuucugaggacaag

SEQ ID NO: 904321 - RNA, 19 nt, Artificial Sequence
  Description of Artificial Sequence: Synthetic oligonucleotide
  Antisense strand to SEQ ID NO: 904320
cuuguccucagaaauagca

SEQ ID NO: 904322 - RNA, 19 nt, Artificial Sequence
  Description of Artificial Sequence: Synthetic oligonucleotide
  Sense strand starting at position 1545 of SEQ ID NO: 589002
acaugaagcucuuaaugaa

SEQ ID NO: 904323 - RNA, 19 nt, Artificial Sequence
  Description of Artificial Sequence: Synthetic oligonucleotide
  Antisense strand to SEQ ID NO: 904322
uucauuaagagcuucaugu

SEQ ID NO: 904324 - RNA, 19 nt, Artificial Sequence
  Description of Artificial Sequence: Synthetic oligonucleotide
  Sense strand starting at position 1560 of SEQ ID NO: 589002
ugaagacaaugucaucuaa

SEQ ID NO: 904325 - RNA, 19 nt, Artificial Sequence
  Description of Artificial Sequence: Synthetic oligonucleotide
  Antisense strand to SEQ ID NO: 904324
uuagaugacauugucuuca

SEQ ID NO: 904326 - RNA, 19 nt, Artificial Sequence
  Description of Artificial Sequence: Synthetic oligonucleotide
  Sense strand starting at position 1873 of SEQ ID NO: 589002
cuuggucuccagugagacu

SEQ ID NO: 904327 - RNA, 19 nt, Artificial Sequence
  Description of Artificial Sequence: Synthetic oligonucleotide
  Antisense strand to SEQ ID NO: 904326
agucucacuggagaccaag

SEQ ID NO: 904328 - RNA, 19 nt, Artificial Sequence
  Description of Artificial Sequence: Synthetic oligonucleotide
  Sense strand starting at position 1944 of SEQ ID NO: 589002
agggcuuuccagggcagaa

SEQ ID NO: 904329 - RNA, 19 nt, Artificial Sequence
  Description of Artificial Sequence: Synthetic oligonucleotide
  Antisense strand to SEQ ID NO: 904328
uucugcccuggaaagcccu

SEQ ID NO: 904330 - RNA, 19 nt, Artificial Sequence
  Description of Artificial Sequence: Synthetic oligonucleotide
  Sense strand starting at position 1946 of SEQ ID NO: 589002
ggcuuuccagggcagaauu

SEQ ID NO: 904331 - RNA, 19 nt, Artificial Sequence
  Description of Artificial Sequence: Synthetic oligonucleotide
  Antisense strand to SEQ ID NO: 904330
aauucugcccuggaaagcc

SEQ ID NO: 904332 - RNA, 19 nt, Artificial Sequence
  Description of Artificial Sequence: Synthetic oligonucleotide
  Sense strand starting at position 1956 of SEQ ID NO: 589002
ggcagaauuuaagacaugu

SEQ ID NO: 904333 - RNA, 19 nt, Artificial Sequence
  Description of Artificial Sequence: Synthetic oligonucleotide
  Antisense strand to SEQ ID NO: 904332
acaugucuuaaauucugcc

SEQ ID NO: 904334 - RNA, 19 nt, Artificial Sequence
  Description of Artificial Sequence: Synthetic oligonucleotide
  Sense strand starting at position 1965 of SEQ ID NO: 589002
uaagacaugucaguuaaag

SEQ ID NO: 904335 - RNA, 19 nt, Artificial Sequence
  Description of Artificial Sequence: Synthetic oligonucleotide
  Antisense strand to SEQ ID NO: 904334
cuuuaacugacaugucuua

SEQ ID NO: 904336 - RNA, 19 nt, Artificial Sequence
  Description of Artificial Sequence: Synthetic oligonucleotide
  Sense strand starting at position 1967 of SEQ ID NO: 589002
agacaugucaguuaaagug

SEQ ID NO: 904337 - RNA, 19 nt, Artificial Sequence
  Description of Artificial Sequence: Synthetic oligonucleotide
  Antisense strand to SEQ ID NO: 904336
cacuuuaacugacaugucu

SEQ ID NO: 904338 - RNA, 19 nt, Artificial Sequence
  Description of Artificial Sequence: Synthetic oligonucleotide
  Sense strand starting at position 2007 of SEQ ID NO: 589002
gcggaugcuucugcaggaa

SEQ ID NO: 904339 - RNA, 19 nt, Artificial Sequence
  Description of Artificial Sequence: Synthetic oligonucleotide
  Antisense strand to SEQ ID NO: 904338
uuccugcagaagcauccgc

SEQ ID NO: 904340 - RNA, 19 nt, Artificial Sequence
  Description of Artificial Sequence: Synthetic oligonucleotide
  Sense strand starting at position 2060 of SEQ ID NO: 589002
gcugcagccuaauucuaau

SEQ ID NO: 904341 - RNA, 19 nt, Artificial Sequence
  Description of Artificial Sequence: Synthetic oligonucleotide
  Antisense strand to SEQ ID NO: 904340
auuagaauuaggcugcagc

SEQ ID NO: 904342 - RNA, 19 nt, Artificial Sequence
  Description of Artificial Sequence: Synthetic oligonucleotide
  Sense strand starting at position 2084 of SEQ ID NO: 589002
acuguuuaauuaucuagag

SEQ ID NO: 904343 - RNA, 19 nt, Artificial Sequence
  Description of Artificial Sequence: Synthetic oligonucleotide
  Antisense strand to SEQ ID NO: 904342
cucuagauaauuaaacagu

SEQ ID NO: 904344 - RNA, 19 nt, Artificial Sequence
  Description of Artificial Sequence: Synthetic oligonucleotide
  Sense strand starting at position 2085 of SEQ ID NO: 589002
cuguuuaauuaucuagaga

SEQ ID NO: 904345 - RNA, 19 nt, Artificial Sequence
  Description of Artificial Sequence: Synthetic oligonucleotide
  Antisense strand to SEQ ID NO: 904344
ucucuagauaauuaaacag

SEQ ID NO: 904346 - RNA, 19 nt, Artificial Sequence
  Description of Artificial Sequence: Synthetic oligonucleotide
  Sense strand starting at position 2491 of SEQ ID NO: 589002
auaguaggcauaggaaaua

SEQ ID NO: 904347 - RNA, 19 nt, Artificial Sequence
  Description of Artificial Sequence: Synthetic oligonucleotide
  Antisense strand to SEQ ID NO: 904346
uauuuccuaugccuacuau

SEQ ID NO: 904348 - RNA, 19 nt, Artificial Sequence
  Description of Artificial Sequence: Synthetic oligonucleotide
  Sense strand starting at position 2592 of SEQ ID NO: 589002
ggaauaagguggucguuga

SEQ ID NO: 904349 - RNA, 19 nt, Artificial Sequence
  Description of Artificial Sequence: Synthetic oligonucleotide
  Antisense strand to SEQ ID NO: 904348
ucaacgaccaccuuauucc

SEQ ID NO: 904350 - RNA, 19 nt, Artificial Sequence
  Description of Artificial Sequence: Synthetic oligonucleotide
  Sense strand starting at position 2639 of SEQ ID NO: 589002
ggcucuugcacaugcuaga

SEQ ID NO: 904351 - RNA, 19 nt, Artificial Sequence
  Description of Artificial Sequence: Synthetic oligonucleotide
  Antisense strand to SEQ ID NO: 904350
ucuagcaugugcaagagcc

SEQ ID NO: 904352 - RNA, 19 nt, Artificial Sequence
  Description of Artificial Sequence: Synthetic oligonucleotide
  Sense strand starting at position 2644 of SEQ ID NO: 589002
uugcacaugcuagaauuga

SEQ ID NO: 904353 - RNA, 19 nt, Artificial Sequence
  Description of Artificial Sequence: Synthetic oligonucleotide
  Antisense strand to SEQ ID NO: 904352
ucaauucuagcaugugcaa

SEQ ID NO: 904354 - RNA, 19 nt, Artificial Sequence
  Description of Artificial Sequence: Synthetic oligonucleotide
  Sense strand starting at position 3051 of SEQ ID NO: 589002
uaguaaauuccuuggaaag

SEQ ID NO: 904355 - RNA, 19 nt, Artificial Sequence
  Description of Artificial Sequence: Synthetic oligonucleotide
  Antisense strand to SEQ ID NO: 904354
cuuuccaaggaauuuacua

SEQ ID NO: 904356 - RNA, 19 nt, Artificial Sequence
  Description of Artificial Sequence: Synthetic oligonucleotide
  Sense strand starting at position 3053 of SEQ ID NO: 589002
guaaauuccuuggaaagag

SEQ ID NO: 904357 - RNA, 19 nt, Artificial Sequence
  Description of Artificial Sequence: Synthetic oligonucleotide
  Antisense strand to SEQ ID NO: 904356
cucuuuccaaggaauuuac

SEQ ID NO: 904358 - RNA, 19 nt, Artificial Sequence
  Description of Artificial Sequence: Synthetic oligonucleotide
  Sense strand starting at position 3680 of SEQ ID NO: 589002
gagcauaugcaaugacagu

SEQ ID NO: 904359 - RNA, 19 nt, Artificial Sequence
  Description of Artificial Sequence: Synthetic oligonucleotide
  Antisense strand to SEQ ID NO: 904358
acugucauugcauaugcuc

SEQ ID NO: 904360 - RNA, 19 nt, Artificial Sequence
  Description of Artificial Sequence: Synthetic oligonucleotide
  Sense strand starting at position 3705 of SEQ ID NO: 589002
guaucuguaugccuacuau

SEQ ID NO: 904361 - RNA, 19 nt, Artificial Sequence
  Description of Artificial Sequence: Synthetic oligonucleotide
  Antisense strand to SEQ ID NO: 904360
auaguaggcauacagauac

SEQ ID NO: 904362 - RNA, 19 nt, Artificial Sequence
  Description of Artificial Sequence: Synthetic oligonucleotide
  Sense strand starting at position 13 of SEQ ID NO: 589003
cagagcaaagccgauuauu

SEQ ID NO: 904363 - RNA, 19 nt, Artificial Sequence
  Description of Artificial Sequence: Synthetic oligonucleotide
  Antisense strand to SEQ ID NO: 904362
aauaaucggcuuugcucug

SEQ ID NO: 904364 - RNA, 19 nt, Artificial Sequence
  Description of Artificial Sequence: Synthetic oligonucleotide
  Sense strand starting at position 652 of SEQ ID NO: 589003
cggccuugauuucuuuaaa

SEQ ID NO: 904365 - RNA, 19 nt, Artificial Sequence
  Description of Artificial Sequence: Synthetic oligonucleotide
  Antisense strand to SEQ ID NO: 904364
uuuaaagaaaucaaggccg

SEQ ID NO: 904366 - RNA, 19 nt, Artificial Sequence
  Description of Artificial Sequence: Synthetic oligonucleotide
  Sense strand starting at position 709 of SEQ ID NO: 589003
uguaaauacuuccuaggcu

SEQ ID NO: 904367 - RNA, 19 nt, Artificial Sequence
  Description of Artificial Sequence: Synthetic oligonucleotide
  Antisense strand to SEQ ID NO: 904366
agccuaggaaguauuuaca

SEQ ID NO: 904368 - RNA, 19 nt, Artificial Sequence
  Description of Artificial Sequence: Synthetic oligonucleotide
  Sense strand starting at position 1048 of SEQ ID NO: 589003
cccuuuaacugguccaagu

SEQ ID NO: 904369 - RNA, 19 nt, Artificial Sequence
  Description of Artificial Sequence: Synthetic oligonucleotide
  Antisense strand to SEQ ID NO: 904368
acuuggaccaguuaaaggg

SEQ ID NO: 904370 - RNA, 19 nt, Artificial Sequence
  Description of Artificial Sequence: Synthetic oligonucleotide
  Sense strand starting at position 1050 of SEQ ID NO: 589003
cuuuaacugguccaaguau

SEQ ID NO: 904371 - RNA, 19 nt, Artificial Sequence
  Description of Artificial Sequence: Synthetic oligonucleotide
  Antisense strand to SEQ ID NO: 904370
auacuuggaccaguuaaag

SEQ ID NO: 904372 - RNA, 19 nt, Artificial Sequence
  Description of Artificial Sequence: Synthetic oligonucleotide
  Sense strand starting at position 1114 of SEQ ID NO: 589003
ucaucuuucugguuaacag

SEQ ID NO: 904373 - RNA, 19 nt, Artificial Sequence
  Description of Artificial Sequence: Synthetic oligonucleotide
  Antisense strand to SEQ ID NO: 904372
cuguuaaccagaaagauga

SEQ ID NO: 904374 - RNA, 19 nt, Artificial Sequence
  Description of Artificial Sequence: Synthetic oligonucleotide
  Sense strand starting at position 1126 of SEQ ID NO: 589003
uuaacaguguuucccaaca

SEQ ID NO: 904375 - RNA, 19 nt, Artificial Sequence
  Description of Artificial Sequence: Synthetic oligonucleotide
  Antisense strand to SEQ ID NO: 904374
uguugggaaacacuguuaa

SEQ ID NO: 904376 - RNA, 19 nt, Artificial Sequence
  Description of Artificial Sequence: Synthetic oligonucleotide
  Sense strand starting at position 1177 of SEQ ID NO: 589003
auaauaugaucggcuucuu

SEQ ID NO: 904377 - RNA, 19 nt, Artificial Sequence
  Description of Artificial Sequence: Synthetic oligonucleotide
  Antisense strand to SEQ ID NO: 904376
aagaagccgaucauauuau

SEQ ID NO: 904378 - RNA, 19 nt, Artificial Sequence
  Description of Artificial Sequence: Synthetic oligonucleotide
  Sense strand starting at position 1427 of SEQ ID NO: 589003
augugaauucugcaucuuc

SEQ ID NO: 904379 - RNA, 19 nt, Artificial Sequence
  Description of Artificial Sequence: Synthetic oligonucleotide
  Antisense strand to SEQ ID NO: 904378
gaagaugcagaauucacau

SEQ ID NO: 904380 - RNA, 19 nt, Artificial Sequence
  Description of Artificial Sequence: Synthetic oligonucleotide
  Sense strand starting at position 2076 of SEQ ID NO: 589003
cgcacauuugccuacccau

SEQ ID NO: 904381 - RNA, 19 nt, Artificial Sequence
  Description of Artificial Sequence: Synthetic oligonucleotide
  Antisense strand to SEQ ID NO: 904380
auggguaggcaaaugugcg

SEQ ID NO: 904382 - RNA, 19 nt, Artificial Sequence
  Description of Artificial Sequence: Synthetic oligonucleotide
  Sense strand starting at position 2126 of SEQ ID NO: 589003
gguagagagugcuccugaa

SEQ ID NO: 904383 - RNA, 19 nt, Artificial Sequence
  Description of Artificial Sequence: Synthetic oligonucleotide
  Antisense strand to SEQ ID NO: 904382
uucaggagcacucucuacc

SEQ ID NO: 904384 - RNA, 19 nt, Artificial Sequence
  Description of Artificial Sequence: Synthetic oligonucleotide
  Sense strand starting at position 2130 of SEQ ID NO: 589003
gagagugcuccugaaacga

SEQ ID NO: 904385 - RNA, 19 nt, Artificial Sequence
  Description of Artificial Sequence: Synthetic oligonucleotide
  Antisense strand to SEQ ID NO: 904384
ucguuucaggagcacucuc

SEQ ID NO: 904386 - RNA, 19 nt, Artificial Sequence
  Description of Artificial Sequence: Synthetic oligonucleotide
  Sense strand starting at position 2427 of SEQ ID NO: 589003
aagaguguuccaggcugga

SEQ ID NO: 904387 - RNA, 19 nt, Artificial Sequence
  Description of Artificial Sequence: Synthetic oligonucleotide
  Antisense strand to SEQ ID NO: 904386
uccagccuggaacacucuu

SEQ ID NO: 904388 - RNA, 19 nt, Artificial Sequence
  Description of Artificial Sequence: Synthetic oligonucleotide
  Sense strand starting at position 2652 of SEQ ID NO: 589003
ggauguuaagcuuggauga

SEQ ID NO: 904389 - RNA, 19 nt, Artificial Sequence
  Description of Artificial Sequence: Synthetic oligonucleotide
  Antisense strand to SEQ ID NO: 904388
ucauccaagcuuaacaucc

SEQ ID NO: 904390 - RNA, 19 nt, Artificial Sequence
  Description of Artificial Sequence: Synthetic oligonucleotide
  Sense strand starting at position 2672 of SEQ ID NO: 589003
gucucagaaguuuagaguu

SEQ ID NO: 904391 - RNA, 19 nt, Artificial Sequence
  Description of Artificial Sequence: Synthetic oligonucleotide
  Antisense strand to SEQ ID NO: 904390
aacucuaaacuucugagac

SEQ ID NO: 904392 - RNA, 19 nt, Artificial Sequence
  Description of Artificial Sequence: Synthetic oligonucleotide
  Sense strand starting at position 2684 of SEQ ID NO: 589003
uagaguuagcaggagcuuu

SEQ ID NO: 904393 - RNA, 19 nt, Artificial Sequence
  Description of Artificial Sequence: Synthetic oligonucleotide
  Antisense strand to SEQ ID NO: 904392
aaagcuccugcuaacucua

SEQ ID NO: 904394 - RNA, 19 nt, Artificial Sequence
  Description of Artificial Sequence: Synthetic oligonucleotide
  Sense strand starting at position 2779 of SEQ ID NO: 589003
ucaauucgaggccauuaua

SEQ ID NO: 904395 - RNA, 19 nt, Artificial Sequence
  Description of Artificial Sequence: Synthetic oligonucleotide
  Antisense strand to SEQ ID NO: 904394
uauaauggccucgaauuga

SEQ ID NO: 904396 - RNA, 19 nt, Artificial Sequence
  Description of Artificial Sequence: Synthetic oligonucleotide
  Sense strand starting at position 2841 of SEQ ID NO: 589003
cgauauaggcaacaaguuu

SEQ ID NO: 904397 - RNA, 19 nt, Artificial Sequence
  Description of Artificial Sequence: Synthetic oligonucleotide
  Antisense strand to SEQ ID NO: 904396
aaacuuguugccuauaucg

SEQ ID NO: 904398 - RNA, 19 nt, Artificial Sequence
  Description of Artificial Sequence: Synthetic oligonucleotide
  Sense strand starting at position 2904 of SEQ ID NO: 589003
ggaugagaaaccuggguuu

SEQ ID NO: 904399 - RNA, 19 nt, Artificial Sequence
  Description of Artificial Sequence: Synthetic oligonucleotide
  Antisense strand to SEQ ID NO: 904398
aaacccagguuucucaucc

SEQ ID NO: 904400 - RNA, 19 nt, Artificial Sequence
  Description of Artificial Sequence: Synthetic oligonucleotide
  Sense strand starting at position 2907 of SEQ ID NO: 589003
ugagaaaccuggguuuaca

SEQ ID NO: 904401 - RNA, 19 nt, Artificial Sequence
  Description of Artificial Sequence: Synthetic oligonucleotide
  Antisense strand to SEQ ID NO: 904400
uguaaacccagguuucuca

SEQ ID NO: 904402 - RNA, 19 nt, Artificial Sequence
  Description of Artificial Sequence: Synthetic oligonucleotide
  Sense strand starting at position 2932 of SEQ ID NO: 589003
uguccaaggugacuuaaau

SEQ ID NO: 904403 - RNA, 19 nt, Artificial Sequence
  Description of Artificial Sequence: Synthetic oligonucleotide
  Antisense strand to SEQ ID NO: 904402
auuuaagucaccuuggaca

SEQ ID NO: 904404 - RNA, 19 nt, Artificial Sequence
  Description of Artificial Sequence: Synthetic oligonucleotide
  Sense strand starting at position 3015 of SEQ ID NO: 589003
accugacuucuaugugauc

SEQ ID NO: 904405 - RNA, 19 nt, Artificial Sequence
  Description of Artificial Sequence: Synthetic oligonucleotide
  Antisense strand to SEQ ID NO: 904404
gaucacauagaagucaggu

SEQ ID NO: 904406 - RNA, 19 nt, Artificial Sequence
  Description of Artificial Sequence: Synthetic oligonucleotide
  Sense strand starting at position 3016 of SEQ ID NO: 589003
ccugacuucuaugugaucu

SEQ ID NO: 904407 - RNA, 19 nt, Artificial Sequence
  Description of Artificial Sequence: Synthetic oligonucleotide
  Antisense strand to SEQ ID NO: 904406
agaucacauagaagucagg

SEQ ID NO: 904408 - RNA, 19 nt, Artificial Sequence
  Description of Artificial Sequence: Synthetic oligonucleotide
  Sense strand starting at position 3064 of SEQ ID NO: 589003
aacuaugcuuccgugaaag

SEQ ID NO: 904409 - RNA, 19 nt, Artificial Sequence
  Description of Artificial Sequence: Synthetic oligonucleotide
  Antisense strand to SEQ ID NO: 904408
cuuucacggaagcauaguu

SEQ ID NO: 904410 - RNA, 19 nt, Artificial Sequence
  Description of Artificial Sequence: Synthetic oligonucleotide
  Sense strand starting at position 3076 of SEQ ID NO: 589003
gugaaagucuggaagggaa

SEQ ID NO: 904411 - RNA, 19 nt, Artificial Sequence
  Description of Artificial Sequence: Synthetic oligonucleotide
  Antisense strand to SEQ ID NO: 904410
uucccuuccagacuuucac

SEQ ID NO: 904412 - RNA, 19 nt, Artificial Sequence
  Description of Artificial Sequence: Synthetic oligonucleotide
  Sense strand starting at position 3106 of SEQ ID NO: 589003
aaacgaugagccuauguau

SEQ ID NO: 904413 - RNA, 19 nt, Artificial Sequence
  Description of Artificial Sequence: Synthetic oligonucleotide
  Antisense strand to SEQ ID NO: 904412
auacauaggcucaucguuu

SEQ ID NO: 904414 - RNA, 19 nt, Artificial Sequence
  Description of Artificial Sequence: Synthetic oligonucleotide
  Sense strand starting at position 3183 of SEQ ID NO: 589003
ucuggagaagucuguaaau

SEQ ID NO: 904415 - RNA, 19 nt, Artificial Sequence
  Description of Artificial Sequence: Synthetic oligonucleotide
  Antisense strand to SEQ ID NO: 904414
auuuacagacuucuccaga

SEQ ID NO: 904416 - RNA, 19 nt, Artificial Sequence
  Description of Artificial Sequence: Synthetic oligonucleotide
  Sense strand starting at position 3185 of SEQ ID NO: 589003
uggagaagucuguaaaugu

SEQ ID NO: 904417 - RNA, 19 nt, Artificial Sequence
  Description of Artificial Sequence: Synthetic oligonucleotide
  Antisense strand to SEQ ID NO: 904416
acauuuacagacuucucca

SEQ ID NO: 904418 - RNA, 19 nt, Artificial Sequence
  Description of Artificial Sequence: Synthetic oligonucleotide
  Sense strand starting at position 3299 of SEQ ID NO: 589003
gugcuagugaugcaugaau

SEQ ID NO: 904419 - RNA, 19 nt, Artificial Sequence
  Description of Artificial Sequence: Synthetic oligonucleotide
  Antisense strand to SEQ ID NO: 904418
auucaugcaucacuagcac

SEQ ID NO: 904420 - RNA, 19 nt, Artificial Sequence
  Description of Artificial Sequence: Synthetic oligonucleotide
  Sense strand starting at position 3301 of SEQ ID NO: 589003
gcuagugaugcaugaauga

SEQ ID NO: 904421 - RNA, 19 nt, Artificial Sequence
  Description of Artificial Sequence: Synthetic oligonucleotide
  Antisense strand to SEQ ID NO: 904420
ucauucaugcaucacuagc

SEQ ID NO: 904422 - RNA, 19 nt, Artificial Sequence
  Description of Artificial Sequence: Synthetic oligonucleotide
  Sense strand starting at position 3353 of SEQ ID NO: 589003
gauaucauccaguaucgau

SEQ ID NO: 904423 - RNA, 19 nt, Artificial Sequence
  Description of Artificial Sequence: Synthetic oligonucleotide
  Antisense strand to SEQ ID NO: 904422
aucgauacuggaugauauc

SEQ ID NO: 904424 - RNA, 19 nt, Artificial Sequence
  Description of Artificial Sequence: Synthetic oligonucleotide
  Sense strand starting at position 3381 of SEQ ID NO: 589003
cuccaauagugguuuccaa

SEQ ID NO: 904425 - RNA, 19 nt, Artificial Sequence
  Description of Artificial Sequence: Synthetic oligonucleotide
  Antisense strand to SEQ ID NO: 904424
uuggaaaccacuauuggag

SEQ ID NO: 904426 - RNA, 19 nt, Artificial Sequence
  Description of Artificial Sequence: Synthetic oligonucleotide
  Sense strand starting at position 3457 of SEQ ID NO: 589003
gagucucaacuuugcaaug

SEQ ID NO: 904427 - RNA, 19 nt, Artificial Sequence
  Description of Artificial Sequence: Synthetic oligonucleotide
  Antisense strand to SEQ ID NO: 904426
cauugcaaaguugagacuc

SEQ ID NO: 904428 - RNA, 19 nt, Artificial Sequence
  Description of Artificial Sequence: Synthetic oligonucleotide
  Sense strand starting at position 3533 of SEQ ID NO: 589003
uguaguuacacaugggaau

SEQ ID NO: 904429 - RNA, 19 nt, Artificial Sequence
  Description of Artificial Sequence: Synthetic oligonucleotide
  Antisense strand to SEQ ID NO: 904428
auucccauguguaacuaca

SEQ ID NO: 904430 - RNA, 19 nt, Artificial Sequence
  Description of Artificial Sequence: Synthetic oligonucleotide
  Sense strand starting at position 3544 of SEQ ID NO: 589003
augggaauguccuugcuac

SEQ ID NO: 904431 - RNA, 19 nt, Artificial Sequence
  Description of Artificial Sequence: Synthetic oligonucleotide
  Antisense strand to SEQ ID NO: 904430
guagcaaggacauucccau

SEQ ID NO: 904432 - RNA, 19 nt, Artificial Sequence
  Description of Artificial Sequence: Synthetic oligonucleotide
  Sense strand starting at position 3545 of SEQ ID NO: 589003
ugggaauguccuugcuaca

SEQ ID NO: 904433 - RNA, 19 nt, Artificial Sequence
  Description of Artificial Sequence: Synthetic oligonucleotide
  Antisense strand to SEQ ID NO: 904432
uguagcaaggacauuccca

SEQ ID NO: 904434 - RNA, 19 nt, Artificial Sequence
  Description of Artificial Sequence: Synthetic oligonucleotide
  Sense strand starting at position 3570 of SEQ ID NO: 589003
cguacuuaggguuaaauau

SEQ ID NO: 904435 - RNA, 19 nt, Artificial Sequence
  Description of Artificial Sequence: Synthetic oligonucleotide
  Antisense strand to SEQ ID NO: 904434
auauuuaacccuaaguacg

SEQ ID NO: 904436 - RNA, 19 nt, Artificial Sequence
  Description of Artificial Sequence: Synthetic oligonucleotide
  Sense strand starting at position 3683 of SEQ ID NO: 589003
gugaaucuguuaguccaaa

SEQ ID NO: 904437 - RNA, 19 nt, Artificial Sequence
  Description of Artificial Sequence: Synthetic oligonucleotide
  Antisense strand to SEQ ID NO: 904436
uuuggacuaacagauucac

SEQ ID NO: 904438 - RNA, 19 nt, Artificial Sequence
  Description of Artificial Sequence: Synthetic oligonucleotide
  Sense strand starting at position 3684 of SEQ ID NO: 589003
ugaaucuguuaguccaaac

SEQ ID NO: 904439 - RNA, 19 nt, Artificial Sequence
  Description of Artificial Sequence: Synthetic oligonucleotide
  Antisense strand to SEQ ID NO: 904438
guuuggacuaacagauuca

SEQ ID NO: 904440 - RNA, 19 nt, Artificial Sequence
  Description of Artificial Sequence: Synthetic oligonucleotide
  Sense strand starting at position 3857 of SEQ ID NO: 589003
cugccucaucaugggaaua

SEQ ID NO: 904441 - RNA, 19 nt, Artificial Sequence
  Description of Artificial Sequence: Synthetic oligonucleotide
  Antisense strand to SEQ ID NO: 904440
uauucccaugaugaggcag

SEQ ID NO: 904442 - RNA, 19 nt, Artificial Sequence
  Description of Artificial Sequence: Synthetic oligonucleotide
  Sense strand starting at position 57 of SEQ ID NO: 589004
gaaccugaguccucuguua

SEQ ID NO: 904443 - RNA, 19 nt, Artificial Sequence
  Description of Artificial Sequence: Synthetic oligonucleotide
  Antisense strand to SEQ ID NO: 904442
uaacagaggacucagguuc

SEQ ID NO: 904444 - RNA, 19 nt, Artificial Sequence
  Description of Artificial Sequence: Synthetic oligonucleotide
  Sense strand starting at position 68 of SEQ ID NO: 589004
cucuguuacccgcagcaga

SEQ ID NO: 904445 - RNA, 19 nt, Artificial Sequence
  Description of Artificial Sequence: Synthetic oligonucleotide
  Antisense strand to SEQ ID NO: 904444
ucugcugcggguaacagag

SEQ ID NO: 904446 - RNA, 19 nt, Artificial Sequence
  Description of Artificial Sequence: Synthetic oligonucleotide
  Sense strand starting at position 184 of SEQ ID NO: 589004
gucaaauggcuuuauccac

SEQ ID NO: 904447 - RNA, 19 nt, Artificial Sequence
  Description of Artificial Sequence: Synthetic oligonucleotide
  Antisense strand to SEQ ID NO: 904446
guggauaaagccauuugac

SEQ ID NO: 904448 - RNA, 19 nt, Artificial Sequence
  Description of Artificial Sequence: Synthetic oligonucleotide
  Sense strand starting at position 225 of SEQ ID NO: 589004
ucuagagucacuggugcua

SEQ ID NO: 904449 - RNA, 19 nt, Artificial Sequence
  Description of Artificial Sequence: Synthetic oligonucleotide
  Antisense strand to SEQ ID NO: 904448
uagcaccagugacucuaga

SEQ ID NO: 904450 - RNA, 19 nt, Artificial Sequence
  Description of Artificial Sequence: Synthetic oligonucleotide
  Sense strand starting at position 454 of SEQ ID NO: 589004
gguaacguaaguuaccauu

SEQ ID NO: 904451 - RNA, 19 nt, Artificial Sequence
  Description of Artificial Sequence: Synthetic oligonucleotide
  Antisense strand to SEQ ID NO: 904450
aaugguaacuuacguuacc

SEQ ID NO: 904452 - RNA, 19 nt, Artificial Sequence
  Description of Artificial Sequence: Synthetic oligonucleotide
  Sense strand starting at position 501 of SEQ ID NO: 589004
aguagugagucuucuaaug

SEQ ID NO: 904453 - RNA, 19 nt, Artificial Sequence
  Description of Artificial Sequence: Synthetic oligonucleotide
  Antisense strand to SEQ ID NO: 904452
cauuagaagacucacuacu

SEQ ID NO: 904454 - RNA, 19 nt, Artificial Sequence
  Description of Artificial Sequence: Synthetic oligonucleotide
  Sense strand starting at position 512 of SEQ ID NO: 589004
uucuaaugcuaacaagaug

SEQ ID NO: 904455 - RNA, 19 nt, Artificial Sequence
  Description of Artificial Sequence: Synthetic oligonucleotide
  Antisense strand to SEQ ID NO: 904454
caucuuguuagcauuagaa

SEQ ID NO: 904456 - RNA, 19 nt, Artificial Sequence
  Description of Artificial Sequence: Synthetic oligonucleotide
  Sense strand starting at position 520 of SEQ ID NO: 589004
cuaacaagaugaugagaua

SEQ ID NO: 904457 - RNA, 19 nt, Artificial Sequence
  Description of Artificial Sequence: Synthetic oligonucleotide
  Antisense strand to SEQ ID NO: 904456
uaucucaucaucuuguuag

SEQ ID NO: 904458 - RNA, 19 nt, Artificial Sequence
  Description of Artificial Sequence: Synthetic oligonucleotide
  Sense strand starting at position 523 of SEQ ID NO: 589004
acaagaugaugagauaagu

SEQ ID NO: 904459 - RNA, 19 nt, Artificial Sequence
  Description of Artificial Sequence: Synthetic oligonucleotide
  Antisense strand to SEQ ID NO: 904458
acuuaucucaucaucuugu

SEQ ID NO: 904460 - RNA, 19 nt, Artificial Sequence
  Description of Artificial Sequence: Synthetic oligonucleotide
  Sense strand starting at position 548 of SEQ ID NO: 589004
ggccucacuuuacagagaa

SEQ ID NO: 904461 - RNA, 19 nt, Artificial Sequence
  Description of Artificial Sequence: Synthetic oligonucleotide
  Antisense strand to SEQ ID NO: 904460
uucucuguaaagugaggcc

SEQ ID NO: 904462 - RNA, 19 nt, Artificial Sequence
  Description of Artificial Sequence: Synthetic oligonucleotide
  Sense strand starting at position 616 of SEQ ID NO: 589004
guagcaaaguguagugaga

SEQ ID NO: 904463 - RNA, 19 nt, Artificial Sequence
  Description of Artificial Sequence: Synthetic oligonucleotide
  Antisense strand to SEQ ID NO: 904462
ucucacuacacuuugcuac

SEQ ID NO: 904464 - RNA, 19 nt, Artificial Sequence
  Description of Artificial Sequence: Synthetic oligonucleotide
  Sense strand starting at position 639 of SEQ ID NO: 589004
aggccugucugccuccaaa

SEQ ID NO: 904465 - RNA, 19 nt, Artificial Sequence
  Description of Artificial Sequence: Synthetic oligonucleotide
  Antisense strand to SEQ ID NO: 904464
uuuggaggcagacaggccu

SEQ ID NO: 904466 - RNA, 19 nt, Artificial Sequence
  Description of Artificial Sequence: Synthetic oligonucleotide
  Sense strand starting at position 666 of SEQ ID NO: 589004
uguuccucugcccaagagu

SEQ ID NO: 904467 - RNA, 19 nt, Artificial Sequence
  Description of Artificial Sequence: Synthetic oligonucleotide
  Antisense strand to SEQ ID NO: 904466
acucuugggcagaggaaca

SEQ ID NO: 904468 - RNA, 19 nt, Artificial Sequence
  Description of Artificial Sequence: Synthetic oligonucleotide
  Sense strand starting at position 805 of SEQ ID NO: 589004
aaugcugauggcugagaca

SEQ ID NO: 904469 - RNA, 19 nt, Artificial Sequence
  Description of Artificial Sequence: Synthetic oligonucleotide
  Antisense strand to SEQ ID NO: 904468
ugucucagccaucagcauu

SEQ ID NO: 904470 - RNA, 19 nt, Artificial Sequence
  Description of Artificial Sequence: Synthetic oligonucleotide
  Sense strand starting at position 847 of SEQ ID NO: 589004
aggagugaguggcuaacuu

SEQ ID NO: 904471 - RNA, 19 nt, Artificial Sequence
  Description of Artificial Sequence: Synthetic oligonucleotide
  Antisense strand to SEQ ID NO: 904470
aaguuagccacucacuccu

SEQ ID NO: 904472 - RNA, 19 nt, Artificial Sequence
  Description of Artificial Sequence: Synthetic oligonucleotide
  Sense strand starting at position 932 of SEQ ID NO: 589004
gcacuuugcggcugacaag

SEQ ID NO: 904473 - RNA, 19 nt, Artificial Sequence
  Description of Artificial Sequence: Synthetic oligonucleotide
  Antisense strand to SEQ ID NO: 904472
cuugucagccgcaaagugc

SEQ ID NO: 904474 - RNA, 19 nt, Artificial Sequence
  Description of Artificial Sequence: Synthetic oligonucleotide
  Sense strand starting at position 1990 of SEQ ID NO: 589004
gccaacacucgcugggaua

SEQ ID NO: 904475 - RNA, 19 nt, Artificial Sequence
  Description of Artificial Sequence: Synthetic oligonucleotide
  Antisense strand to SEQ ID NO: 904474
uaucccagcgaguguuggc

SEQ ID NO: 904476 - RNA, 19 nt, Artificial Sequence
  Description of Artificial Sequence: Synthetic oligonucleotide
  Sense strand starting at position 1991 of SEQ ID NO: 589004
ccaacacucgcugggauaa

SEQ ID NO: 904477 - RNA, 19 nt, Artificial Sequence
  Description of Artificial Sequence: Synthetic oligonucleotide
  Antisense strand to SEQ ID NO: 904476
uuaucccagcgaguguugg

SEQ ID NO: 904478 - RNA, 19 nt, Artificial Sequence
  Description of Artificial Sequence: Synthetic oligonucleotide
  Sense strand starting at position 2143 of SEQ ID NO: 589004
gaguguuccgcugaagaaa

SEQ ID NO: 904479 - RNA, 19 nt, Artificial Sequence
  Description of Artificial Sequence: Synthetic oligonucleotide
  Antisense strand to SEQ ID NO: 904478
uuucuucagcggaacacuc

SEQ ID NO: 904480 - RNA, 19 nt, Artificial Sequence
  Description of Artificial Sequence: Synthetic oligonucleotide
  Sense strand starting at position 2244 of SEQ ID NO: 589004
aagucaugggcauggguaa

SEQ ID NO: 904481 - RNA, 19 nt, Artificial Sequence
  Description of Artificial Sequence: Synthetic oligonucleotide
  Antisense strand to SEQ ID NO: 904480
uuacccaugcccaugacuu

SEQ ID NO: 904482 - RNA, 19 nt, Artificial Sequence
  Description of Artificial Sequence: Synthetic oligonucleotide
  Sense strand starting at position 2285 of SEQ ID NO: 589004
aguugaggauauuaacgau

SEQ ID NO: 904483 - RNA, 19 nt, Artificial Sequence
  Description of Artificial Sequence: Synthetic oligonucleotide
  Antisense strand to SEQ ID NO: 904482
aucguuaauauccucaacu

SEQ ID NO: 904484 - RNA, 19 nt, Artificial Sequence
  Description of Artificial Sequence: Synthetic oligonucleotide
  Sense strand starting at position 2503 of SEQ ID NO: 589004
guguuucucguagaaacgu

SEQ ID NO: 904485 - RNA, 19 nt, Artificial Sequence
  Description of Artificial Sequence: Synthetic oligonucleotide
  Antisense strand to SEQ ID NO: 904484
acguuucuacgagaaacac

SEQ ID NO: 904486 - RNA, 19 nt, Artificial Sequence
  Description of Artificial Sequence: Synthetic oligonucleotide
  Sense strand starting at position 3120 of SEQ ID NO: 589004
cugaaacuuugugucuaug

SEQ ID NO: 904487 - RNA, 19 nt, Artificial Sequence
  Description of Artificial Sequence: Synthetic oligonucleotide
  Antisense strand to SEQ ID NO: 904486
cauagacacaaaguuucag

SEQ ID NO: 904488 - RNA, 19 nt, Artificial Sequence
  Description of Artificial Sequence: Synthetic oligonucleotide
  Sense strand starting at position 3122 of SEQ ID NO: 589004
gaaacuuugugucuaugaa

SEQ ID NO: 904489 - RNA, 19 nt, Artificial Sequence
  Description of Artificial Sequence: Synthetic oligonucleotide
  Antisense strand to SEQ ID NO: 904488
uucauagacacaaaguuuc

SEQ ID NO: 904490 - RNA, 19 nt, Artificial Sequence
  Description of Artificial Sequence: Synthetic oligonucleotide
  Sense strand starting at position 3151 of SEQ ID NO: 589004
gggauucccuucucuccua

SEQ ID NO: 904491 - RNA, 19 nt, Artificial Sequence
  Description of Artificial Sequence: Synthetic oligonucleotide
  Antisense strand to SEQ ID NO: 904490
uaggagagaagggaauccc

SEQ ID NO: 904492 - RNA, 19 nt, Artificial Sequence
  Description of Artificial Sequence: Synthetic oligonucleotide
  Sense strand starting at position 3224 of SEQ ID NO: 589004
uccucaugucaguggaauc

SEQ ID NO: 904493 - RNA, 19 nt, Artificial Sequence
  Description of Artificial Sequence: Synthetic oligonucleotide
  Antisense strand to SEQ ID NO: 904492
gauuccacugacaugagga

SEQ ID NO: 904494 - RNA, 19 nt, Artificial Sequence
  Description of Artificial Sequence: Synthetic oligonucleotide
  Sense strand starting at position 3299 of SEQ ID NO: 589004
guuguagcaugaguccaaa

SEQ ID NO: 904495 - RNA, 19 nt, Artificial Sequence
  Description of Artificial Sequence: Synthetic oligonucleotide
  Antisense strand to SEQ ID NO: 904494
uuuggacucaugcuacaac

SEQ ID NO: 904496 - RNA, 19 nt, Artificial Sequence
  Description of Artificial Sequence: Synthetic oligonucleotide
  Sense strand starting at position 3419 of SEQ ID NO: 589004
ggcuauugugaagaauguc

SEQ ID NO: 904497 - RNA, 19 nt, Artificial Sequence
  Description of Artificial Sequence: Synthetic oligonucleotide
  Antisense strand to SEQ ID NO: 904496
gacauucuucacaauagcc

SEQ ID NO: 904498 - RNA, 19 nt, Artificial Sequence
  Description of Artificial Sequence: Synthetic oligonucleotide
  Sense strand starting at position 3427 of SEQ ID NO: 589004
ugaagaaugucgguuaaca

SEQ ID NO: 904499 - RNA, 19 nt, Artificial Sequence
  Description of Artificial Sequence: Synthetic oligonucleotide
  Antisense strand to SEQ ID NO: 904498
uguuaaccgacauucuuca

SEQ ID NO: 904500 - RNA, 19 nt, Artificial Sequence
  Description of Artificial Sequence: Synthetic oligonucleotide
  Sense strand starting at position 3429 of SEQ ID NO: 589004
aagaaugucgguuaacauu

SEQ ID NO: 904501 - RNA, 19 nt, Artificial Sequence
  Description of Artificial Sequence: Synthetic oligonucleotide
  Antisense strand to SEQ ID NO: 904500
aauguuaaccgacauucuu

SEQ ID NO: 904502 - RNA, 19 nt, Artificial Sequence
  Description of Artificial Sequence: Synthetic oligonucleotide
  Sense strand starting at position 3435 of SEQ ID NO: 589004
gucgguuaacauugguaua

SEQ ID NO: 904503 - RNA, 19 nt, Artificial Sequence
  Description of Artificial Sequence: Synthetic oligonucleotide
  Antisense strand to SEQ ID NO: 904502
uauaccaauguuaaccgac

SEQ ID NO: 904504 - RNA, 19 nt, Artificial Sequence
  Description of Artificial Sequence: Synthetic oligonucleotide
  Sense strand starting at position 3436 of SEQ ID NO: 589004
ucgguuaacauugguauac

SEQ ID NO: 904505 - RNA, 19 nt, Artificial Sequence
  Description of Artificial Sequence: Synthetic oligonucleotide
  Antisense strand to SEQ ID NO: 904504
guauaccaauguuaaccga

SEQ ID NO: 904506 - RNA, 19 nt, Artificial Sequence
  Description of Artificial Sequence: Synthetic oligonucleotide
  Sense strand starting at position 3437 of SEQ ID NO: 589004
cgguuaacauugguauaca

SEQ ID NO: 904507 - RNA, 19 nt, Artificial Sequence
  Description of Artificial Sequence: Synthetic oligonucleotide
  Antisense strand to SEQ ID NO: 904506
uguauaccaauguuaaccg

SEQ ID NO: 904508 - RNA, 19 nt, Artificial Sequence
  Description of Artificial Sequence: Synthetic oligonucleotide
  Sense strand starting at position 3438 of SEQ ID NO: 589004
gguuaacauugguauacaa

SEQ ID NO: 904509 - RNA, 19 nt, Artificial Sequence
  Description of Artificial Sequence: Synthetic oligonucleotide
  Antisense strand to SEQ ID NO: 904508
uuguauaccaauguuaacc

SEQ ID NO: 904510 - RNA, 19 nt, Artificial Sequence
  Description of Artificial Sequence: Synthetic oligonucleotide
  Sense strand starting at position 3671 of SEQ ID NO: 589004
cacagaaguugucaaggaa

SEQ ID NO: 904511 - RNA, 19 nt, Artificial Sequence
  Description of Artificial Sequence: Synthetic oligonucleotide
  Antisense strand to SEQ ID NO: 904510
uuccuugacaacuucugug

SEQ ID NO: 904512 - RNA, 19 nt, Artificial Sequence
  Description of Artificial Sequence: Synthetic oligonucleotide
  Sense strand starting at position 3674 of SEQ ID NO: 589004
agaaguugucaaggaacgu

SEQ ID NO: 904513 - RNA, 19 nt, Artificial Sequence
  Description of Artificial Sequence: Synthetic oligonucleotide
  Antisense strand to SEQ ID NO: 904512
acguuccuugacaacuucu

SEQ ID NO: 904514 - RNA, 19 nt, Artificial Sequence
  Description of Artificial Sequence: Synthetic oligonucleotide
  Sense strand starting at position 3717 of SEQ ID NO: 589004
ccaggugucuuguuucuuu

SEQ ID NO: 904515 - RNA, 19 nt, Artificial Sequence
  Description of Artificial Sequence: Synthetic oligonucleotide
  Antisense strand to SEQ ID NO: 904514
aaagaaacaagacaccugg

SEQ ID NO: 904516 - RNA, 19 nt, Artificial Sequence
  Description of Artificial Sequence: Synthetic oligonucleotide
  Sense strand starting at position 3761 of SEQ ID NO: 589004
ugaauaaacugccuugaaa

SEQ ID NO: 904517 - RNA, 19 nt, Artificial Sequence
  Description of Artificial Sequence: Synthetic oligonucleotide
  Antisense strand to SEQ ID NO: 904516
uuucaaggcaguuuauuca

SEQ ID NO: 904518 - RNA, 19 nt, Artificial Sequence
  Description of Artificial Sequence: Synthetic oligonucleotide
  Sense strand starting at position 3764 of SEQ ID NO: 589004
auaaacugccuugaaaugu

SEQ ID NO: 904519 - RNA, 19 nt, Artificial Sequence
  Description of Artificial Sequence: Synthetic oligonucleotide
  Antisense strand to SEQ ID NO: 904518
acauuucaaggcaguuuau

SEQ ID NO: 904520 - RNA, 19 nt, Artificial Sequence
  Description of Artificial Sequence: Synthetic oligonucleotide
  Sense strand starting at position 3772 of SEQ ID NO: 589004
ccuugaaauguccaaguca

SEQ ID NO: 904521 - RNA, 19 nt, Artificial Sequence
  Description of Artificial Sequence: Synthetic oligonucleotide
  Antisense strand to SEQ ID NO: 904520
ugacuuggacauuucaagg

SEQ ID NO: 904522 - RNA, 19 nt, Artificial Sequence
  Description of Artificial Sequence: Synthetic oligonucleotide
  Sense strand starting at position 756 of SEQ ID NO: 589005
cacucugaccugugagaga

SEQ ID NO: 904523 - RNA, 19 nt, Artificial Sequence
  Description of Artificial Sequence: Synthetic oligonucleotide
  Antisense strand to SEQ ID NO: 904522
ucucucacaggucagagug

SEQ ID NO: 904524 - RNA, 19 nt, Artificial Sequence
  Description of Artificial Sequence: Synthetic oligonucleotide
  Sense strand starting at position 780 of SEQ ID NO: 589005
gcuaaucauuugucagcca

SEQ ID NO: 904525 - RNA, 19 nt, Artificial Sequence
  Description of Artificial Sequence: Synthetic oligonucleotide
  Antisense strand to SEQ ID NO: 904524
uggcugacaaaugauuagc

SEQ ID NO: 904526 - RNA, 19 nt, Artificial Sequence
  Description of Artificial Sequence: Synthetic oligonucleotide
  Sense strand starting at position 783 of SEQ ID NO: 589005
aaucauuugucagccaggu

SEQ ID NO: 904527 - RNA, 19 nt, Artificial Sequence
  Description of Artificial Sequence: Synthetic oligonucleotide
  Antisense strand to SEQ ID NO: 904526
accuggcugacaaaugauu

SEQ ID NO: 904528 - RNA, 19 nt, Artificial Sequence
  Description of Artificial Sequence: Synthetic oligonucleotide
  Sense strand starting at position 851 of SEQ ID NO: 589005
gugagcugaccacagaauu

SEQ ID NO: 904529 - RNA, 19 nt, Artificial Sequence
  Description of Artificial Sequence: Synthetic oligonucleotide
  Antisense strand to SEQ ID NO: 904528
aauucuguggucagcucac

SEQ ID NO: 904530 - RNA, 19 nt, Artificial Sequence
  Description of Artificial Sequence: Synthetic oligonucleotide
  Sense strand starting at position 919 of SEQ ID NO: 589005
cugcccugcuacgaauuaa

SEQ ID NO: 904531 - RNA, 19 nt, Artificial Sequence
  Description of Artificial Sequence: Synthetic oligonucleotide
  Antisense strand to SEQ ID NO: 904530
uuaauucguagcagggcag

SEQ ID NO: 904532 - RNA, 19 nt, Artificial Sequence
  Description of Artificial Sequence: Synthetic oligonucleotide
  Sense strand starting at position 944 of SEQ ID NO: 589005
ggccaaaccugacagcuua

SEQ ID NO: 904533 - RNA, 19 nt, Artificial Sequence
  Description of Artificial Sequence: Synthetic oligonucleotide
  Antisense strand to SEQ ID NO: 904532
uaagcugucagguuuggcc

SEQ ID NO: 904534 - RNA, 19 nt, Artificial Sequence
  Description of Artificial Sequence: Synthetic oligonucleotide
  Sense strand starting at position 989 of SEQ ID NO: 589005
gccaauucccaaggacaga

SEQ ID NO: 904535 - RNA, 19 nt, Artificial Sequence
  Description of Artificial Sequence: Synthetic oligonucleotide
  Antisense strand to SEQ ID NO: 904534
ucuguccuugggaauuggc

SEQ ID NO: 904536 - RNA, 19 nt, Artificial Sequence
  Description of Artificial Sequence: Synthetic oligonucleotide
  Sense strand starting at position 1119 of SEQ ID NO: 589005
uugaguggcucagagaaga

SEQ ID NO: 904537 - RNA, 19 nt, Artificial Sequence
  Description of Artificial Sequence: Synthetic oligonucleotide
  Antisense strand to SEQ ID NO: 904536
ucuucucugagccacucaa

SEQ ID NO: 904538 - RNA, 19 nt, Artificial Sequence
  Description of Artificial Sequence: Synthetic oligonucleotide
  Sense strand starting at position 2055 of SEQ ID NO: 589005
gcaagcucccucguuugau

SEQ ID NO: 904539 - RNA, 19 nt, Artificial Sequence
  Description of Artificial Sequence: Synthetic oligonucleotide
  Antisense strand to SEQ ID NO: 904538
aucaaacgagggagcuugc

SEQ ID NO: 904540 - RNA, 19 nt, Artificial Sequence
  Description of Artificial Sequence: Synthetic oligonucleotide
  Sense strand starting at position 2056 of SEQ ID NO: 589005
caagcucccucguuugauu

SEQ ID NO: 904541 - RNA, 19 nt, Artificial Sequence
  Description of Artificial Sequence: Synthetic oligonucleotide
  Antisense strand to SEQ ID NO: 904540
aaucaaacgagggagcuug

SEQ ID NO: 904542 - RNA, 19 nt, Artificial Sequence
  Description of Artificial Sequence: Synthetic oligonucleotide
  Sense strand starting at position 2118 of SEQ ID NO: 589005
aagccaguuuggucuuuau

SEQ ID NO: 904543 - RNA, 19 nt, Artificial Sequence
  Description of Artificial Sequence: Synthetic oligonucleotide
  Antisense strand to SEQ ID NO: 904542
auaaagaccaaacuggcuu

SEQ ID NO: 904544 - RNA, 19 nt, Artificial Sequence
  Description of Artificial Sequence: Synthetic oligonucleotide
  Sense strand starting at position 2122 of SEQ ID NO: 589005
caguuuggucuuuauuggu

SEQ ID NO: 904545 - RNA, 19 nt, Artificial Sequence
  Description of Artificial Sequence: Synthetic oligonucleotide
  Antisense strand to SEQ ID NO: 904544
accaauaaagaccaaacug

SEQ ID NO: 904546 - RNA, 19 nt, Artificial Sequence
  Description of Artificial Sequence: Synthetic oligonucleotide
  Sense strand starting at position 2617 of SEQ ID NO: 589005
gccuuaaaggcaggaagau

SEQ ID NO: 904547 - RNA, 19 nt, Artificial Sequence
  Description of Artificial Sequence: Synthetic oligonucleotide
  Antisense strand to SEQ ID NO: 904546
aucuuccugccuuuaaggc

SEQ ID NO: 904548 - RNA, 19 nt, Artificial Sequence
  Description of Artificial Sequence: Synthetic oligonucleotide
  Sense strand starting at position 3011 of SEQ ID NO: 589005
gcugaaacauacuucuguu

SEQ ID NO: 904549 - RNA, 19 nt, Artificial Sequence
  Description of Artificial Sequence: Synthetic oligonucleotide
  Antisense strand to SEQ ID NO: 904548
aacagaaguauguuucagc

SEQ ID NO: 904550 - RNA, 19 nt, Artificial Sequence
  Description of Artificial Sequence: Synthetic oligonucleotide
  Sense strand starting at position 3096 of SEQ ID NO: 589005
ugugguugcgccuguuuaa

SEQ ID NO: 904551 - RNA, 19 nt, Artificial Sequence
  Description of Artificial Sequence: Synthetic oligonucleotide
  Antisense strand to SEQ ID NO: 904550
uuaaacaggcgcaaccaca

SEQ ID NO: 904552 - RNA, 19 nt, Artificial Sequence
  Description of Artificial Sequence: Synthetic oligonucleotide
  Sense strand starting at position 3097 of SEQ ID NO: 589005
gugguugcgccuguuuaaa

SEQ ID NO: 904553 - RNA, 19 nt, Artificial Sequence
  Description of Artificial Sequence: Synthetic oligonucleotide
  Antisense strand to SEQ ID NO: 904552
uuuaaacaggcgcaaccac

SEQ ID NO: 904554 - RNA, 19 nt, Artificial Sequence
  Description of Artificial Sequence: Synthetic oligonucleotide
  Sense strand starting at position 3157 of SEQ ID NO: 589005
auuuauuauucugagacag

SEQ ID NO: 904555 - RNA, 19 nt, Artificial Sequence
  Description of Artificial Sequence: Synthetic oligonucleotide
  Antisense strand to SEQ ID NO: 904554
cugucucagaauaauaaau

SEQ ID NO: 904556 - RNA, 19 nt, Artificial Sequence
  Description of Artificial Sequence: Synthetic oligonucleotide
  Sense strand starting at position 3430 of SEQ ID NO: 589005
cgccgugccuucuacauuu

SEQ ID NO: 904557 - RNA, 19 nt, Artificial Sequence
  Description of Artificial Sequence: Synthetic oligonucleotide
  Antisense strand to SEQ ID NO: 904556
aaauguagaaggcacggcg

SEQ ID NO: 904558 - RNA, 19 nt, Artificial Sequence
  Description of Artificial Sequence: Synthetic oligonucleotide
  Sense strand starting at position 3843 of SEQ ID NO: 589005
uggaacugaccuugugauu

SEQ ID NO: 904559 - RNA, 19 nt, Artificial Sequence
  Description of Artificial Sequence: Synthetic oligonucleotide
  Antisense strand to SEQ ID NO: 904558
aaucacaaggucaguucca

SEQ ID NO: 904560 - RNA, 19 nt, Artificial Sequence
  Description of Artificial Sequence: Synthetic oligonucleotide
  Sense strand starting at position 235 of SEQ ID NO: 589006
aggcaugaguuccuagguu

SEQ ID NO: 904561 - RNA, 19 nt, Artificial Sequence
  Description of Artificial Sequence: Synthetic oligonucleotide
  Antisense strand to SEQ ID NO: 904560
aaccuaggaacucaugccu

SEQ ID NO: 904562 - RNA, 19 nt, Artificial Sequence
  Description of Artificial Sequence: Synthetic oligonucleotide
  Sense strand starting at position 239 of SEQ ID NO: 589006
augaguuccuagguuauaa

SEQ ID NO: 904563 - RNA, 19 nt, Artificial Sequence
  Description of Artificial Sequence: Synthetic oligonucleotide
  Antisense strand to SEQ ID NO: 904562
uuauaaccuaggaacucau

SEQ ID NO: 904564 - RNA, 19 nt, Artificial Sequence
  Description of Artificial Sequence: Synthetic oligonucleotide
  Sense strand starting at position 241 of SEQ ID NO: 589006
gaguuccuagguuauaaau

SEQ ID NO: 904565 - RNA, 19 nt, Artificial Sequence
  Description of Artificial Sequence: Synthetic oligonucleotide
  Antisense strand to SEQ ID NO: 904564
auuuauaaccuaggaacuc

SEQ ID NO: 904566 - RNA, 19 nt, Artificial Sequence
  Description of Artificial Sequence: Synthetic oligonucleotide
  Sense strand starting at position 335 of SEQ ID NO: 589006
aaauguuggccacauauga

SEQ ID NO: 904567 - RNA, 19 nt, Artificial Sequence
  Description of Artificial Sequence: Synthetic oligonucleotide
  Antisense strand to SEQ ID NO: 904566
ucauauguggccaacauuu

SEQ ID NO: 904568 - RNA, 19 nt, Artificial Sequence
  Description of Artificial Sequence: Synthetic oligonucleotide
  Sense strand starting at position 339 of SEQ ID NO: 589006
guuggccacauaugaaaga

SEQ ID NO: 904569 - RNA, 19 nt, Artificial Sequence
  Description of Artificial Sequence: Synthetic oligonucleotide
  Antisense strand to SEQ ID NO: 904568
ucuuucauauguggccaac

SEQ ID NO: 904570 - RNA, 19 nt, Artificial Sequence
  Description of Artificial Sequence: Synthetic oligonucleotide
  Sense strand starting at position 489 of SEQ ID NO: 589006
gggaauaugaaguguuucu

SEQ ID NO: 904571 - RNA, 19 nt, Artificial Sequence
  Description of Artificial Sequence: Synthetic oligonucleotide
  Antisense strand to SEQ ID NO: 904570
agaaacacuucauauuccc

SEQ ID NO: 904572 - RNA, 19 nt, Artificial Sequence
  Description of Artificial Sequence: Synthetic oligonucleotide
  Sense strand starting at position 558 of SEQ ID NO: 589006
gccucucuccagggaaacu

SEQ ID NO: 904573 - RNA, 19 nt, Artificial Sequence
  Description of Artificial Sequence: Synthetic oligonucleotide
  Antisense strand to SEQ ID NO: 904572
aguuucccuggagagaggc

SEQ ID NO: 904574 - RNA, 19 nt, Artificial Sequence
  Description of Artificial Sequence: Synthetic oligonucleotide
  Sense strand starting at position 1887 of SEQ ID NO: 589006
auagaaugaucgguucuga

SEQ ID NO: 904575 - RNA, 19 nt, Artificial Sequence
  Description of Artificial Sequence: Synthetic oligonucleotide
  Antisense strand to SEQ ID NO: 904574
ucagaaccgaucauucuau

SEQ ID NO: 904576 - RNA, 19 nt, Artificial Sequence
  Description of Artificial Sequence: Synthetic oligonucleotide
  Sense strand starting at position 1995 of SEQ ID NO: 589006
acagaauugggcugaguac

SEQ ID NO: 904577 - RNA, 19 nt, Artificial Sequence
  Description of Artificial Sequence: Synthetic oligonucleotide
  Antisense strand to SEQ ID NO: 904576
guacucagcccaauucugu

SEQ ID NO: 904578 - RNA, 19 nt, Artificial Sequence
  Description of Artificial Sequence: Synthetic oligonucleotide
  Sense strand starting at position 2022 of SEQ ID NO: 589006
ggguuucccgguggaaaca

SEQ ID NO: 904579 - RNA, 19 nt, Artificial Sequence
  Description of Artificial Sequence: Synthetic oligonucleotide
  Antisense strand to SEQ ID NO: 904578
uguuuccaccgggaaaccc

SEQ ID NO: 904580 - RNA, 19 nt, Artificial Sequence
  Description of Artificial Sequence: Synthetic oligonucleotide
  Sense strand starting at position 2128 of SEQ ID NO: 589006
aggucauacuuaguugauu

SEQ ID NO: 904581 - RNA, 19 nt, Artificial Sequence
  Description of Artificial Sequence: Synthetic oligonucleotide
  Antisense strand to SEQ ID NO: 904580
aaucaacuaaguaugaccu

SEQ ID NO: 904582 - RNA, 19 nt, Artificial Sequence
  Description of Artificial Sequence: Synthetic oligonucleotide
  Sense strand starting at position 2181 of SEQ ID NO: 589006
aagugcucuguuuauugaa

SEQ ID NO: 904583 - RNA, 19 nt, Artificial Sequence
  Description of Artificial Sequence: Synthetic oligonucleotide
  Antisense strand to SEQ ID NO: 904582
uucaauaaacagagcacuu

SEQ ID NO: 904584 - RNA, 19 nt, Artificial Sequence
  Description of Artificial Sequence: Synthetic oligonucleotide
  Sense strand starting at position 2183 of SEQ ID NO: 589006
gugcucuguuuauugaaga

SEQ ID NO: 904585 - RNA, 19 nt, Artificial Sequence
  Description of Artificial Sequence: Synthetic oligonucleotide
  Antisense strand to SEQ ID NO: 904584
ucuucaauaaacagagcac

SEQ ID NO: 904586 - RNA, 19 nt, Artificial Sequence
  Description of Artificial Sequence: Synthetic oligonucleotide
  Sense strand starting at position 2215 of SEQ ID NO: 589006
guuccaaaguuucugggau

SEQ ID NO: 904587 - RNA, 19 nt, Artificial Sequence
  Description of Artificial Sequence: Synthetic oligonucleotide
  Antisense strand to SEQ ID NO: 904586
aucccagaaacuuuggaac

SEQ ID NO: 904588 - RNA, 19 nt, Artificial Sequence
  Description of Artificial Sequence: Synthetic oligonucleotide
  Sense strand starting at position 2240 of SEQ ID NO: 589006
uguacaucucauugaauga

SEQ ID NO: 904589 - RNA, 19 nt, Artificial Sequence
  Description of Artificial Sequence: Synthetic oligonucleotide
  Antisense strand to SEQ ID NO: 904588
ucauucaaugagauguaca

SEQ ID NO: 904590 - RNA, 19 nt, Artificial Sequence
  Description of Artificial Sequence: Synthetic oligonucleotide
  Sense strand starting at position 2276 of SEQ ID NO: 589006
ggucucaaccuacauagua

SEQ ID NO: 904591 - RNA, 19 nt, Artificial Sequence
  Description of Artificial Sequence: Synthetic oligonucleotide
  Antisense strand to SEQ ID NO: 904590
uacuauguagguugagacc

SEQ ID NO: 904592 - RNA, 19 nt, Artificial Sequence
  Description of Artificial Sequence: Synthetic oligonucleotide
  Sense strand starting at position 2292 of SEQ ID NO: 589006
guaacuggaugauugcaaa

SEQ ID NO: 904593 - RNA, 19 nt, Artificial Sequence
  Description of Artificial Sequence: Synthetic oligonucleotide
  Antisense strand to SEQ ID NO: 904592
uuugcaaucauccaguuac

SEQ ID NO: 904594 - RNA, 19 nt, Artificial Sequence
  Description of Artificial Sequence: Synthetic oligonucleotide
  Sense strand starting at position 2338 of SEQ ID NO: 589006
agaaucucuuaagcaagua

SEQ ID NO: 904595 - RNA, 19 nt, Artificial Sequence
  Description of Artificial Sequence: Synthetic oligonucleotide
  Antisense strand to SEQ ID NO: 904594
uacuugcuuaagagauucu

SEQ ID NO: 904596 - RNA, 19 nt, Artificial Sequence
  Description of Artificial Sequence: Synthetic oligonucleotide
  Sense strand starting at position 2350 of SEQ ID NO: 589006
gcaaguaugcccuagcaag

SEQ ID NO: 904597 - RNA, 19 nt, Artificial Sequence
  Description of Artificial Sequence: Synthetic oligonucleotide
  Antisense strand to SEQ ID NO: 904596
cuugcuagggcauacuugc

SEQ ID NO: 904598 - RNA, 19 nt, Artificial Sequence
  Description of Artificial Sequence: Synthetic oligonucleotide
  Sense strand starting at position 2534 of SEQ ID NO: 589006
uuuguuaggcaagaucuua

SEQ ID NO: 904599 - RNA, 19 nt, Artificial Sequence
  Description of Artificial Sequence: Synthetic oligonucleotide
  Antisense strand to SEQ ID NO: 904598
uaagaucuugccuaacaaa

SEQ ID NO: 904600 - RNA, 19 nt, Artificial Sequence
  Description of Artificial Sequence: Synthetic oligonucleotide
  Sense strand starting at position 2566 of SEQ ID NO: 589006
ccaaauguguucucaauua

SEQ ID NO: 904601 - RNA, 19 nt, Artificial Sequence
  Description of Artificial Sequence: Synthetic oligonucleotide
  Antisense strand to SEQ ID NO: 904600
uaauugagaacacauuugg

SEQ ID NO: 904602 - RNA, 19 nt, Artificial Sequence
  Description of Artificial Sequence: Synthetic oligonucleotide
  Sense strand starting at position 2965 of SEQ ID NO: 589006
aggagcauaucauucuuga

SEQ ID NO: 904603 - RNA, 19 nt, Artificial Sequence
  Description of Artificial Sequence: Synthetic oligonucleotide
  Antisense strand to SEQ ID NO: 904602
ucaagaaugauaugcuccu

SEQ ID NO: 904604 - RNA, 19 nt, Artificial Sequence
  Description of Artificial Sequence: Synthetic oligonucleotide
  Sense strand starting at position 2968 of SEQ ID NO: 589006
agcauaucauucuugagau

SEQ ID NO: 904605 - RNA, 19 nt, Artificial Sequence
  Description of Artificial Sequence: Synthetic oligonucleotide
  Antisense strand to SEQ ID NO: 904604
aucucaagaaugauaugcu

SEQ ID NO: 904606 - RNA, 19 nt, Artificial Sequence
  Description of Artificial Sequence: Synthetic oligonucleotide
  Sense strand starting at position 2974 of SEQ ID NO: 589006
ucauucuugagaugggagu

SEQ ID NO: 904607 - RNA, 19 nt, Artificial Sequence
  Description of Artificial Sequence: Synthetic oligonucleotide
  Antisense strand to SEQ ID NO: 904606
acucccaucucaagaauga

SEQ ID NO: 904608 - RNA, 19 nt, Artificial Sequence
  Description of Artificial Sequence: Synthetic oligonucleotide
  Sense strand starting at position 2976 of SEQ ID NO: 589006
auucuugagaugggaguuu

SEQ ID NO: 904609 - RNA, 19 nt, Artificial Sequence
  Description of Artificial Sequence: Synthetic oligonucleotide
  Antisense strand to SEQ ID NO: 904608
aaacucccaucucaagaau

SEQ ID NO: 904610 - RNA, 19 nt, Artificial Sequence
  Description of Artificial Sequence: Synthetic oligonucleotide
  Sense strand starting at position 3078 of SEQ ID NO: 589006
aggacuguaucauucuuaa

SEQ ID NO: 904611 - RNA, 19 nt, Artificial Sequence
  Description of Artificial Sequence: Synthetic oligonucleotide
  Antisense strand to SEQ ID NO: 904610
uuaagaaugauacaguccu

SEQ ID NO: 904612 - RNA, 19 nt, Artificial Sequence
  Description of Artificial Sequence: Synthetic oligonucleotide
  Sense strand starting at position 3223 of SEQ ID NO: 589006
aagggaaguuuggaagaaa

SEQ ID NO: 904613 - RNA, 19 nt, Artificial Sequence
  Description of Artificial Sequence: Synthetic oligonucleotide
  Antisense strand to SEQ ID NO: 904612
uuucuuccaaacuucccuu

SEQ ID NO: 904614 - RNA, 19 nt, Artificial Sequence
  Description of Artificial Sequence: Synthetic oligonucleotide
  Sense strand starting at position 3321 of SEQ ID NO: 589006
acauuugucuuaugauuug

SEQ ID NO: 904615 - RNA, 19 nt, Artificial Sequence
  Description of Artificial Sequence: Synthetic oligonucleotide
  Antisense strand to SEQ ID NO: 904614
caaaucauaagacaaaugu

SEQ ID NO: 904616 - RNA, 19 nt, Artificial Sequence
  Description of Artificial Sequence: Synthetic oligonucleotide
  Sense strand starting at position 3332 of SEQ ID NO: 589006
augauuuguuaauggagag

SEQ ID NO: 904617 - RNA, 19 nt, Artificial Sequence
  Description of Artificial Sequence: Synthetic oligonucleotide
  Antisense strand to SEQ ID NO: 904616
cucuccauuaacaaaucau

SEQ ID NO: 904618 - RNA, 19 nt, Artificial Sequence
  Description of Artificial Sequence: Synthetic oligonucleotide
  Sense strand starting at position 3572 of SEQ ID NO: 589006
guuuguuaauggucuacau

SEQ ID NO: 904619 - RNA, 19 nt, Artificial Sequence
  Description of Artificial Sequence: Synthetic oligonucleotide
  Antisense strand to SEQ ID NO: 904618
auguagaccauuaacaaac

SEQ ID NO: 904620 - RNA, 19 nt, Artificial Sequence
  Description of Artificial Sequence: Synthetic oligonucleotide
  Sense strand starting at position 3574 of SEQ ID NO: 589006
uuguuaauggucuacauau

SEQ ID NO: 904621 - RNA, 19 nt, Artificial Sequence
  Description of Artificial Sequence: Synthetic oligonucleotide
  Antisense strand to SEQ ID NO: 904620
auauguagaccauuaacaa

SEQ ID NO: 904622 - RNA, 19 nt, Artificial Sequence
  Description of Artificial Sequence: Synthetic oligonucleotide
  Sense strand starting at position 3576 of SEQ ID NO: 589006
guuaauggucuacauauaa

SEQ ID NO: 904623 - RNA, 19 nt, Artificial Sequence
  Description of Artificial Sequence: Synthetic oligonucleotide
  Antisense strand to SEQ ID NO: 904622
uuauauguagaccauuaac

SEQ ID NO: 904624 - RNA, 19 nt, Artificial Sequence
  Description of Artificial Sequence: Synthetic oligonucleotide
  Sense strand starting at position 3606 of SEQ ID NO: 589006
ggcaaauaauauguaccua

SEQ ID NO: 904625 - RNA, 19 nt, Artificial Sequence
  Description of Artificial Sequence: Synthetic oligonucleotide
  Antisense strand to SEQ ID NO: 904624
uagguacauauuauuugcc

SEQ ID NO: 904626 - RNA, 19 nt, Artificial Sequence
  Description of Artificial Sequence: Synthetic oligonucleotide
  Sense strand starting at position 3724 of SEQ ID NO: 589006
guauauaagugcuugauua

SEQ ID NO: 904627 - RNA, 19 nt, Artificial Sequence
  Description of Artificial Sequence: Synthetic oligonucleotide
  Antisense strand to SEQ ID NO: 904626
uaaucaagcacuuauauac

SEQ ID NO: 904628 - RNA, 19 nt, Artificial Sequence
  Description of Artificial Sequence: Synthetic oligonucleotide
  Sense strand starting at position 3725 of SEQ ID NO: 589006
uauauaagugcuugauuag

SEQ ID NO: 904629 - RNA, 19 nt, Artificial Sequence
  Description of Artificial Sequence: Synthetic oligonucleotide
  Antisense strand to SEQ ID NO: 904628
cuaaucaagcacuuauaua

SEQ ID NO: 904630 - RNA, 19 nt, Artificial Sequence
  Description of Artificial Sequence: Synthetic oligonucleotide
  Sense strand starting at position 3726 of SEQ ID NO: 589006
auauaagugcuugauuaga

SEQ ID NO: 904631 - RNA, 19 nt, Artificial Sequence
  Description of Artificial Sequence: Synthetic oligonucleotide
  Antisense strand to SEQ ID NO: 904630
ucuaaucaagcacuuauau

SEQ ID NO: 904632 - RNA, 19 nt, Artificial Sequence
  Description of Artificial Sequence: Synthetic oligonucleotide
  Sense strand starting at position 3728 of SEQ ID NO: 589006
auaagugcuugauuagaaa

SEQ ID NO: 904633 - RNA, 19 nt, Artificial Sequence
  Description of Artificial Sequence: Synthetic oligonucleotide
  Antisense strand to SEQ ID NO: 904632
uuucuaaucaagcacuuau

SEQ ID NO: 904634 - RNA, 19 nt, Artificial Sequence
  Description of Artificial Sequence: Synthetic oligonucleotide
  Sense strand starting at position 3825 of SEQ ID NO: 589006
agaagaaagucuuaaagga

SEQ ID NO: 904635 - RNA, 19 nt, Artificial Sequence
  Description of Artificial Sequence: Synthetic oligonucleotide
  Antisense strand to SEQ ID NO: 904634
uccuuuaagacuuucuucu

SEQ ID NO: 904636 - RNA, 19 nt, Artificial Sequence
  Description of Artificial Sequence: Synthetic oligonucleotide
  Sense strand starting at position 3888 of SEQ ID NO: 589006
agcuacucuugcucaagaa

SEQ ID NO: 904637 - RNA, 19 nt, Artificial Sequence
  Description of Artificial Sequence: Synthetic oligonucleotide
  Antisense strand to SEQ ID NO: 904636
uucuugagcaagaguagcu

SEQ ID NO: 904638 - RNA, 19 nt, Artificial Sequence
  Description of Artificial Sequence: Synthetic oligonucleotide
  Sense strand starting at position 3889 of SEQ ID NO: 589006
gcuacucuugcucaagaaa

SEQ ID NO: 904639 - RNA, 19 nt, Artificial Sequence
  Description of Artificial Sequence: Synthetic oligonucleotide
  Antisense strand to SEQ ID NO: 904638
uuucuugagcaagaguagc

SEQ ID NO: 904640 - RNA, 19 nt, Artificial Sequence
  Description of Artificial Sequence: Synthetic oligonucleotide
  Sense strand starting at position 30 of SEQ ID NO: 589007
caccuuugucacugguaga

SEQ ID NO: 904641 - RNA, 19 nt, Artificial Sequence
  Description of Artificial Sequence: Synthetic oligonucleotide
  Antisense strand to SEQ ID NO: 904640
ucuaccagugacaaaggug

SEQ ID NO: 904642 - RNA, 19 nt, Artificial Sequence
  Description of Artificial Sequence: Synthetic oligonucleotide
  Sense strand starting at position 31 of SEQ ID NO: 589007
accuuugucacugguagag

SEQ ID NO: 904643 - RNA, 19 nt, Artificial Sequence
  Description of Artificial Sequence: Synthetic oligonucleotide
  Antisense strand to SEQ ID NO: 904642
cucuaccagugacaaaggu

SEQ ID NO: 904644 - RNA, 19 nt, Artificial Sequence
  Description of Artificial Sequence: Synthetic oligonucleotide
  Sense strand starting at position 49 of SEQ ID NO: 589007
ggaggaaggugcucugaca

SEQ ID NO: 904645 - RNA, 19 nt, Artificial Sequence
  Description of Artificial Sequence: Synthetic oligonucleotide
  Antisense strand to SEQ ID NO: 904644
ugucagagcaccuuccucc

SEQ ID NO: 904646 - RNA, 19 nt, Artificial Sequence
  Description of Artificial Sequence: Synthetic oligonucleotide
  Sense strand starting at position 91 of SEQ ID NO: 589007
aacugugugcuccagaaau

SEQ ID NO: 904647 - RNA, 19 nt, Artificial Sequence
  Description of Artificial Sequence: Synthetic oligonucleotide
  Antisense strand to SEQ ID NO: 904646
auuucuggagcacacaguu

SEQ ID NO: 904648 - RNA, 19 nt, Artificial Sequence
  Description of Artificial Sequence: Synthetic oligonucleotide
  Sense strand starting at position 111 of SEQ ID NO: 589007
cuaaucaacuuuguuugua

SEQ ID NO: 904649 - RNA, 19 nt, Artificial Sequence
  Description of Artificial Sequence: Synthetic oligonucleotide
  Antisense strand to SEQ ID NO: 904648
uacaaacaaaguugauuag

SEQ ID NO: 904650 - RNA, 19 nt, Artificial Sequence
  Description of Artificial Sequence: Synthetic oligonucleotide
  Sense strand starting at position 123 of SEQ ID NO: 589007
guuuguagugucuggauuu

SEQ ID NO: 904651 - RNA, 19 nt, Artificial Sequence
  Description of Artificial Sequence: Synthetic oligonucleotide
  Antisense strand to SEQ ID NO: 904650
aaauccagacacuacaaac

SEQ ID NO: 904652 - RNA, 19 nt, Artificial Sequence
  Description of Artificial Sequence: Synthetic oligonucleotide
  Sense strand starting at position 287 of SEQ ID NO: 589007
cacaauaggugcuuggaaa

SEQ ID NO: 904653 - RNA, 19 nt, Artificial Sequence
  Description of Artificial Sequence: Synthetic oligonucleotide
  Antisense strand to SEQ ID NO: 904652
uuuccaagcaccuauugug

SEQ ID NO: 904654 - RNA, 19 nt, Artificial Sequence
  Description of Artificial Sequence: Synthetic oligonucleotide
  Sense strand starting at position 347 of SEQ ID NO: 589007
acacaugagggcugcuaaa

SEQ ID NO: 904655 - RNA, 19 nt, Artificial Sequence
  Description of Artificial Sequence: Synthetic oligonucleotide
  Antisense strand to SEQ ID NO: 904654
uuuagcagcccucaugugu

SEQ ID NO: 904656 - RNA, 19 nt, Artificial Sequence
  Description of Artificial Sequence: Synthetic oligonucleotide
  Sense strand starting at position 496 of SEQ ID NO: 589007
acacacuucuguuuccgaa

SEQ ID NO: 904657 - RNA, 19 nt, Artificial Sequence
  Description of Artificial Sequence: Synthetic oligonucleotide
  Antisense strand to SEQ ID NO: 904656
uucggaaacagaagugugu

SEQ ID NO: 904658 - RNA, 19 nt, Artificial Sequence
  Description of Artificial Sequence: Synthetic oligonucleotide
  Sense strand starting at position 623 of SEQ ID NO: 589007
gucuucuaccguucgagca

SEQ ID NO: 904659 - RNA, 19 nt, Artificial Sequence
  Description of Artificial Sequence: Synthetic oligonucleotide
  Antisense strand to SEQ ID NO: 904658
ugcucgaacgguagaagac

SEQ ID NO: 904660 - RNA, 19 nt, Artificial Sequence
  Description of Artificial Sequence: Synthetic oligonucleotide
  Sense strand starting at position 756 of SEQ ID NO: 589007
uuaggcuugcaauaacuuu

SEQ ID NO: 904661 - RNA, 19 nt, Artificial Sequence
  Description of Artificial Sequence: Synthetic oligonucleotide
  Antisense strand to SEQ ID NO: 904660
aaaguuauugcaagccuaa

SEQ ID NO: 904662 - RNA, 19 nt, Artificial Sequence
  Description of Artificial Sequence: Synthetic oligonucleotide
  Sense strand starting at position 787 of SEQ ID NO: 589007
ggcuguuucgccuugggca

SEQ ID NO: 904663 - RNA, 19 nt, Artificial Sequence
  Description of Artificial Sequence: Synthetic oligonucleotide
  Antisense strand to SEQ ID NO: 904662
ugcccaaggcgaaacagcc

SEQ ID NO: 904664 - RNA, 19 nt, Artificial Sequence
  Description of Artificial Sequence: Synthetic oligonucleotide
  Sense strand starting at position 823 of SEQ ID NO: 589007
caacgaucgggauaccgau

SEQ ID NO: 904665 - RNA, 19 nt, Artificial Sequence
  Description of Artificial Sequence: Synthetic oligonucleotide
  Antisense strand to SEQ ID NO: 904664
aucgguaucccgaucguug

SEQ ID NO: 904666 - RNA, 19 nt, Artificial Sequence
  Description of Artificial Sequence: Synthetic oligonucleotide
  Sense strand starting at position 965 of SEQ ID NO: 589007
gggacucagucauuccaaa

SEQ ID NO: 904667 - RNA, 19 nt, Artificial Sequence
  Description of Artificial Sequence: Synthetic oligonucleotide
  Antisense strand to SEQ ID NO: 904666
uuuggaaugacugaguccc

SEQ ID NO: 904668 - RNA, 19 nt, Artificial Sequence
  Description of Artificial Sequence: Synthetic oligonucleotide
  Sense strand starting at position 1821 of SEQ ID NO: 589007
gcuguaaggaccgauggaa

SEQ ID NO: 904669 - RNA, 19 nt, Artificial Sequence
  Description of Artificial Sequence: Synthetic oligonucleotide
  Antisense strand to SEQ ID NO: 904668
uuccaucgguccuuacagc

SEQ ID NO: 904670 - RNA, 19 nt, Artificial Sequence
  Description of Artificial Sequence: Synthetic oligonucleotide
  Sense strand starting at position 2240 of SEQ ID NO: 589007
agggcuggauuccucgaaa

SEQ ID NO: 904671 - RNA, 19 nt, Artificial Sequence
  Description of Artificial Sequence: Synthetic oligonucleotide
  Antisense strand to SEQ ID NO: 904670
uuucgaggaauccagcccu

SEQ ID NO: 904672 - RNA, 19 nt, Artificial Sequence
  Description of Artificial Sequence: Synthetic oligonucleotide
  Sense strand starting at position 2313 of SEQ ID NO: 589007
aacggugaccgggaaguau

SEQ ID NO: 904673 - RNA, 19 nt, Artificial Sequence
  Description of Artificial Sequence: Synthetic oligonucleotide
  Antisense strand to SEQ ID NO: 904672
auacuucccggucaccguu

SEQ ID NO: 904674 - RNA, 19 nt, Artificial Sequence
  Description of Artificial Sequence: Synthetic oligonucleotide
  Sense strand starting at position 2360 of SEQ ID NO: 589007
cggaauuuaccgugaccgu

SEQ ID NO: 904675 - RNA, 19 nt, Artificial Sequence
  Description of Artificial Sequence: Synthetic oligonucleotide
  Antisense strand to SEQ ID NO: 904674
acggucacgguaaauuccg

SEQ ID NO: 904676 - RNA, 19 nt, Artificial Sequence
  Description of Artificial Sequence: Synthetic oligonucleotide
  Sense strand starting at position 2483 of SEQ ID NO: 589007
ugggcucuugaccaucaga

SEQ ID NO: 904677 - RNA, 19 nt, Artificial Sequence
  Description of Artificial Sequence: Synthetic oligonucleotide
  Antisense strand to SEQ ID NO: 904676
ucugauggucaagagccca

SEQ ID NO: 904678 - RNA, 19 nt, Artificial Sequence
  Description of Artificial Sequence: Synthetic oligonucleotide
  Sense strand starting at position 2531 of SEQ ID NO: 589007
gguugagcucugcaacuua

SEQ ID NO: 904679 - RNA, 19 nt, Artificial Sequence
  Description of Artificial Sequence: Synthetic oligonucleotide
  Antisense strand to SEQ ID NO: 904678
uaaguugcagagcucaacc

SEQ ID NO: 904680 - RNA, 19 nt, Artificial Sequence
  Description of Artificial Sequence: Synthetic oligonucleotide
  Sense strand starting at position 2616 of SEQ ID NO: 589007
gggaaucaugauggucuca

SEQ ID NO: 904681 - RNA, 19 nt, Artificial Sequence
  Description of Artificial Sequence: Synthetic oligonucleotide
  Antisense strand to SEQ ID NO: 904680
ugagaccaucaugauuccc

SEQ ID NO: 904682 - RNA, 19 nt, Artificial Sequence
  Description of Artificial Sequence: Synthetic oligonucleotide
  Sense strand starting at position 2618 of SEQ ID NO: 589007
gaaucaugauggucucaau

SEQ ID NO: 904683 - RNA, 19 nt, Artificial Sequence
  Description of Artificial Sequence: Synthetic oligonucleotide
  Antisense strand to SEQ ID NO: 904682
auugagaccaucaugauuc

SEQ ID NO: 904684 - RNA, 19 nt, Artificial Sequence
  Description of Artificial Sequence: Synthetic oligonucleotide
  Sense strand starting at position 2729 of SEQ ID NO: 589007
gugucuugcagggacugau

SEQ ID NO: 904685 - RNA, 19 nt, Artificial Sequence
  Description of Artificial Sequence: Synthetic oligonucleotide
  Antisense strand to SEQ ID NO: 904684
aucagucccugcaagacac

SEQ ID NO: 904686 - RNA, 19 nt, Artificial Sequence
  Description of Artificial Sequence: Synthetic oligonucleotide
  Sense strand starting at position 2798 of SEQ ID NO: 589007
gugugagauucuucuaaca

SEQ ID NO: 904687 - RNA, 19 nt, Artificial Sequence
  Description of Artificial Sequence: Synthetic oligonucleotide
  Antisense strand to SEQ ID NO: 904686
uguuagaagaaucucacac

SEQ ID NO: 904688 - RNA, 19 nt, Artificial Sequence
  Description of Artificial Sequence: Synthetic oligonucleotide
  Sense strand starting at position 2830 of SEQ ID NO: 589007
ggaacagaagucggaguuu

SEQ ID NO: 904689 - RNA, 19 nt, Artificial Sequence
  Description of Artificial Sequence: Synthetic oligonucleotide
  Antisense strand to SEQ ID NO: 904688
aaacuccgacuucuguucc

SEQ ID NO: 904690 - RNA, 19 nt, Artificial Sequence
  Description of Artificial Sequence: Synthetic oligonucleotide
  Sense strand starting at position 2842 of SEQ ID NO: 589007
ggaguuugcauugauccag

SEQ ID NO: 904691 - RNA, 19 nt, Artificial Sequence
  Description of Artificial Sequence: Synthetic oligonucleotide
  Antisense strand to SEQ ID NO: 904690
cuggaucaaugcaaacucc

SEQ ID NO: 904692 - RNA, 19 nt, Artificial Sequence
  Description of Artificial Sequence: Synthetic oligonucleotide
  Sense strand starting at position 2901 of SEQ ID NO: 589007
guggaagguggguauguua

SEQ ID NO: 904693 - RNA, 19 nt, Artificial Sequence
  Description of Artificial Sequence: Synthetic oligonucleotide
  Antisense strand to SEQ ID NO: 904692
uaacauacccaccuuccac

SEQ ID NO: 904694 - RNA, 19 nt, Artificial Sequence
  Description of Artificial Sequence: Synthetic oligonucleotide
  Sense strand starting at position 3009 of SEQ ID NO: 589007
gggagagucccaggucugu

SEQ ID NO: 904695 - RNA, 19 nt, Artificial Sequence
  Description of Artificial Sequence: Synthetic oligonucleotide
  Antisense strand to SEQ ID NO: 904694
acagaccugggacucuccc

SEQ ID NO: 904696 - RNA, 19 nt, Artificial Sequence
  Description of Artificial Sequence: Synthetic oligonucleotide
  Sense strand starting at position 3039 of SEQ ID NO: 589007
ugagcuguucccgaugaag

SEQ ID NO: 904697 - RNA, 19 nt, Artificial Sequence
  Description of Artificial Sequence: Synthetic oligonucleotide
  Antisense strand to SEQ ID NO: 904696
cuucaucgggaacagcuca

SEQ ID NO: 904698 - RNA, 19 nt, Artificial Sequence
  Description of Artificial Sequence: Synthetic oligonucleotide
  Sense strand starting at position 3175 of SEQ ID NO: 589007
gaaucuauugugcaaaguu

SEQ ID NO: 904699 - RNA, 19 nt, Artificial Sequence
  Description of Artificial Sequence: Synthetic oligonucleotide
  Antisense strand to SEQ ID NO: 904698
aacuuugcacaauagauuc

SEQ ID NO: 904700 - RNA, 19 nt, Artificial Sequence
  Description of Artificial Sequence: Synthetic oligonucleotide
  Sense strand starting at position 3283 of SEQ ID NO: 589007
cccugaaugcagcaauguu

SEQ ID NO: 904701 - RNA, 19 nt, Artificial Sequence
  Description of Artificial Sequence: Synthetic oligonucleotide
  Antisense strand to SEQ ID NO: 904700
aacauugcugcauucaggg

SEQ ID NO: 904702 - RNA, 19 nt, Artificial Sequence
  Description of Artificial Sequence: Synthetic oligonucleotide
  Sense strand starting at position 3291 of SEQ ID NO: 589007
gcagcaauguucccaaaga

SEQ ID NO: 904703 - RNA, 19 nt, Artificial Sequence
  Description of Artificial Sequence: Synthetic oligonucleotide
  Antisense strand to SEQ ID NO: 904702
ucuuugggaacauugcugc

SEQ ID NO: 904704 - RNA, 19 nt, Artificial Sequence
  Description of Artificial Sequence: Synthetic oligonucleotide
  Sense strand starting at position 3507 of SEQ ID NO: 589007
gcugacuucucuccaaaga

SEQ ID NO: 904705 - RNA, 19 nt, Artificial Sequence
  Description of Artificial Sequence: Synthetic oligonucleotide
  Antisense strand to SEQ ID NO: 904704
ucuuuggagagaagucagc

SEQ ID NO: 904706 - RNA, 19 nt, Artificial Sequence
  Description of Artificial Sequence: Synthetic oligonucleotide
  Sense strand starting at position 3535 of SEQ ID NO: 589007
uguccagugacucagugaa

SEQ ID NO: 904707 - RNA, 19 nt, Artificial Sequence
  Description of Artificial Sequence: Synthetic oligonucleotide
  Antisense strand to SEQ ID NO: 904706
uucacugagucacuggaca

SEQ ID NO: 904708 - RNA, 19 nt, Artificial Sequence
  Description of Artificial Sequence: Synthetic oligonucleotide
  Sense strand starting at position 3596 of SEQ ID NO: 589007
guagauguggaggauggua

SEQ ID NO: 904709 - RNA, 19 nt, Artificial Sequence
  Description of Artificial Sequence: Synthetic oligonucleotide
  Antisense strand to SEQ ID NO: 904708
uaccauccuccacaucuac

SEQ ID NO: 904710 - RNA, 19 nt, Artificial Sequence
  Description of Artificial Sequence: Synthetic oligonucleotide
  Sense strand starting at position 3736 of SEQ ID NO: 589007
caguuuccuuaugugagaa

SEQ ID NO: 904711 - RNA, 19 nt, Artificial Sequence
  Description of Artificial Sequence: Synthetic oligonucleotide
  Antisense strand to SEQ ID NO: 904710
uucucacauaaggaaacug

SEQ ID NO: 904712 - RNA, 19 nt, Artificial Sequence
  Description of Artificial Sequence: Synthetic oligonucleotide
  Sense strand starting at position 3737 of SEQ ID NO: 589007
aguuuccuuaugugagaag

SEQ ID NO: 904713 - RNA, 19 nt, Artificial Sequence
  Description of Artificial Sequence: Synthetic oligonucleotide
  Antisense strand to SEQ ID NO: 904712
cuucucacauaaggaaacu

SEQ ID NO: 904714 - RNA, 19 nt, Artificial Sequence
  Description of Artificial Sequence: Synthetic oligonucleotide
  Sense strand starting at position 3778 of SEQ ID NO: 589007
uauuauaaggguugaguga

SEQ ID NO: 904715 - RNA, 19 nt, Artificial Sequence
  Description of Artificial Sequence: Synthetic oligonucleotide
  Antisense strand to SEQ ID NO: 904714
ucacucaacccuuauaaua

SEQ ID NO: 904716 - RNA, 19 nt, Artificial Sequence
  Description of Artificial Sequence: Synthetic oligonucleotide
  Sense strand starting at position 3838 of SEQ ID NO: 589007
uagugaaugcuacaugaac

SEQ ID NO: 904717 - RNA, 19 nt, Artificial Sequence
  Description of Artificial Sequence: Synthetic oligonucleotide
  Antisense strand to SEQ ID NO: 904716
guucauguagcauucacua

SEQ ID NO: 904718 - RNA, 19 nt, Artificial Sequence
  Description of Artificial Sequence: Synthetic oligonucleotide
  Sense strand starting at position 3856 of SEQ ID NO: 589007
cuaugauuauaggcuauua

SEQ ID NO: 904719 - RNA, 19 nt, Artificial Sequence
  Description of Artificial Sequence: Synthetic oligonucleotide
  Antisense strand to SEQ ID NO: 904718
uaauagccuauaaucauag

SEQ ID NO: 904720 - RNA, 19 nt, Artificial Sequence
  Description of Artificial Sequence: Synthetic oligonucleotide
  Sense strand starting at position 68 of SEQ ID NO: 589008
gaccuagugggagguaaau

SEQ ID NO: 904721 - RNA, 19 nt, Artificial Sequence
  Description of Artificial Sequence: Synthetic oligonucleotide
  Antisense strand to SEQ ID NO: 904720
auuuaccucccacuagguc

SEQ ID NO: 904722 - RNA, 19 nt, Artificial Sequence
  Description of Artificial Sequence: Synthetic oligonucleotide
  Sense strand starting at position 124 of SEQ ID NO: 589008
gacagugagucagucuaaa

SEQ ID NO: 904723 - RNA, 19 nt, Artificial Sequence
  Description of Artificial Sequence: Synthetic oligonucleotide
  Antisense strand to SEQ ID NO: 904722
uuuagacugacucacuguc

SEQ ID NO: 904724 - RNA, 19 nt, Artificial Sequence
  Description of Artificial Sequence: Synthetic oligonucleotide
  Sense strand starting at position 379 of SEQ ID NO: 589008
acaauuauguggcuacuuu

SEQ ID NO: 904725 - RNA, 19 nt, Artificial Sequence
  Description of Artificial Sequence: Synthetic oligonucleotide
  Antisense strand to SEQ ID NO: 904724
aaaguagccacauaauugu

SEQ ID NO: 904726 - RNA, 19 nt, Artificial Sequence
  Description of Artificial Sequence: Synthetic oligonucleotide
  Sense strand starting at position 455 of SEQ ID NO: 589008
ucaauauuccucugggagg

SEQ ID NO: 904727 - RNA, 19 nt, Artificial Sequence
  Description of Artificial Sequence: Synthetic oligonucleotide
  Antisense strand to SEQ ID NO: 904726
ccucccagaggaauauuga

SEQ ID NO: 904728 - RNA, 19 nt, Artificial Sequence
  Description of Artificial Sequence: Synthetic oligonucleotide
  Sense strand starting at position 530 of SEQ ID NO: 589008
aguuguaagguagaugcua

SEQ ID NO: 904729 - RNA, 19 nt, Artificial Sequence
  Description of Artificial Sequence: Synthetic oligonucleotide
  Antisense strand to SEQ ID NO: 904728
uagcaucuaccuuacaacu

SEQ ID NO: 904730 - RNA, 19 nt, Artificial Sequence
  Description of Artificial Sequence: Synthetic oligonucleotide
  Sense strand starting at position 538 of SEQ ID NO: 589008
gguagaugcuauccucaca

SEQ ID NO: 904731 - RNA, 19 nt, Artificial Sequence
  Description of Artificial Sequence: Synthetic oligonucleotide
  Antisense strand to SEQ ID NO: 904730
ugugaggauagcaucuacc

SEQ ID NO: 904732 - RNA, 19 nt, Artificial Sequence
  Description of Artificial Sequence: Synthetic oligonucleotide
  Sense strand starting at position 619 of SEQ ID NO: 589008
ccaugaacuugacuugacu

SEQ ID NO: 904733 - RNA, 19 nt, Artificial Sequence
  Description of Artificial Sequence: Synthetic oligonucleotide
  Antisense strand to SEQ ID NO: 904732
agucaagucaaguucaugg

SEQ ID NO: 904734 - RNA, 19 nt, Artificial Sequence
  Description of Artificial Sequence: Synthetic oligonucleotide
  Sense strand starting at position 679 of SEQ ID NO: 589008
uuaacauaugcguauugag

SEQ ID NO: 904735 - RNA, 19 nt, Artificial Sequence
  Description of Artificial Sequence: Synthetic oligonucleotide
  Antisense strand to SEQ ID NO: 904734
cucaauacgcauauguuaa

SEQ ID NO: 904736 - RNA, 19 nt, Artificial Sequence
  Description of Artificial Sequence: Synthetic oligonucleotide
  Sense strand starting at position 689 of SEQ ID NO: 589008
cguauugaggccuauacua

SEQ ID NO: 904737 - RNA, 19 nt, Artificial Sequence
  Description of Artificial Sequence: Synthetic oligonucleotide
  Antisense strand to SEQ ID NO: 904736
uaguauaggccucaauacg

SEQ ID NO: 904738 - RNA, 19 nt, Artificial Sequence
  Description of Artificial Sequence: Synthetic oligonucleotide
  Sense strand starting at position 691 of SEQ ID NO: 589008
uauugaggccuauacuaug

SEQ ID NO: 904739 - RNA, 19 nt, Artificial Sequence
  Description of Artificial Sequence: Synthetic oligonucleotide
  Antisense strand to SEQ ID NO: 904738
cauaguauaggccucaaua

SEQ ID NO: 904740 - RNA, 19 nt, Artificial Sequence
  Description of Artificial Sequence: Synthetic oligonucleotide
  Sense strand starting at position 777 of SEQ ID NO: 589008
ggcauucugucuccaugga

SEQ ID NO: 904741 - RNA, 19 nt, Artificial Sequence
  Description of Artificial Sequence: Synthetic oligonucleotide
  Antisense strand to SEQ ID NO: 904740
uccauggagacagaaugcc

SEQ ID NO: 904742 - RNA, 19 nt, Artificial Sequence
  Description of Artificial Sequence: Synthetic oligonucleotide
  Sense strand starting at position 810 of SEQ ID NO: 589008
augggaagcuuacuauaag

SEQ ID NO: 904743 - RNA, 19 nt, Artificial Sequence
  Description of Artificial Sequence: Synthetic oligonucleotide
  Antisense strand to SEQ ID NO: 904742
cuuauaguaagcuucccau

SEQ ID NO: 904744 - RNA, 19 nt, Artificial Sequence
  Description of Artificial Sequence: Synthetic oligonucleotide
  Sense strand starting at position 825 of SEQ ID NO: 589008
uaaggucaauagguaauau

SEQ ID NO: 904745 - RNA, 19 nt, Artificial Sequence
  Description of Artificial Sequence: Synthetic oligonucleotide
  Antisense strand to SEQ ID NO: 904744
auauuaccuauugaccuua

SEQ ID NO: 904746 - RNA, 19 nt, Artificial Sequence
  Description of Artificial Sequence: Synthetic oligonucleotide
  Sense strand starting at position 920 of SEQ ID NO: 589008
uuacaacuguagucuggau

SEQ ID NO: 904747 - RNA, 19 nt, Artificial Sequence
  Description of Artificial Sequence: Synthetic oligonucleotide
  Antisense strand to SEQ ID NO: 904746
auccagacuacaguuguaa

SEQ ID NO: 904748 - RNA, 19 nt, Artificial Sequence
  Description of Artificial Sequence: Synthetic oligonucleotide
  Sense strand starting at position 1042 of SEQ ID NO: 589008
ggaauaaggcuccaggcua

SEQ ID NO: 904749 - RNA, 19 nt, Artificial Sequence
  Description of Artificial Sequence: Synthetic oligonucleotide
  Antisense strand to SEQ ID NO: 904748
uagccuggagccuuauucc

SEQ ID NO: 904750 - RNA, 19 nt, Artificial Sequence
  Description of Artificial Sequence: Synthetic oligonucleotide
  Sense strand starting at position 1053 of SEQ ID NO: 589008
ccaggcuauucugugacau

SEQ ID NO: 904751 - RNA, 19 nt, Artificial Sequence
  Description of Artificial Sequence: Synthetic oligonucleotide
  Antisense strand to SEQ ID NO: 904750
augucacagaauagccugg

SEQ ID NO: 904752 - RNA, 19 nt, Artificial Sequence
  Description of Artificial Sequence: Synthetic oligonucleotide
  Sense strand starting at position 1054 of SEQ ID NO: 589008
caggcuauucugugacauc

SEQ ID NO: 904753 - RNA, 19 nt, Artificial Sequence
  Description of Artificial Sequence: Synthetic oligonucleotide
  Antisense strand to SEQ ID NO: 904752
gaugucacagaauagccug

SEQ ID NO: 904754 - RNA, 19 nt, Artificial Sequence
  Description of Artificial Sequence: Synthetic oligonucleotide
  Sense strand starting at position 1102 of SEQ ID NO: 589008
agcauuagcaaauguguga

SEQ ID NO: 904755 - RNA, 19 nt, Artificial Sequence
  Description of Artificial Sequence: Synthetic oligonucleotide
  Antisense strand to SEQ ID NO: 904754
ucacacauuugcuaaugcu

SEQ ID NO: 904756 - RNA, 19 nt, Artificial Sequence
  Description of Artificial Sequence: Synthetic oligonucleotide
  Sense strand starting at position 1133 of SEQ ID NO: 589008
uguucuuaugucgaaguua

SEQ ID NO: 904757 - RNA, 19 nt, Artificial Sequence
  Description of Artificial Sequence: Synthetic oligonucleotide
  Antisense strand to SEQ ID NO: 904756
uaacuucgacauaagaaca

SEQ ID NO: 904758 - RNA, 19 nt, Artificial Sequence
  Description of Artificial Sequence: Synthetic oligonucleotide
  Sense strand starting at position 1169 of SEQ ID NO: 589008
ucaaucuggucagugucau

SEQ ID NO: 904759 - RNA, 19 nt, Artificial Sequence
  Description of Artificial Sequence: Synthetic oligonucleotide
  Antisense strand to SEQ ID NO: 904758
augacacugaccagauuga

SEQ ID NO: 904760 - RNA, 19 nt, Artificial Sequence
  Description of Artificial Sequence: Synthetic oligonucleotide
  Sense strand starting at position 1170 of SEQ ID NO: 589008
caaucuggucagugucauu

SEQ ID NO: 904761 - RNA, 19 nt, Artificial Sequence
  Description of Artificial Sequence: Synthetic oligonucleotide
  Antisense strand to SEQ ID NO: 904760
aaugacacugaccagauug

SEQ ID NO: 904762 - RNA, 19 nt, Artificial Sequence
  Description of Artificial Sequence: Synthetic oligonucleotide
  Sense strand starting at position 1291 of SEQ ID NO: 589008
gcucuugacuucuuguaau

SEQ ID NO: 904763 - RNA, 19 nt, Artificial Sequence
  Description of Artificial Sequence: Synthetic oligonucleotide
  Antisense strand to SEQ ID NO: 904762
auuacaagaagucaagagc

SEQ ID NO: 904764 - RNA, 19 nt, Artificial Sequence
  Description of Artificial Sequence: Synthetic oligonucleotide
  Sense strand starting at position 1419 of SEQ ID NO: 589008
aucucuguccuauacauga

SEQ ID NO: 904765 - RNA, 19 nt, Artificial Sequence
  Description of Artificial Sequence: Synthetic oligonucleotide
  Antisense strand to SEQ ID NO: 904764
ucauguauaggacagagau

SEQ ID NO: 904766 - RNA, 19 nt, Artificial Sequence
  Description of Artificial Sequence: Synthetic oligonucleotide
  Sense strand starting at position 1642 of SEQ ID NO: 589008
ugaagucaggcaggaaaua

SEQ ID NO: 904767 - RNA, 19 nt, Artificial Sequence
  Description of Artificial Sequence: Synthetic oligonucleotide
  Antisense strand to SEQ ID NO: 904766
uauuuccugccugacuuca

SEQ ID NO: 904768 - RNA, 19 nt, Artificial Sequence
  Description of Artificial Sequence: Synthetic oligonucleotide
  Sense strand starting at position 1775 of SEQ ID NO: 589008
gcuacaaugcaaugauaga

SEQ ID NO: 904769 - RNA, 19 nt, Artificial Sequence
  Description of Artificial Sequence: Synthetic oligonucleotide
  Antisense strand to SEQ ID NO: 904768
ucuaucauugcauuguagc

SEQ ID NO: 904770 - RNA, 19 nt, Artificial Sequence
  Description of Artificial Sequence: Synthetic oligonucleotide
  Sense strand starting at position 1855 of SEQ ID NO: 589008
uugaaauacucagugaagc

SEQ ID NO: 904771 - RNA, 19 nt, Artificial Sequence
  Description of Artificial Sequence: Synthetic oligonucleotide
  Antisense strand to SEQ ID NO: 904770
gcuucacugaguauuucaa

SEQ ID NO: 904772 - RNA, 19 nt, Artificial Sequence
  Description of Artificial Sequence: Synthetic oligonucleotide
  Sense strand starting at position 1970 of SEQ ID NO: 589008
gcugucuccuauuuauuac

SEQ ID NO: 904773 - RNA, 19 nt, Artificial Sequence
  Description of Artificial Sequence: Synthetic oligonucleotide
  Antisense strand to SEQ ID NO: 904772
guaauaaauaggagacagc

SEQ ID NO: 904774 - RNA, 19 nt, Artificial Sequence
  Description of Artificial Sequence: Synthetic oligonucleotide
  Sense strand starting at position 1987 of SEQ ID NO: 589008
acaguauccugccuggaau

SEQ ID NO: 904775 - RNA, 19 nt, Artificial Sequence
  Description of Artificial Sequence: Synthetic oligonucleotide
  Antisense strand to SEQ ID NO: 904774
auuccaggcaggauacugu

SEQ ID NO: 904776 - RNA, 19 nt, Artificial Sequence
  Description of Artificial Sequence: Synthetic oligonucleotide
  Sense strand starting at position 1988 of SEQ ID NO: 589008
caguauccugccuggaaua

SEQ ID NO: 904777 - RNA, 19 nt, Artificial Sequence
  Description of Artificial Sequence: Synthetic oligonucleotide
  Antisense strand to SEQ ID NO: 904776
uauuccaggcaggauacug

SEQ ID NO: 904778 - RNA, 19 nt, Artificial Sequence
  Description of Artificial Sequence: Synthetic oligonucleotide
  Sense strand starting at position 1990 of SEQ ID NO: 589008
guauccugccuggaauaca

SEQ ID NO: 904779 - RNA, 19 nt, Artificial Sequence
  Description of Artificial Sequence: Synthetic oligonucleotide
  Antisense strand to SEQ ID NO: 904778
uguauuccaggcaggauac

SEQ ID NO: 904780 - RNA, 19 nt, Artificial Sequence
  Description of Artificial Sequence: Synthetic oligonucleotide
  Sense strand starting at position 2009 of SEQ ID NO: 589008
uggauaacuucucuaugac

SEQ ID NO: 904781 - RNA, 19 nt, Artificial Sequence
  Description of Artificial Sequence: Synthetic oligonucleotide
  Antisense strand to SEQ ID NO: 904780
gucauagagaaguuaucca

SEQ ID NO: 904782 - RNA, 19 nt, Artificial Sequence
  Description of Artificial Sequence: Synthetic oligonucleotide
  Sense strand starting at position 2137 of SEQ ID NO: 589008
agggcuuuauaugcagaau

SEQ ID NO: 904783 - RNA, 19 nt, Artificial Sequence
  Description of Artificial Sequence: Synthetic oligonucleotide
  Antisense strand to SEQ ID NO: 904782
auucugcauauaaagcccu

SEQ ID NO: 904784 - RNA, 19 nt, Artificial Sequence
  Description of Artificial Sequence: Synthetic oligonucleotide
  Sense strand starting at position 2138 of SEQ ID NO: 589008
gggcuuuauaugcagaauc

SEQ ID NO: 904785 - RNA, 19 nt, Artificial Sequence
  Description of Artificial Sequence: Synthetic oligonucleotide
  Antisense strand to SEQ ID NO: 904784
gauucugcauauaaagccc

SEQ ID NO: 904786 - RNA, 19 nt, Artificial Sequence
  Description of Artificial Sequence: Synthetic oligonucleotide
  Sense strand starting at position 2140 of SEQ ID NO: 589008
gcuuuauaugcagaaucag

SEQ ID NO: 904787 - RNA, 19 nt, Artificial Sequence
  Description of Artificial Sequence: Synthetic oligonucleotide
  Antisense strand to SEQ ID NO: 904786
cugauucugcauauaaagc

SEQ ID NO: 904788 - RNA, 19 nt, Artificial Sequence
  Description of Artificial Sequence: Synthetic oligonucleotide
  Sense strand starting at position 2146 of SEQ ID NO: 589008
uaugcagaaucaguaaugu

SEQ ID NO: 904789 - RNA, 19 nt, Artificial Sequence
  Description of Artificial Sequence: Synthetic oligonucleotide
  Antisense strand to SEQ ID NO: 904788
acauuacugauucugcaua

SEQ ID NO: 904790 - RNA, 19 nt, Artificial Sequence
  Description of Artificial Sequence: Synthetic oligonucleotide
  Sense strand starting at position 2248 of SEQ ID NO: 589008
aaguaagcagaguaauauu

SEQ ID NO: 904791 - RNA, 19 nt, Artificial Sequence
  Description of Artificial Sequence: Synthetic oligonucleotide
  Antisense strand to SEQ ID NO: 904790
aauauuacucugcuuacuu

SEQ ID NO: 904792 - RNA, 19 nt, Artificial Sequence
  Description of Artificial Sequence: Synthetic oligonucleotide
  Sense strand starting at position 2343 of SEQ ID NO: 589008
augaguuuccuguaaguuu

SEQ ID NO: 904793 - RNA, 19 nt, Artificial Sequence
  Description of Artificial Sequence: Synthetic oligonucleotide
  Antisense strand to SEQ ID NO: 904792
aaacuuacaggaaacucau

SEQ ID NO: 904794 - RNA, 19 nt, Artificial Sequence
  Description of Artificial Sequence: Synthetic oligonucleotide
  Sense strand starting at position 2854 of SEQ ID NO: 589008
guauuugaaguaugcaugu

SEQ ID NO: 904795 - RNA, 19 nt, Artificial Sequence
  Description of Artificial Sequence: Synthetic oligonucleotide
  Antisense strand to SEQ ID NO: 904794
acaugcauacuucaaauac

SEQ ID NO: 904796 - RNA, 19 nt, Artificial Sequence
  Description of Artificial Sequence: Synthetic oligonucleotide
  Sense strand starting at position 2894 of SEQ ID NO: 589008
cauaaauacguagaaguau

SEQ ID NO: 904797 - RNA, 19 nt, Artificial Sequence
  Description of Artificial Sequence: Synthetic oligonucleotide
  Antisense strand to SEQ ID NO: 904796
auacuucuacguauuuaug

SEQ ID NO: 904798 - RNA, 19 nt, Artificial Sequence
  Description of Artificial Sequence: Synthetic oligonucleotide
  Sense strand starting at position 3026 of SEQ ID NO: 589008
gcaguucuuccauacuguu

SEQ ID NO: 904799 - RNA, 19 nt, Artificial Sequence
  Description of Artificial Sequence: Synthetic oligonucleotide
  Antisense strand to SEQ ID NO: 904798
aacaguauggaagaacugc

SEQ ID NO: 904800 - RNA, 19 nt, Artificial Sequence
  Description of Artificial Sequence: Synthetic oligonucleotide
  Sense strand starting at position 150 of SEQ ID NO: 589009
guugauuucugcccacugu

SEQ ID NO: 904801 - RNA, 19 nt, Artificial Sequence
  Description of Artificial Sequence: Synthetic oligonucleotide
  Antisense strand to SEQ ID NO: 904800
acagugggcagaaaucaac

SEQ ID NO: 904802 - RNA, 19 nt, Artificial Sequence
  Description of Artificial Sequence: Synthetic oligonucleotide
  Sense strand starting at position 224 of SEQ ID NO: 589009
ggugauauaacauaguagu

SEQ ID NO: 904803 - RNA, 19 nt, Artificial Sequence
  Description of Artificial Sequence: Synthetic oligonucleotide
  Antisense strand to SEQ ID NO: 904802
acuacuauguuauaucacc

SEQ ID NO: 904804 - RNA, 19 nt, Artificial Sequence
  Description of Artificial Sequence: Synthetic oligonucleotide
  Sense strand starting at position 234 of SEQ ID NO: 589009
cauaguaguuaagaccaga

SEQ ID NO: 904805 - RNA, 19 nt, Artificial Sequence
  Description of Artificial Sequence: Synthetic oligonucleotide
  Antisense strand to SEQ ID NO: 904804
ucuggucuuaacuacuaug

SEQ ID NO: 904806 - RNA, 19 nt, Artificial Sequence
  Description of Artificial Sequence: Synthetic oligonucleotide
  Sense strand starting at position 250 of SEQ ID NO: 589009
agagaauuauucuaugacu

SEQ ID NO: 904807 - RNA, 19 nt, Artificial Sequence
  Description of Artificial Sequence: Synthetic oligonucleotide
  Antisense strand to SEQ ID NO: 904806
agucauagaauaauucucu

SEQ ID NO: 904808 - RNA, 19 nt, Artificial Sequence
  Description of Artificial Sequence: Synthetic oligonucleotide
  Sense strand starting at position 261 of SEQ ID NO: 589009
cuaugacuuugggcacauu

SEQ ID NO: 904809 - RNA, 19 nt, Artificial Sequence
  Description of Artificial Sequence: Synthetic oligonucleotide
  Antisense strand to SEQ ID NO: 904808
aaugugcccaaagucauag

SEQ ID NO: 904810 - RNA, 19 nt, Artificial Sequence
  Description of Artificial Sequence: Synthetic oligonucleotide
  Sense strand starting at position 463 of SEQ ID NO: 589009
caaauauuguuggcuguua

SEQ ID NO: 904811 - RNA, 19 nt, Artificial Sequence
  Description of Artificial Sequence: Synthetic oligonucleotide
  Antisense strand to SEQ ID NO: 904810
uaacagccaacaauauuug

SEQ ID NO: 904812 - RNA, 19 nt, Artificial Sequence
  Description of Artificial Sequence: Synthetic oligonucleotide
  Sense strand starting at position 465 of SEQ ID NO: 589009
aauauuguuggcuguuacu

SEQ ID NO: 904813 - RNA, 19 nt, Artificial Sequence
  Description of Artificial Sequence: Synthetic oligonucleotide
  Antisense strand to SEQ ID NO: 904812
aguaacagccaacaauauu

SEQ ID NO: 904814 - RNA, 19 nt, Artificial Sequence
  Description of Artificial Sequence: Synthetic oligonucleotide
  Sense strand starting at position 482 of SEQ ID NO: 589009
cuguuuagugcuuuguuau

SEQ ID NO: 904815 - RNA, 19 nt, Artificial Sequence
  Description of Artificial Sequence: Synthetic oligonucleotide
  Antisense strand to SEQ ID NO: 904814
auaacaaagcacuaaacag

SEQ ID NO: 904816 - RNA, 19 nt, Artificial Sequence
  Description of Artificial Sequence: Synthetic oligonucleotide
  Sense strand starting at position 488 of SEQ ID NO: 589009
agugcuuuguuauuuaaug

SEQ ID NO: 904817 - RNA, 19 nt, Artificial Sequence
  Description of Artificial Sequence: Synthetic oligonucleotide
  Antisense strand to SEQ ID NO: 904816
cauuaaauaacaaagcacu

SEQ ID NO: 904818 - RNA, 19 nt, Artificial Sequence
  Description of Artificial Sequence: Synthetic oligonucleotide
  Sense strand starting at position 562 of SEQ ID NO: 589009
gugggaaacuucuuuaagg

SEQ ID NO: 904819 - RNA, 19 nt, Artificial Sequence
  Description of Artificial Sequence: Synthetic oligonucleotide
  Antisense strand to SEQ ID NO: 904818
ccuuaaagaaguuucccac

SEQ ID NO: 904820 - RNA, 19 nt, Artificial Sequence
  Description of Artificial Sequence: Synthetic oligonucleotide
  Sense strand starting at position 608 of SEQ ID NO: 589009
auauaagggcuagguagau

SEQ ID NO: 904821 - RNA, 19 nt, Artificial Sequence
  Description of Artificial Sequence: Synthetic oligonucleotide
  Antisense strand to SEQ ID NO: 904820
aucuaccuagcccuuauau

SEQ ID NO: 904822 - RNA, 19 nt, Artificial Sequence
  Description of Artificial Sequence: Synthetic oligonucleotide
  Sense strand starting at position 631 of SEQ ID NO: 589009
gcaugaauuccagguuuac

SEQ ID NO: 904823 - RNA, 19 nt, Artificial Sequence
  Description of Artificial Sequence: Synthetic oligonucleotide
  Antisense strand to SEQ ID NO: 904822
guaaaccuggaauucaugc

SEQ ID NO: 904824 - RNA, 19 nt, Artificial Sequence
  Description of Artificial Sequence: Synthetic oligonucleotide
  Sense strand starting at position 651 of SEQ ID NO: 589009
aaauaucaccuguguggau

SEQ ID NO: 904825 - RNA, 19 nt, Artificial Sequence
  Description of Artificial Sequence: Synthetic oligonucleotide
  Antisense strand to SEQ ID NO: 904824
auccacacaggugauauuu

SEQ ID NO: 904826 - RNA, 19 nt, Artificial Sequence
  Description of Artificial Sequence: Synthetic oligonucleotide
  Sense strand starting at position 652 of SEQ ID NO: 589009
aauaucaccuguguggauu

SEQ ID NO: 904827 - RNA, 19 nt, Artificial Sequence
  Description of Artificial Sequence: Synthetic oligonucleotide
  Antisense strand to SEQ ID NO: 904826
aauccacacaggugauauu

SEQ ID NO: 904828 - RNA, 19 nt, Artificial Sequence
  Description of Artificial Sequence: Synthetic oligonucleotide
  Sense strand starting at position 705 of SEQ ID NO: 589009
uguuuaccugaaggaguua

SEQ ID NO: 904829 - RNA, 19 nt, Artificial Sequence
  Description of Artificial Sequence: Synthetic oligonucleotide
  Antisense strand to SEQ ID NO: 904828
uaacuccuucagguaaaca

SEQ ID NO: 904830 - RNA, 19 nt, Artificial Sequence
  Description of Artificial Sequence: Synthetic oligonucleotide
  Sense strand starting at position 725 of SEQ ID NO: 589009
ugaauugacuagucauaau

SEQ ID NO: 904831 - RNA, 19 nt, Artificial Sequence
  Description of Artificial Sequence: Synthetic oligonucleotide
  Antisense strand to SEQ ID NO: 904830
auuaugacuagucaauuca

SEQ ID NO: 904832 - RNA, 19 nt, Artificial Sequence
  Description of Artificial Sequence: Synthetic oligonucleotide
  Sense strand starting at position 760 of SEQ ID NO: 589009
aggauauagugguugcuca

SEQ ID NO: 904833 - RNA, 19 nt, Artificial Sequence
  Description of Artificial Sequence: Synthetic oligonucleotide
  Antisense strand to SEQ ID NO: 904832
ugagcaaccacuauauccu

SEQ ID NO: 904834 - RNA, 19 nt, Artificial Sequence
  Description of Artificial Sequence: Synthetic oligonucleotide
  Sense strand starting at position 761 of SEQ ID NO: 589009
ggauauagugguugcucaa

SEQ ID NO: 904835 - RNA, 19 nt, Artificial Sequence
  Description of Artificial Sequence: Synthetic oligonucleotide
  Antisense strand to SEQ ID NO: 904834
uugagcaaccacuauaucc

SEQ ID NO: 904836 - RNA, 19 nt, Artificial Sequence
  Description of Artificial Sequence: Synthetic oligonucleotide
  Sense strand starting at position 764 of SEQ ID NO: 589009
uauagugguugcucaauaa

SEQ ID NO: 904837 - RNA, 19 nt, Artificial Sequence
  Description of Artificial Sequence: Synthetic oligonucleotide
  Antisense strand to SEQ ID NO: 904836
uuauugagcaaccacuaua

SEQ ID NO: 904838 - RNA, 19 nt, Artificial Sequence
  Description of Artificial Sequence: Synthetic oligonucleotide
  Sense strand starting at position 894 of SEQ ID NO: 589009
aggguugagcuauaugauu

SEQ ID NO: 904839 - RNA, 19 nt, Artificial Sequence
  Description of Artificial Sequence: Synthetic oligonucleotide
  Antisense strand to SEQ ID NO: 904838
aaucauauagcucaacccu

SEQ ID NO: 904840 - RNA, 19 nt, Artificial Sequence
  Description of Artificial Sequence: Synthetic oligonucleotide
  Sense strand starting at position 903 of SEQ ID NO: 589009
cuauaugauuuccagguau

SEQ ID NO: 904841 - RNA, 19 nt, Artificial Sequence
  Description of Artificial Sequence: Synthetic oligonucleotide
  Antisense strand to SEQ ID NO: 904840
auaccuggaaaucauauag

SEQ ID NO: 904842 - RNA, 19 nt, Artificial Sequence
  Description of Artificial Sequence: Synthetic oligonucleotide
  Sense strand starting at position 949 of SEQ ID NO: 589009
uauuaagagccuugagucu

SEQ ID NO: 904843 - RNA, 19 nt, Artificial Sequence
  Description of Artificial Sequence: Synthetic oligonucleotide
  Antisense strand to SEQ ID NO: 904842
agacucaaggcucuuaaua

SEQ ID NO: 904844 - RNA, 19 nt, Artificial Sequence
  Description of Artificial Sequence: Synthetic oligonucleotide
  Sense strand starting at position 962 of SEQ ID NO: 589009
gagucucaugcaggacuua

SEQ ID NO: 904845 - RNA, 19 nt, Artificial Sequence
  Description of Artificial Sequence: Synthetic oligonucleotide
  Antisense strand to SEQ ID NO: 904844
uaaguccugcaugagacuc

SEQ ID NO: 904846 - RNA, 19 nt, Artificial Sequence
  Description of Artificial Sequence: Synthetic oligonucleotide
  Sense strand starting at position 963 of SEQ ID NO: 589009
agucucaugcaggacuuau

SEQ ID NO: 904847 - RNA, 19 nt, Artificial Sequence
  Description of Artificial Sequence: Synthetic oligonucleotide
  Antisense strand to SEQ ID NO: 904846
auaaguccugcaugagacu

SEQ ID NO: 904848 - RNA, 19 nt, Artificial Sequence
  Description of Artificial Sequence: Synthetic oligonucleotide
  Sense strand starting at position 1747 of SEQ ID NO: 589009
uuagcaggucaccaucauu

SEQ ID NO: 904849 - RNA, 19 nt, Artificial Sequence
  Description of Artificial Sequence: Synthetic oligonucleotide
  Antisense strand to SEQ ID NO: 904848
aaugauggugaccugcuaa

SEQ ID NO: 904850 - RNA, 19 nt, Artificial Sequence
  Description of Artificial Sequence: Synthetic oligonucleotide
  Sense strand starting at position 1750 of SEQ ID NO: 589009
gcaggucaccaucauuaau

SEQ ID NO: 904851 - RNA, 19 nt, Artificial Sequence
  Description of Artificial Sequence: Synthetic oligonucleotide
  Antisense strand to SEQ ID NO: 904850
auuaaugauggugaccugc

SEQ ID NO: 904852 - RNA, 19 nt, Artificial Sequence
  Description of Artificial Sequence: Synthetic oligonucleotide
  Sense strand starting at position 1806 of SEQ ID NO: 589009
ggaacagauuuccagcaag

SEQ ID NO: 904853 - RNA, 19 nt, Artificial Sequence
  Description of Artificial Sequence: Synthetic oligonucleotide
  Antisense strand to SEQ ID NO: 904852
cuugcuggaaaucuguucc

SEQ ID NO: 904854 - RNA, 19 nt, Artificial Sequence
  Description of Artificial Sequence: Synthetic oligonucleotide
  Sense strand starting at position 1820 of SEQ ID NO: 589009
gcaaguuaauuucugugau

SEQ ID NO: 904855 - RNA, 19 nt, Artificial Sequence
  Description of Artificial Sequence: Synthetic oligonucleotide
  Antisense strand to SEQ ID NO: 904854
aucacagaaauuaacuugc

SEQ ID NO: 904856 - RNA, 19 nt, Artificial Sequence
  Description of Artificial Sequence: Synthetic oligonucleotide
  Sense strand starting at position 1987 of SEQ ID NO: 589009
ucacgucagaacuguuaag

SEQ ID NO: 904857 - RNA, 19 nt, Artificial Sequence
  Description of Artificial Sequence: Synthetic oligonucleotide
  Antisense strand to SEQ ID NO: 904856
cuuaacaguucugacguga

SEQ ID NO: 904858 - RNA, 19 nt, Artificial Sequence
  Description of Artificial Sequence: Synthetic oligonucleotide
  Sense strand starting at position 2011 of SEQ ID NO: 589009
guggauugcugccugauaa

SEQ ID NO: 904859 - RNA, 19 nt, Artificial Sequence
  Description of Artificial Sequence: Synthetic oligonucleotide
  Antisense strand to SEQ ID NO: 904858
uuaucaggcagcaauccac

SEQ ID NO: 904860 - RNA, 19 nt, Artificial Sequence
  Description of Artificial Sequence: Synthetic oligonucleotide
  Sense strand starting at position 2012 of SEQ ID NO: 589009
uggauugcugccugauaau

SEQ ID NO: 904861 - RNA, 19 nt, Artificial Sequence
  Description of Artificial Sequence: Synthetic oligonucleotide
  Antisense strand to SEQ ID NO: 904860
auuaucaggcagcaaucca

SEQ ID NO: 904862 - RNA, 19 nt, Artificial Sequence
  Description of Artificial Sequence: Synthetic oligonucleotide
  Sense strand starting at position 2108 of SEQ ID NO: 589009
gugaauauuucugcccuuu

SEQ ID NO: 904863 - RNA, 19 nt, Artificial Sequence
  Description of Artificial Sequence: Synthetic oligonucleotide
  Antisense strand to SEQ ID NO: 904862
aaagggcagaaauauucac

SEQ ID NO: 904864 - RNA, 19 nt, Artificial Sequence
  Description of Artificial Sequence: Synthetic oligonucleotide
  Sense strand starting at position 2131 of SEQ ID NO: 589009
acuugaucagcacaugauu

SEQ ID NO: 904865 - RNA, 19 nt, Artificial Sequence
  Description of Artificial Sequence: Synthetic oligonucleotide
  Antisense strand to SEQ ID NO: 904864
aaucaugugcugaucaagu

SEQ ID NO: 904866 - RNA, 19 nt, Artificial Sequence
  Description of Artificial Sequence: Synthetic oligonucleotide
  Sense strand starting at position 2166 of SEQ ID NO: 589009
ccuugugaugcuuaaaguu

SEQ ID NO: 904867 - RNA, 19 nt, Artificial Sequence
  Description of Artificial Sequence: Synthetic oligonucleotide
  Antisense strand to SEQ ID NO: 904866
aacuuuaagcaucacaagg

SEQ ID NO: 904868 - RNA, 19 nt, Artificial Sequence
  Description of Artificial Sequence: Synthetic oligonucleotide
  Sense strand starting at position 2201 of SEQ ID NO: 589009
agcacuaauuuggaauaca

SEQ ID NO: 904869 - RNA, 19 nt, Artificial Sequence
  Description of Artificial Sequence: Synthetic oligonucleotide
  Antisense strand to SEQ ID NO: 904868
uguauuccaaauuagugcu

SEQ ID NO: 904870 - RNA, 19 nt, Artificial Sequence
  Description of Artificial Sequence: Synthetic oligonucleotide
  Sense strand starting at position 2240 of SEQ ID NO: 589009
uuuguuuacuuugcagaga

SEQ ID NO: 904871 - RNA, 19 nt, Artificial Sequence
  Description of Artificial Sequence: Synthetic oligonucleotide
  Antisense strand to SEQ ID NO: 904870
ucucugcaaaguaaacaaa

SEQ ID NO: 904872 - RNA, 19 nt, Artificial Sequence
  Description of Artificial Sequence: Synthetic oligonucleotide
  Sense strand starting at position 2834 of SEQ ID NO: 589009
gaggcaaaguuauccuaag

SEQ ID NO: 904873 - RNA, 19 nt, Artificial Sequence
  Description of Artificial Sequence: Synthetic oligonucleotide
  Antisense strand to SEQ ID NO: 904872
cuuaggauaacuuugccuc

SEQ ID NO: 904874 - RNA, 19 nt, Artificial Sequence
  Description of Artificial Sequence: Synthetic oligonucleotide
  Sense strand starting at position 2897 of SEQ ID NO: 589009
uauacuacggagugauagu

SEQ ID NO: 904875 - RNA, 19 nt, Artificial Sequence
  Description of Artificial Sequence: Synthetic oligonucleotide
  Antisense strand to SEQ ID NO: 904874
acuaucacuccguaguaua

SEQ ID NO: 904876 - RNA, 19 nt, Artificial Sequence
  Description of Artificial Sequence: Synthetic oligonucleotide
  Sense strand starting at position 2898 of SEQ ID NO: 589009
auacuacggagugauagua

SEQ ID NO: 904877 - RNA, 19 nt, Artificial Sequence
  Description of Artificial Sequence: Synthetic oligonucleotide
  Antisense strand to SEQ ID NO: 904876
uacuaucacuccguaguau

SEQ ID NO: 904878 - RNA, 19 nt, Artificial Sequence
  Description of Artificial Sequence: Synthetic oligonucleotide
  Sense strand starting at position 3111 of SEQ ID NO: 589009
gucccuaucucguuccaua

SEQ ID NO: 904879 - RNA, 19 nt, Artificial Sequence
  Description of Artificial Sequence: Synthetic oligonucleotide
  Antisense strand to SEQ ID NO: 904878
uauggaacgagauagggac

SEQ ID NO: 904880 - RNA, 19 nt, Artificial Sequence
  Description of Artificial Sequence: Synthetic oligonucleotide
  Sense strand starting at position 568 of SEQ ID NO: 589010
cagggaucgcucugggagu

SEQ ID NO: 904881 - RNA, 19 nt, Artificial Sequence
  Description of Artificial Sequence: Synthetic oligonucleotide
  Antisense strand to SEQ ID NO: 904880
acucccagagcgaucccug

SEQ ID NO: 904882 - RNA, 19 nt, Artificial Sequence
  Description of Artificial Sequence: Synthetic oligonucleotide
  Sense strand starting at position 661 of SEQ ID NO: 589010
guugguguaccaugugaca

SEQ ID NO: 904883 - RNA, 19 nt, Artificial Sequence
  Description of Artificial Sequence: Synthetic oligonucleotide
  Antisense strand to SEQ ID NO: 904882
ugucacaugguacaccaac

SEQ ID NO: 904884 - RNA, 19 nt, Artificial Sequence
  Description of Artificial Sequence: Synthetic oligonucleotide
  Sense strand starting at position 663 of SEQ ID NO: 589010
ugguguaccaugugacaaa

SEQ ID NO: 904885 - RNA, 19 nt, Artificial Sequence
  Description of Artificial Sequence: Synthetic oligonucleotide
  Antisense strand to SEQ ID NO: 904884
uuugucacaugguacacca

SEQ ID NO: 904886 - RNA, 19 nt, Artificial Sequence
  Description of Artificial Sequence: Synthetic oligonucleotide
  Sense strand starting at position 664 of SEQ ID NO: 589010
gguguaccaugugacaaau

SEQ ID NO: 904887 - RNA, 19 nt, Artificial Sequence
  Description of Artificial Sequence: Synthetic oligonucleotide
  Antisense strand to SEQ ID NO: 904886
auuugucacaugguacacc

SEQ ID NO: 904888 - RNA, 19 nt, Artificial Sequence
  Description of Artificial Sequence: Synthetic oligonucleotide
  Sense strand starting at position 666 of SEQ ID NO: 589010
uguaccaugugacaaauga

SEQ ID NO: 904889 - RNA, 19 nt, Artificial Sequence
  Description of Artificial Sequence: Synthetic oligonucleotide
  Antisense strand to SEQ ID NO: 904888
ucauuugucacaugguaca

SEQ ID NO: 904890 - RNA, 19 nt, Artificial Sequence
  Description of Artificial Sequence: Synthetic oligonucleotide
  Sense strand starting at position 670 of SEQ ID NO: 589010
ccaugugacaaaugacgau

SEQ ID NO: 904891 - RNA, 19 nt, Artificial Sequence
  Description of Artificial Sequence: Synthetic oligonucleotide
  Antisense strand to SEQ ID NO: 904890
aucgucauuugucacaugg

SEQ ID NO: 904892 - RNA, 19 nt, Artificial Sequence
  Description of Artificial Sequence: Synthetic oligonucleotide
  Sense strand starting at position 1140 of SEQ ID NO: 589010
gggcaaugucccggucugu

SEQ ID NO: 904893 - RNA, 19 nt, Artificial Sequence
  Description of Artificial Sequence: Synthetic oligonucleotide
  Antisense strand to SEQ ID NO: 904892
acagaccgggacauugccc

SEQ ID NO: 904894 - RNA, 19 nt, Artificial Sequence
  Description of Artificial Sequence: Synthetic oligonucleotide
  Sense strand starting at position 1565 of SEQ ID NO: 589010
cgagacacgucucaaagua

SEQ ID NO: 904895 - RNA, 19 nt, Artificial Sequence
  Description of Artificial Sequence: Synthetic oligonucleotide
  Antisense strand to SEQ ID NO: 904894
uacuuugagacgugucucg

SEQ ID NO: 904896 - RNA, 19 nt, Artificial Sequence
  Description of Artificial Sequence: Synthetic oligonucleotide
  Sense strand starting at position 2448 of SEQ ID NO: 589010
ggaaucgaccauugagcua

SEQ ID NO: 904897 - RNA, 19 nt, Artificial Sequence
  Description of Artificial Sequence: Synthetic oligonucleotide
  Antisense strand to SEQ ID NO: 904896
uagcucaauggucgauucc

SEQ ID NO: 904898 - RNA, 19 nt, Artificial Sequence
  Description of Artificial Sequence: Synthetic oligonucleotide
  Sense strand starting at position 2525 of SEQ ID NO: 589010
gggcuuugaaccugagagu

SEQ ID NO: 904899 - RNA, 19 nt, Artificial Sequence
  Description of Artificial Sequence: Synthetic oligonucleotide
  Antisense strand to SEQ ID NO: 904898
acucucagguucaaagccc

SEQ ID NO: 904900 - RNA, 19 nt, Artificial Sequence
  Description of Artificial Sequence: Synthetic oligonucleotide
  Sense strand starting at position 2551 of SEQ ID NO: 589010
ccaccuuugcgcuaaccaa

SEQ ID NO: 904901 - RNA, 19 nt, Artificial Sequence
  Description of Artificial Sequence: Synthetic oligonucleotide
  Antisense strand to SEQ ID NO: 904900
uugguuagcgcaaaggugg

SEQ ID NO: 904902 - RNA, 19 nt, Artificial Sequence
  Description of Artificial Sequence: Synthetic oligonucleotide
  Sense strand starting at position 2606 of SEQ ID NO: 589010
gccagagugcauugaagag

SEQ ID NO: 904903 - RNA, 19 nt, Artificial Sequence
  Description of Artificial Sequence: Synthetic oligonucleotide
  Antisense strand to SEQ ID NO: 904902
cucuucaaugcacucuggc

SEQ ID NO: 904904 - RNA, 19 nt, Artificial Sequence
  Description of Artificial Sequence: Synthetic oligonucleotide
  Sense strand starting at position 3237 of SEQ ID NO: 589010
auccuaacaccuugggaua

SEQ ID NO: 904905 - RNA, 19 nt, Artificial Sequence
  Description of Artificial Sequence: Synthetic oligonucleotide
  Antisense strand to SEQ ID NO: 904904
uaucccaagguguuaggau

SEQ ID NO: 904906 - RNA, 19 nt, Artificial Sequence
  Description of Artificial Sequence: Synthetic oligonucleotide
  Sense strand starting at position 3664 of SEQ ID NO: 589010
aauauauaagcaugguguu

SEQ ID NO: 904907 - RNA, 19 nt, Artificial Sequence
  Description of Artificial Sequence: Synthetic oligonucleotide
  Antisense strand to SEQ ID NO: 904906
aacaccaugcuuauauauu

SEQ ID NO: 904908 - RNA, 19 nt, Artificial Sequence
  Description of Artificial Sequence: Synthetic oligonucleotide
  Sense strand starting at position 3798 of SEQ ID NO: 589010
gggcgaagcucugucucaa

SEQ ID NO: 904909 - RNA, 19 nt, Artificial Sequence
  Description of Artificial Sequence: Synthetic oligonucleotide
  Antisense strand to SEQ ID NO: 904908
uugagacagagcuucgccc

SEQ ID NO: 904910 - RNA, 19 nt, Artificial Sequence
  Description of Artificial Sequence: Synthetic oligonucleotide
  Sense strand starting at position 3848 of SEQ ID NO: 589010
aaaucaugcuguuacagga

SEQ ID NO: 904911 - RNA, 19 nt, Artificial Sequence
  Description of Artificial Sequence: Synthetic oligonucleotide
  Antisense strand to SEQ ID NO: 904910
uccuguaacagcaugauuu

SEQ ID NO: 904912 - RNA, 19 nt, Artificial Sequence
  Description of Artificial Sequence: Synthetic oligonucleotide
  Sense strand starting at position 3948 of SEQ ID NO: 589010
gcaaguuaucaggaaagua

SEQ ID NO: 904913 - RNA, 19 nt, Artificial Sequence
  Description of Artificial Sequence: Synthetic oligonucleotide
  Antisense strand to SEQ ID NO: 904912
uacuuuccugauaacuugc

SEQ ID NO: 904914 - RNA, 19 nt, Artificial Sequence
  Description of Artificial Sequence: Synthetic oligonucleotide
  Sense strand starting at position 3975 of SEQ ID NO: 589010
aagaaugguuucucuacag

SEQ ID NO: 904915 - RNA, 19 nt, Artificial Sequence
  Description of Artificial Sequence: Synthetic oligonucleotide
  Antisense strand to SEQ ID NO: 904914
cuguagagaaaccauucuu

SEQ ID NO: 904916 - RNA, 19 nt, Artificial Sequence
  Description of Artificial Sequence: Synthetic oligonucleotide
  Sense strand starting at position 568 of SEQ ID NO: 589011
caagcuugccucugacagu

SEQ ID NO: 904917 - RNA, 19 nt, Artificial Sequence
  Description of Artificial Sequence: Synthetic oligonucleotide
  Antisense strand to SEQ ID NO: 904916
acugucagaggcaagcuug

SEQ ID NO: 904918 - RNA, 19 nt, Artificial Sequence
  Description of Artificial Sequence: Synthetic oligonucleotide
  Sense strand starting at position 623 of SEQ ID NO: 589011
ucgaaaguacuguaugcga

SEQ ID NO: 904919 - RNA, 19 nt, Artificial Sequence
  Description of Artificial Sequence: Synthetic oligonucleotide
  Antisense strand to SEQ ID NO: 904918
ucgcauacaguacuuucga

SEQ ID NO: 904920 - RNA, 19 nt, Artificial Sequence
  Description of Artificial Sequence: Synthetic oligonucleotide
  Sense strand starting at position 630 of SEQ ID NO: 589011
uacuguaugcgagcagcua

SEQ ID NO: 904921 - RNA, 19 nt, Artificial Sequence
  Description of Artificial Sequence: Synthetic oligonucleotide
  Antisense strand to SEQ ID NO: 904920
uagcugcucgcauacagua

SEQ ID NO: 904922 - RNA, 19 nt, Artificial Sequence
  Description of Artificial Sequence: Synthetic oligonucleotide
  Sense strand starting at position 646 of SEQ ID NO: 589011
cuacuaugguaagaacuga

SEQ ID NO: 904923 - RNA, 19 nt, Artificial Sequence
  Description of Artificial Sequence: Synthetic oligonucleotide
  Antisense strand to SEQ ID NO: 904922
ucaguucuuaccauaguag

SEQ ID NO: 904924 - RNA, 19 nt, Artificial Sequence
  Description of Artificial Sequence: Synthetic oligonucleotide
  Sense strand starting at position 660 of SEQ ID NO: 589011
acugaaguuuauccuuaga

SEQ ID NO: 904925 - RNA, 19 nt, Artificial Sequence
  Description of Artificial Sequence: Synthetic oligonucleotide
  Antisense strand to SEQ ID NO: 904924
ucuaaggauaaacuucagu

SEQ ID NO: 904926 - RNA, 19 nt, Artificial Sequence
  Description of Artificial Sequence: Synthetic oligonucleotide
  Sense strand starting at position 662 of SEQ ID NO: 589011
ugaaguuuauccuuagaga

SEQ ID NO: 904927 - RNA, 19 nt, Artificial Sequence
  Description of Artificial Sequence: Synthetic oligonucleotide
  Antisense strand to SEQ ID NO: 904926
ucucuaaggauaaacuuca

SEQ ID NO: 904928 - RNA, 19 nt, Artificial Sequence
  Description of Artificial Sequence: Synthetic oligonucleotide
  Sense strand starting at position 665 of SEQ ID NO: 589011
aguuuauccuuagagacca

SEQ ID NO: 904929 - RNA, 19 nt, Artificial Sequence
  Description of Artificial Sequence: Synthetic oligonucleotide
  Antisense strand to SEQ ID NO: 904928
uggucucuaaggauaaacu

SEQ ID NO: 904930 - RNA, 19 nt, Artificial Sequence
  Description of Artificial Sequence: Synthetic oligonucleotide
  Sense strand starting at position 727 of SEQ ID NO: 589011
cgucguaacuuaucacaug

SEQ ID NO: 904931 - RNA, 19 nt, Artificial Sequence
  Description of Artificial Sequence: Synthetic oligonucleotide
  Antisense strand to SEQ ID NO: 904930
caugugauaaguuacgacg

SEQ ID NO: 904932 - RNA, 19 nt, Artificial Sequence
  Description of Artificial Sequence: Synthetic oligonucleotide
  Sense strand starting at position 860 of SEQ ID NO: 589011
cuuacugaguccuuuagag

SEQ ID NO: 904933 - RNA, 19 nt, Artificial Sequence
  Description of Artificial Sequence: Synthetic oligonucleotide
  Antisense strand to SEQ ID NO: 904932
cucuaaaggacucaguaag

SEQ ID NO: 904934 - RNA, 19 nt, Artificial Sequence
  Description of Artificial Sequence: Synthetic oligonucleotide
  Sense strand starting at position 870 of SEQ ID NO: 589011
ccuuuagagacucgagaac

SEQ ID NO: 904935 - RNA, 19 nt, Artificial Sequence
  Description of Artificial Sequence: Synthetic oligonucleotide
  Antisense strand to SEQ ID NO: 904934
guucucgagucucuaaagg

SEQ ID NO: 904936 - RNA, 19 nt, Artificial Sequence
  Description of Artificial Sequence: Synthetic oligonucleotide
  Sense strand starting at position 925 of SEQ ID NO: 589011
acaggaguauuucagguga

SEQ ID NO: 904937 - RNA, 19 nt, Artificial Sequence
  Description of Artificial Sequence: Synthetic oligonucleotide
  Antisense strand to SEQ ID NO: 904936
ucaccugaaauacuccugu

SEQ ID NO: 904938 - RNA, 19 nt, Artificial Sequence
  Description of Artificial Sequence: Synthetic oligonucleotide
  Sense strand starting at position 927 of SEQ ID NO: 589011
aggaguauuucaggugaau

SEQ ID NO: 904939 - RNA, 19 nt, Artificial Sequence
  Description of Artificial Sequence: Synthetic oligonucleotide
  Antisense strand to SEQ ID NO: 904938
auucaccugaaauacuccu

SEQ ID NO: 904940 - RNA, 19 nt, Artificial Sequence
  Description of Artificial Sequence: Synthetic oligonucleotide
  Sense strand starting at position 956 of SEQ ID NO: 589011
aagugucuccgcgaggaga

SEQ ID NO: 904941 - RNA, 19 nt, Artificial Sequence
  Description of Artificial Sequence: Synthetic oligonucleotide
  Antisense strand to SEQ ID NO: 904940
ucuccucgcggagacacuu

SEQ ID NO: 904942 - RNA, 19 nt, Artificial Sequence
  Description of Artificial Sequence: Synthetic oligonucleotide
  Sense strand starting at position 1169 of SEQ ID NO: 589011
gaaggagccuacguuaauu

SEQ ID NO: 904943 - RNA, 19 nt, Artificial Sequence
  Description of Artificial Sequence: Synthetic oligonucleotide
  Antisense strand to SEQ ID NO: 904942
aauuaacguaggcuccuuc

SEQ ID NO: 904944 - RNA, 19 nt, Artificial Sequence
  Description of Artificial Sequence: Synthetic oligonucleotide
  Sense strand starting at position 1180 of SEQ ID NO: 589011
cguuaauucucagcucuca

SEQ ID NO: 904945 - RNA, 19 nt, Artificial Sequence
  Description of Artificial Sequence: Synthetic oligonucleotide
  Antisense strand to SEQ ID NO: 904944
ugagagcugagaauuaacg

SEQ ID NO: 904946 - RNA, 19 nt, Artificial Sequence
  Description of Artificial Sequence: Synthetic oligonucleotide
  Sense strand starting at position 1239 of SEQ ID NO: 589011
gguacaacugccggaaagu

SEQ ID NO: 904947 - RNA, 19 nt, Artificial Sequence
  Description of Artificial Sequence: Synthetic oligonucleotide
  Antisense strand to SEQ ID NO: 904946
acuuuccggcaguuguacc

SEQ ID NO: 904948 - RNA, 19 nt, Artificial Sequence
  Description of Artificial Sequence: Synthetic oligonucleotide
  Sense strand starting at position 2215 of SEQ ID NO: 589011
gggaccucauggguucuaa

SEQ ID NO: 904949 - RNA, 19 nt, Artificial Sequence
  Description of Artificial Sequence: Synthetic oligonucleotide
  Antisense strand to SEQ ID NO: 904948
uuagaacccaugagguccc

SEQ ID NO: 904950 - RNA, 19 nt, Artificial Sequence
  Description of Artificial Sequence: Synthetic oligonucleotide
  Sense strand starting at position 2283 of SEQ ID NO: 589011
aaggcaucucgauaauguu

SEQ ID NO: 904951 - RNA, 19 nt, Artificial Sequence
  Description of Artificial Sequence: Synthetic oligonucleotide
  Antisense strand to SEQ ID NO: 904950
aacauuaucgagaugccuu

SEQ ID NO: 904952 - RNA, 19 nt, Artificial Sequence
  Description of Artificial Sequence: Synthetic oligonucleotide
  Sense strand starting at position 2333 of SEQ ID NO: 589011
uguaucuauugaguuaaga

SEQ ID NO: 904953 - RNA, 19 nt, Artificial Sequence
  Description of Artificial Sequence: Synthetic oligonucleotide
  Antisense strand to SEQ ID NO: 904952
ucuuaacucaauagauaca

SEQ ID NO: 904954 - RNA, 19 nt, Artificial Sequence
  Description of Artificial Sequence: Synthetic oligonucleotide
  Sense strand starting at position 2422 of SEQ ID NO: 589011
cauggcugcugugauauuu

SEQ ID NO: 904955 - RNA, 19 nt, Artificial Sequence
  Description of Artificial Sequence: Synthetic oligonucleotide
  Antisense strand to SEQ ID NO: 904954
aaauaucacagcagccaug

SEQ ID NO: 904956 - RNA, 19 nt, Artificial Sequence
  Description of Artificial Sequence: Synthetic oligonucleotide
  Sense strand starting at position 2474 of SEQ ID NO: 589011
uccaaagaacuuggcuuua

SEQ ID NO: 904957 - RNA, 19 nt, Artificial Sequence
  Description of Artificial Sequence: Synthetic oligonucleotide
  Antisense strand to SEQ ID NO: 904956
uaaagccaaguucuuugga

SEQ ID NO: 904958 - RNA, 19 nt, Artificial Sequence
  Description of Artificial Sequence: Synthetic oligonucleotide
  Sense strand starting at position 2530 of SEQ ID NO: 589011
gagucacuguuccugcgaa

SEQ ID NO: 904959 - RNA, 19 nt, Artificial Sequence
  Description of Artificial Sequence: Synthetic oligonucleotide
  Antisense strand to SEQ ID NO: 904958
uucgcaggaacagugacuc

SEQ ID NO: 904960 - RNA, 19 nt, Artificial Sequence
  Description of Artificial Sequence: Synthetic oligonucleotide
  Sense strand starting at position 2627 of SEQ ID NO: 589011
gggugugacaaagagucuu

SEQ ID NO: 904961 - RNA, 19 nt, Artificial Sequence
  Description of Artificial Sequence: Synthetic oligonucleotide
  Antisense strand to SEQ ID NO: 904960
aagacucuuugucacaccc

SEQ ID NO: 904962 - RNA, 19 nt, Artificial Sequence
  Description of Artificial Sequence: Synthetic oligonucleotide
  Sense strand starting at position 2718 of SEQ ID NO: 589011
agcgaagagccuugauaag

SEQ ID NO: 904963 - RNA, 19 nt, Artificial Sequence
  Description of Artificial Sequence: Synthetic oligonucleotide
  Antisense strand to SEQ ID NO: 904962
cuuaucaaggcucuucgcu

SEQ ID NO: 904964 - RNA, 19 nt, Artificial Sequence
  Description of Artificial Sequence: Synthetic oligonucleotide
  Sense strand starting at position 2724 of SEQ ID NO: 589011
gagccuugauaagugaguu

SEQ ID NO: 904965 - RNA, 19 nt, Artificial Sequence
  Description of Artificial Sequence: Synthetic oligonucleotide
  Antisense strand to SEQ ID NO: 904964
aacucacuuaucaaggcuc

SEQ ID NO: 904966 - RNA, 19 nt, Artificial Sequence
  Description of Artificial Sequence: Synthetic oligonucleotide
  Sense strand starting at position 2725 of SEQ ID NO: 589011
agccuugauaagugaguuu

SEQ ID NO: 904967 - RNA, 19 nt, Artificial Sequence
  Description of Artificial Sequence: Synthetic oligonucleotide
  Antisense strand to SEQ ID NO: 904966
aaacucacuuaucaaggcu

SEQ ID NO: 904968 - RNA, 19 nt, Artificial Sequence
  Description of Artificial Sequence: Synthetic oligonucleotide
  Sense strand starting at position 2805 of SEQ ID NO: 589011
ccaggugcugucugauauc

SEQ ID NO: 904969 - RNA, 19 nt, Artificial Sequence
  Description of Artificial Sequence: Synthetic oligonucleotide
  Antisense strand to SEQ ID NO: 904968
gauaucagacagcaccugg

SEQ ID NO: 904970 - RNA, 19 nt, Artificial Sequence
  Description of Artificial Sequence: Synthetic oligonucleotide
  Sense strand starting at position 2814 of SEQ ID NO: 589011
gucugauaucuccagccuc

SEQ ID NO: 904971 - RNA, 19 nt, Artificial Sequence
  Description of Artificial Sequence: Synthetic oligonucleotide
  Antisense strand to SEQ ID NO: 904970
gaggcuggagauaucagac

SEQ ID NO: 904972 - RNA, 19 nt, Artificial Sequence
  Description of Artificial Sequence: Synthetic oligonucleotide
  Sense strand starting at position 2872 of SEQ ID NO: 589011
cgcccacaucccugauguu

SEQ ID NO: 904973 - RNA, 19 nt, Artificial Sequence
  Description of Artificial Sequence: Synthetic oligonucleotide
  Antisense strand to SEQ ID NO: 904972
aacaucagggaugugggcg

SEQ ID NO: 904974 - RNA, 19 nt, Artificial Sequence
  Description of Artificial Sequence: Synthetic oligonucleotide
  Sense strand starting at position 2873 of SEQ ID NO: 589011
gcccacaucccugauguuu

SEQ ID NO: 904975 - RNA, 19 nt, Artificial Sequence
  Description of Artificial Sequence: Synthetic oligonucleotide
  Antisense strand to SEQ ID NO: 904974
aaacaucagggaugugggc

SEQ ID NO: 904976 - RNA, 19 nt, Artificial Sequence
  Description of Artificial Sequence: Synthetic oligonucleotide
  Sense strand starting at position 3082 of SEQ ID NO: 589011
uugacugaucuguacucau

SEQ ID NO: 904977 - RNA, 19 nt, Artificial Sequence
  Description of Artificial Sequence: Synthetic oligonucleotide
  Antisense strand to SEQ ID NO: 904976
augaguacagaucagucaa

SEQ ID NO: 904978 - RNA, 19 nt, Artificial Sequence
  Description of Artificial Sequence: Synthetic oligonucleotide
  Sense strand starting at position 3120 of SEQ ID NO: 589011
aaacuuuacugcgcagaga

SEQ ID NO: 904979 - RNA, 19 nt, Artificial Sequence
  Description of Artificial Sequence: Synthetic oligonucleotide
  Antisense strand to SEQ ID NO: 904978
ucucugcgcaguaaaguuu

SEQ ID NO: 904980 - RNA, 19 nt, Artificial Sequence
  Description of Artificial Sequence: Synthetic oligonucleotide
  Sense strand starting at position 3121 of SEQ ID NO: 589011
aacuuuacugcgcagagau

SEQ ID NO: 904981 - RNA, 19 nt, Artificial Sequence
  Description of Artificial Sequence: Synthetic oligonucleotide
  Antisense strand to SEQ ID NO: 904980
aucucugcgcaguaaaguu

SEQ ID NO: 904982 - RNA, 19 nt, Artificial Sequence
  Description of Artificial Sequence: Synthetic oligonucleotide
  Sense strand starting at position 3123 of SEQ ID NO: 589011
cuuuacugcgcagagauga

SEQ ID NO: 904983 - RNA, 19 nt, Artificial Sequence
  Description of Artificial Sequence: Synthetic oligonucleotide
  Antisense strand to SEQ ID NO: 904982
ucaucucugcgcaguaaag

SEQ ID NO: 904984 - RNA, 19 nt, Artificial Sequence
  Description of Artificial Sequence: Synthetic oligonucleotide
  Sense strand starting at position 3158 of SEQ ID NO: 589011
guucucagagguuagcaau

SEQ ID NO: 904985 - RNA, 19 nt, Artificial Sequence
  Description of Artificial Sequence: Synthetic oligonucleotide
  Antisense strand to SEQ ID NO: 904984
auugcuaaccucugagaac

SEQ ID NO: 904986 - RNA, 19 nt, Artificial Sequence
  Description of Artificial Sequence: Synthetic oligonucleotide
  Sense strand starting at position 3359 of SEQ ID NO: 589011
gguagugauuaagaccaga

SEQ ID NO: 904987 - RNA, 19 nt, Artificial Sequence
  Description of Artificial Sequence: Synthetic oligonucleotide
  Antisense strand to SEQ ID NO: 904986
ucuggucuuaaucacuacc

SEQ ID NO: 904988 - RNA, 19 nt, Artificial Sequence
  Description of Artificial Sequence: Synthetic oligonucleotide
  Sense strand starting at position 3382 of SEQ ID NO: 589011
aggauacaguccuggaaug

SEQ ID NO: 904989 - RNA, 19 nt, Artificial Sequence
  Description of Artificial Sequence: Synthetic oligonucleotide
  Antisense strand to SEQ ID NO: 904988
cauuccaggacuguauccu

SEQ ID NO: 904990 - RNA, 19 nt, Artificial Sequence
  Description of Artificial Sequence: Synthetic oligonucleotide
  Sense strand starting at position 3423 of SEQ ID NO: 589011
agaaguaccgacuguuaga

SEQ ID NO: 904991 - RNA, 19 nt, Artificial Sequence
  Description of Artificial Sequence: Synthetic oligonucleotide
  Antisense strand to SEQ ID NO: 904990
ucuaacagucgguacuucu

SEQ ID NO: 904992 - RNA, 19 nt, Artificial Sequence
  Description of Artificial Sequence: Synthetic oligonucleotide
  Sense strand starting at position 3775 of SEQ ID NO: 589011
gaagacuuccagugugggu

SEQ ID NO: 904993 - RNA, 19 nt, Artificial Sequence
  Description of Artificial Sequence: Synthetic oligonucleotide
  Antisense strand to SEQ ID NO: 904992
acccacacuggaagucuuc

SEQ ID NO: 904994 - RNA, 19 nt, Artificial Sequence
  Description of Artificial Sequence: Synthetic oligonucleotide
  Sense strand starting at position 3855 of SEQ ID NO: 589011
ggaagguguuggguaguuu

SEQ ID NO: 904995 - RNA, 19 nt, Artificial Sequence
  Description of Artificial Sequence: Synthetic oligonucleotide
  Antisense strand to SEQ ID NO: 904994
aaacuacccaacaccuucc

SEQ ID NO: 904996 - RNA, 19 nt, Artificial Sequence
  Description of Artificial Sequence: Synthetic oligonucleotide
  Sense strand starting at position 41 of SEQ ID NO: 589012
aguggugggugucuauaau

SEQ ID NO: 904997 - RNA, 19 nt, Artificial Sequence
  Description of Artificial Sequence: Synthetic oligonucleotide
  Antisense strand to SEQ ID NO: 904996
auuauagacacccaccacu

SEQ ID NO: 904998 - RNA, 19 nt, Artificial Sequence
  Description of Artificial Sequence: Synthetic oligonucleotide
  Sense strand starting at position 228 of SEQ ID NO: 589012
guucuagcagguuaguaaa

SEQ ID NO: 904999 - RNA, 19 nt, Artificial Sequence
  Description of Artificial Sequence: Synthetic oligonucleotide
  Antisense strand to SEQ ID NO: 904998
uuuacuaaccugcuagaac

SEQ ID NO: 905000 - RNA, 19 nt, Artificial Sequence
  Description of Artificial Sequence: Synthetic oligonucleotide
  Sense strand starting at position 266 of SEQ ID NO: 589012
cagcgauggucacucacua

SEQ ID NO: 905001 - RNA, 19 nt, Artificial Sequence
  Description of Artificial Sequence: Synthetic oligonucleotide
  Antisense strand to SEQ ID NO: 905000
uagugagugaccaucgcug

SEQ ID NO: 905002 - RNA, 19 nt, Artificial Sequence
  Description of Artificial Sequence: Synthetic oligonucleotide
  Sense strand starting at position 270 of SEQ ID NO: 589012
gauggucacucacuaaaga

SEQ ID NO: 905003 - RNA, 19 nt, Artificial Sequence
  Description of Artificial Sequence: Synthetic oligonucleotide
  Antisense strand to SEQ ID NO: 905002
ucuuuagugagugaccauc

SEQ ID NO: 905004 - RNA, 19 nt, Artificial Sequence
  Description of Artificial Sequence: Synthetic oligonucleotide
  Sense strand starting at position 296 of SEQ ID NO: 589012
aguuuagcauuucuguaau

SEQ ID NO: 905005 - RNA, 19 nt, Artificial Sequence
  Description of Artificial Sequence: Synthetic oligonucleotide
  Antisense strand to SEQ ID NO: 905004
auuacagaaaugcuaaacu

SEQ ID NO: 905006 - RNA, 19 nt, Artificial Sequence
  Description of Artificial Sequence: Synthetic oligonucleotide
  Sense strand starting at position 415 of SEQ ID NO: 589012
aguuaaugcggacaaugua

SEQ ID NO: 905007 - RNA, 19 nt, Artificial Sequence
  Description of Artificial Sequence: Synthetic oligonucleotide
  Antisense strand to SEQ ID NO: 905006
uacauuguccgcauuaacu

SEQ ID NO: 905008 - RNA, 19 nt, Artificial Sequence
  Description of Artificial Sequence: Synthetic oligonucleotide
  Sense strand starting at position 466 of SEQ ID NO: 589012
uugccauaauacguaaacu

SEQ ID NO: 905009 - RNA, 19 nt, Artificial Sequence
  Description of Artificial Sequence: Synthetic oligonucleotide
  Antisense strand to SEQ ID NO: 905008
aguuuacguauuauggcaa

SEQ ID NO: 905010 - RNA, 19 nt, Artificial Sequence
  Description of Artificial Sequence: Synthetic oligonucleotide
  Sense strand starting at position 784 of SEQ ID NO: 589012
uuuaguuuagguugggaca

SEQ ID NO: 905011 - RNA, 19 nt, Artificial Sequence
  Description of Artificial Sequence: Synthetic oligonucleotide
  Antisense strand to SEQ ID NO: 905010
ugucccaaccuaaacuaaa

SEQ ID NO: 905012 - RNA, 19 nt, Artificial Sequence
  Description of Artificial Sequence: Synthetic oligonucleotide
  Sense strand starting at position 785 of SEQ ID NO: 589012
uuaguuuagguugggacau

SEQ ID NO: 905013 - RNA, 19 nt, Artificial Sequence
  Description of Artificial Sequence: Synthetic oligonucleotide
  Antisense strand to SEQ ID NO: 905012
augucccaaccuaaacuaa

SEQ ID NO: 905014 - RNA, 19 nt, Artificial Sequence
  Description of Artificial Sequence: Synthetic oligonucleotide
  Sense strand starting at position 936 of SEQ ID NO: 589012
agcacuaacgaguaaaguu

SEQ ID NO: 905015 - RNA, 19 nt, Artificial Sequence
  Description of Artificial Sequence: Synthetic oligonucleotide
  Antisense strand to SEQ ID NO: 905014
aacuuuacucguuagugcu

SEQ ID NO: 905016 - RNA, 19 nt, Artificial Sequence
  Description of Artificial Sequence: Synthetic oligonucleotide
  Sense strand starting at position 952 of SEQ ID NO: 589012
guuagaacagaauauacgu

SEQ ID NO: 905017 - RNA, 19 nt, Artificial Sequence
  Description of Artificial Sequence: Synthetic oligonucleotide
  Antisense strand to SEQ ID NO: 905016
acguauauucuguucuaac

SEQ ID NO: 905018 - RNA, 19 nt, Artificial Sequence
  Description of Artificial Sequence: Synthetic oligonucleotide
  Sense strand starting at position 986 of SEQ ID NO: 589012
uaccaaaucugguuucgca

SEQ ID NO: 905019 - RNA, 19 nt, Artificial Sequence
  Description of Artificial Sequence: Synthetic oligonucleotide
  Antisense strand to SEQ ID NO: 905018
ugcgaaaccagauuuggua

SEQ ID NO: 905020 - RNA, 19 nt, Artificial Sequence
  Description of Artificial Sequence: Synthetic oligonucleotide
  Sense strand starting at position 1085 of SEQ ID NO: 589012
gacgcuagucuggaaacaa

SEQ ID NO: 905021 - RNA, 19 nt, Artificial Sequence
  Description of Artificial Sequence: Synthetic oligonucleotide
  Antisense strand to SEQ ID NO: 905020
uuguuuccagacuagcguc

SEQ ID NO: 905022 - RNA, 19 nt, Artificial Sequence
  Description of Artificial Sequence: Synthetic oligonucleotide
  Sense strand starting at position 1121 of SEQ ID NO: 589012
ggucaaagaucacugauau

SEQ ID NO: 905023 - RNA, 19 nt, Artificial Sequence
  Description of Artificial Sequence: Synthetic oligonucleotide
  Antisense strand to SEQ ID NO: 905022
auaucagugaucuuugacc

SEQ ID NO: 905024 - RNA, 19 nt, Artificial Sequence
  Description of Artificial Sequence: Synthetic oligonucleotide
  Sense strand starting at position 1156 of SEQ ID NO: 589012
ccugacguuccacaagaaa

SEQ ID NO: 905025 - RNA, 19 nt, Artificial Sequence
  Description of Artificial Sequence: Synthetic oligonucleotide
  Antisense strand to SEQ ID NO: 905024
uuucuuguggaacgucagg

SEQ ID NO: 905026 - RNA, 19 nt, Artificial Sequence
  Description of Artificial Sequence: Synthetic oligonucleotide
  Sense strand starting at position 1470 of SEQ ID NO: 589012
cccgauagaugucuacuau

SEQ ID NO: 905027 - RNA, 19 nt, Artificial Sequence
  Description of Artificial Sequence: Synthetic oligonucleotide
  Antisense strand to SEQ ID NO: 905026
auaguagacaucuaucggg

SEQ ID NO: 905028 - RNA, 19 nt, Artificial Sequence
  Description of Artificial Sequence: Synthetic oligonucleotide
  Sense strand starting at position 1471 of SEQ ID NO: 589012
ccgauagaugucuacuaug

SEQ ID NO: 905029 - RNA, 19 nt, Artificial Sequence
  Description of Artificial Sequence: Synthetic oligonucleotide
  Antisense strand to SEQ ID NO: 905028
cauaguagacaucuaucgg

SEQ ID NO: 905030 - RNA, 19 nt, Artificial Sequence
  Description of Artificial Sequence: Synthetic oligonucleotide
  Sense strand starting at position 1490 of SEQ ID NO: 589012
ccugucuuccaguagggua

SEQ ID NO: 905031 - RNA, 19 nt, Artificial Sequence
  Description of Artificial Sequence: Synthetic oligonucleotide
  Antisense strand to SEQ ID NO: 905030
uacccuacuggaagacagg

SEQ ID NO: 905032 - RNA, 19 nt, Artificial Sequence
  Description of Artificial Sequence: Synthetic oligonucleotide
  Sense strand starting at position 1504 of SEQ ID NO: 589012
ggguauuagucuccuuaau

SEQ ID NO: 905033 - RNA, 19 nt, Artificial Sequence
  Description of Artificial Sequence: Synthetic oligonucleotide
  Antisense strand to SEQ ID NO: 905032
auuaaggagacuaauaccc

SEQ ID NO: 905034 - RNA, 19 nt, Artificial Sequence
  Description of Artificial Sequence: Synthetic oligonucleotide
  Sense strand starting at position 1506 of SEQ ID NO: 589012
guauuagucuccuuaaucc

SEQ ID NO: 905035 - RNA, 19 nt, Artificial Sequence
  Description of Artificial Sequence: Synthetic oligonucleotide
  Antisense strand to SEQ ID NO: 905034
ggauuaaggagacuaauac

SEQ ID NO: 905036 - RNA, 19 nt, Artificial Sequence
  Description of Artificial Sequence: Synthetic oligonucleotide
  Sense strand starting at position 1985 of SEQ ID NO: 589012
cacucauuugggcgucuga

SEQ ID NO: 905037 - RNA, 19 nt, Artificial Sequence
  Description of Artificial Sequence: Synthetic oligonucleotide
  Antisense strand to SEQ ID NO: 905036
ucagacgcccaaaugagug

SEQ ID NO: 905038 - RNA, 19 nt, Artificial Sequence
  Description of Artificial Sequence: Synthetic oligonucleotide
  Sense strand starting at position 2106 of SEQ ID NO: 589012
uugcaauuggaaugaguaa

SEQ ID NO: 905039 - RNA, 19 nt, Artificial Sequence
  Description of Artificial Sequence: Synthetic oligonucleotide
  Antisense strand to SEQ ID NO: 905038
uuacucauuccaauugcaa

SEQ ID NO: 905040 - RNA, 19 nt, Artificial Sequence
  Description of Artificial Sequence: Synthetic oligonucleotide
  Sense strand starting at position 2161 of SEQ ID NO: 589012
ggucacuaagaguguaaga

SEQ ID NO: 905041 - RNA, 19 nt, Artificial Sequence
  Description of Artificial Sequence: Synthetic oligonucleotide
  Antisense strand to SEQ ID NO: 905040
ucuuacacucuuagugacc

SEQ ID NO: 905042 - RNA, 19 nt, Artificial Sequence
  Description of Artificial Sequence: Synthetic oligonucleotide
  Sense strand starting at position 2170 of SEQ ID NO: 589012
gaguguaagacuuggguuu

SEQ ID NO: 905043 - RNA, 19 nt, Artificial Sequence
  Description of Artificial Sequence: Synthetic oligonucleotide
  Antisense strand to SEQ ID NO: 905042
aaacccaagucuuacacuc

SEQ ID NO: 905044 - RNA, 19 nt, Artificial Sequence
  Description of Artificial Sequence: Synthetic oligonucleotide
  Sense strand starting at position 2248 of SEQ ID NO: 589012
guuagcagcgaguccuauu

SEQ ID NO: 905045 - RNA, 19 nt, Artificial Sequence
  Description of Artificial Sequence: Synthetic oligonucleotide
  Antisense strand to SEQ ID NO: 905044
aauaggacucgcugcuaac

SEQ ID NO: 905046 - RNA, 19 nt, Artificial Sequence
  Description of Artificial Sequence: Synthetic oligonucleotide
  Sense strand starting at position 2255 of SEQ ID NO: 589012
gcgaguccuauuugggaau

SEQ ID NO: 905047 - RNA, 19 nt, Artificial Sequence
  Description of Artificial Sequence: Synthetic oligonucleotide
  Antisense strand to SEQ ID NO: 905046
auucccaaauaggacucgc

SEQ ID NO: 905048 - RNA, 19 nt, Artificial Sequence
  Description of Artificial Sequence: Synthetic oligonucleotide
  Sense strand starting at position 2257 of SEQ ID NO: 589012
gaguccuauuugggaauua

SEQ ID NO: 905049 - RNA, 19 nt, Artificial Sequence
  Description of Artificial Sequence: Synthetic oligonucleotide
  Antisense strand to SEQ ID NO: 905048
uaauucccaaauaggacuc

SEQ ID NO: 905050 - RNA, 19 nt, Artificial Sequence
  Description of Artificial Sequence: Synthetic oligonucleotide
  Sense strand starting at position 2258 of SEQ ID NO: 589012
aguccuauuugggaauuaa

SEQ ID NO: 905051 - RNA, 19 nt, Artificial Sequence
  Description of Artificial Sequence: Synthetic oligonucleotide
  Antisense strand to SEQ ID NO: 905050
uuaauucccaaauaggacu

SEQ ID NO: 905052 - RNA, 19 nt, Artificial Sequence
  Description of Artificial Sequence: Synthetic oligonucleotide
  Sense strand starting at position 2362 of SEQ ID NO: 589012
guugaaaggugacuucuag

SEQ ID NO: 905053 - RNA, 19 nt, Artificial Sequence
  Description of Artificial Sequence: Synthetic oligonucleotide
  Antisense strand to SEQ ID NO: 905052
cuagaagucaccuuucaac

SEQ ID NO: 905054 - RNA, 19 nt, Artificial Sequence
  Description of Artificial Sequence: Synthetic oligonucleotide
  Sense strand starting at position 2508 of SEQ ID NO: 589012
gaacgcgacucuguaucaa

SEQ ID NO: 905055 - RNA, 19 nt, Artificial Sequence
  Description of Artificial Sequence: Synthetic oligonucleotide
  Antisense strand to SEQ ID NO: 905054
uugauacagagucgcguuc

SEQ ID NO: 905056 - RNA, 19 nt, Artificial Sequence
  Description of Artificial Sequence: Synthetic oligonucleotide
  Sense strand starting at position 2540 of SEQ ID NO: 589012
aaaggugaccucuaagucu

SEQ ID NO: 905057 - RNA, 19 nt, Artificial Sequence
  Description of Artificial Sequence: Synthetic oligonucleotide
  Antisense strand to SEQ ID NO: 905056
agacuuagaggucaccuuu

SEQ ID NO: 905058 - RNA, 19 nt, Artificial Sequence
  Description of Artificial Sequence: Synthetic oligonucleotide
  Sense strand starting at position 2568 of SEQ ID NO: 589012
ucugacauucuauggguuu

SEQ ID NO: 905059 - RNA, 19 nt, Artificial Sequence
  Description of Artificial Sequence: Synthetic oligonucleotide
  Antisense strand to SEQ ID NO: 905058
aaacccauagaaugucaga

SEQ ID NO: 905060 - RNA, 19 nt, Artificial Sequence
  Description of Artificial Sequence: Synthetic oligonucleotide
  Sense strand starting at position 2571 of SEQ ID NO: 589012
gacauucuauggguuuaaa

SEQ ID NO: 905061 - RNA, 19 nt, Artificial Sequence
  Description of Artificial Sequence: Synthetic oligonucleotide
  Antisense strand to SEQ ID NO: 905060
uuuaaacccauagaauguc

SEQ ID NO: 905062 - RNA, 19 nt, Artificial Sequence
  Description of Artificial Sequence: Synthetic oligonucleotide
  Sense strand starting at position 2581 of SEQ ID NO: 589012
ggguuuaaaccagguaauc

SEQ ID NO: 905063 - RNA, 19 nt, Artificial Sequence
  Description of Artificial Sequence: Synthetic oligonucleotide
  Antisense strand to SEQ ID NO: 905062
gauuaccugguuuaaaccc

SEQ ID NO: 905064 - RNA, 19 nt, Artificial Sequence
  Description of Artificial Sequence: Synthetic oligonucleotide
  Sense strand starting at position 2897 of SEQ ID NO: 589012
gguaaacuucugggcucaa

SEQ ID NO: 905065 - RNA, 19 nt, Artificial Sequence
  Description of Artificial Sequence: Synthetic oligonucleotide
  Antisense strand to SEQ ID NO: 905064
uugagcccagaaguuuacc

SEQ ID NO: 905066 - RNA, 19 nt, Artificial Sequence
  Description of Artificial Sequence: Synthetic oligonucleotide
  Sense strand starting at position 2965 of SEQ ID NO: 589012
gccuucugugucuuucuau

SEQ ID NO: 905067 - RNA, 19 nt, Artificial Sequence
  Description of Artificial Sequence: Synthetic oligonucleotide
  Antisense strand to SEQ ID NO: 905066
auagaaagacacagaaggc

SEQ ID NO: 905068 - RNA, 19 nt, Artificial Sequence
  Description of Artificial Sequence: Synthetic oligonucleotide
  Sense strand starting at position 2976 of SEQ ID NO: 589012
cuuucuaugucugcuggaa

SEQ ID NO: 905069 - RNA, 19 nt, Artificial Sequence
  Description of Artificial Sequence: Synthetic oligonucleotide
  Antisense strand to SEQ ID NO: 905068
uuccagcagacauagaaag

SEQ ID NO: 905070 - RNA, 19 nt, Artificial Sequence
  Description of Artificial Sequence: Synthetic oligonucleotide
  Sense strand starting at position 2980 of SEQ ID NO: 589012
cuaugucugcuggaauuag

SEQ ID NO: 905071 - RNA, 19 nt, Artificial Sequence
  Description of Artificial Sequence: Synthetic oligonucleotide
  Antisense strand to SEQ ID NO: 905070
cuaauuccagcagacauag

SEQ ID NO: 905072 - RNA, 19 nt, Artificial Sequence
  Description of Artificial Sequence: Synthetic oligonucleotide
  Sense strand starting at position 3260 of SEQ ID NO: 589012
gcugguguacuccaaacau

SEQ ID NO: 905073 - RNA, 19 nt, Artificial Sequence
  Description of Artificial Sequence: Synthetic oligonucleotide
  Antisense strand to SEQ ID NO: 905072
auguuuggaguacaccagc

SEQ ID NO: 905074 - RNA, 19 nt, Artificial Sequence
  Description of Artificial Sequence: Synthetic oligonucleotide
  Sense strand starting at position 3381 of SEQ ID NO: 589012
gucagaucucuugagcuca

SEQ ID NO: 905075 - RNA, 19 nt, Artificial Sequence
  Description of Artificial Sequence: Synthetic oligonucleotide
  Antisense strand to SEQ ID NO: 905074
ugagcucaagagaucugac

SEQ ID NO: 905076 - RNA, 19 nt, Artificial Sequence
  Description of Artificial Sequence: Synthetic oligonucleotide
  Sense strand starting at position 14 of SEQ ID NO: 589013
aaggcaacuccaugugacu

SEQ ID NO: 905077 - RNA, 19 nt, Artificial Sequence
  Description of Artificial Sequence: Synthetic oligonucleotide
  Antisense strand to SEQ ID NO: 905076
agucacauggaguugccuu

SEQ ID NO: 905078 - RNA, 19 nt, Artificial Sequence
  Description of Artificial Sequence: Synthetic oligonucleotide
  Sense strand starting at position 243 of SEQ ID NO: 589013
ggaaaucagcgcuguggga

SEQ ID NO: 905079 - RNA, 19 nt, Artificial Sequence
  Description of Artificial Sequence: Synthetic oligonucleotide
  Antisense strand to SEQ ID NO: 905078
ucccacagcgcugauuucc

SEQ ID NO: 905080 - RNA, 19 nt, Artificial Sequence
  Description of Artificial Sequence: Synthetic oligonucleotide
  Sense strand starting at position 245 of SEQ ID NO: 589013
aaaucagcgcugugggaaa

SEQ ID NO: 905081 - RNA, 19 nt, Artificial Sequence
  Description of Artificial Sequence: Synthetic oligonucleotide
  Antisense strand to SEQ ID NO: 905080
uuucccacagcgcugauuu

SEQ ID NO: 905082 - RNA, 19 nt, Artificial Sequence
  Description of Artificial Sequence: Synthetic oligonucleotide
  Sense strand starting at position 423 of SEQ ID NO: 589013
gaguguauugaaggaaacu

SEQ ID NO: 905083 - RNA, 19 nt, Artificial Sequence
  Description of Artificial Sequence: Synthetic oligonucleotide
  Antisense strand to SEQ ID NO: 905082
aguuuccuucaauacacuc

SEQ ID NO: 905084 - RNA, 19 nt, Artificial Sequence
  Description of Artificial Sequence: Synthetic oligonucleotide
  Sense strand starting at position 510 of SEQ ID NO: 589013
gggagagcuuagguaucau

SEQ ID NO: 905085 - RNA, 19 nt, Artificial Sequence
  Description of Artificial Sequence: Synthetic oligonucleotide
  Antisense strand to SEQ ID NO: 905084
augauaccuaagcucuccc

SEQ ID NO: 905086 - RNA, 19 nt, Artificial Sequence
  Description of Artificial Sequence: Synthetic oligonucleotide
  Sense strand starting at position 600 of SEQ ID NO: 589013
ugcaauaacuagucgcaua

SEQ ID NO: 905087 - RNA, 19 nt, Artificial Sequence
  Description of Artificial Sequence: Synthetic oligonucleotide
  Antisense strand to SEQ ID NO: 905086
uaugcgacuaguuauugca

SEQ ID NO: 905088 - RNA, 19 nt, Artificial Sequence
  Description of Artificial Sequence: Synthetic oligonucleotide
  Sense strand starting at position 704 of SEQ ID NO: 589013
agauaaucuuuggauaccu

SEQ ID NO: 905089 - RNA, 19 nt, Artificial Sequence
  Description of Artificial Sequence: Synthetic oligonucleotide
  Antisense strand to SEQ ID NO: 905088
agguauccaaagauuaucu

SEQ ID NO: 905090 - RNA, 19 nt, Artificial Sequence
  Description of Artificial Sequence: Synthetic oligonucleotide
  Sense strand starting at position 800 of SEQ ID NO: 589013
gugaaagaaucgcuuaaac

SEQ ID NO: 905091 - RNA, 19 nt, Artificial Sequence
  Description of Artificial Sequence: Synthetic oligonucleotide
  Antisense strand to SEQ ID NO: 905090
guuuaagcgauucuuucac

SEQ ID NO: 905092 - RNA, 19 nt, Artificial Sequence
  Description of Artificial Sequence: Synthetic oligonucleotide
  Sense strand starting at position 959 of SEQ ID NO: 589013
cuuccuugaaugugaggua

SEQ ID NO: 905093 - RNA, 19 nt, Artificial Sequence
  Description of Artificial Sequence: Synthetic oligonucleotide
  Antisense strand to SEQ ID NO: 905092
uaccucacauucaaggaag

SEQ ID NO: 905094 - RNA, 19 nt, Artificial Sequence
  Description of Artificial Sequence: Synthetic oligonucleotide
  Sense strand starting at position 986 of SEQ ID NO: 589013
auccaauagaagugguagu

SEQ ID NO: 905095 - RNA, 19 nt, Artificial Sequence
  Description of Artificial Sequence: Synthetic oligonucleotide
  Antisense strand to SEQ ID NO: 905094
acuaccacuucuauuggau

SEQ ID NO: 905096 - RNA, 19 nt, Artificial Sequence
  Description of Artificial Sequence: Synthetic oligonucleotide
  Sense strand starting at position 987 of SEQ ID NO: 589013
uccaauagaagugguagua

SEQ ID NO: 905097 - RNA, 19 nt, Artificial Sequence
  Description of Artificial Sequence: Synthetic oligonucleotide
  Antisense strand to SEQ ID NO: 905096
uacuaccacuucuauugga

SEQ ID NO: 905098 - RNA, 19 nt, Artificial Sequence
  Description of Artificial Sequence: Synthetic oligonucleotide
  Sense strand starting at position 999 of SEQ ID NO: 589013
gguaguaaaugacuggauu

SEQ ID NO: 905099 - RNA, 19 nt, Artificial Sequence
  Description of Artificial Sequence: Synthetic oligonucleotide
  Antisense strand to SEQ ID NO: 905098
aauccagucauuuacuacc

SEQ ID NO: 905100 - RNA, 19 nt, Artificial Sequence
  Description of Artificial Sequence: Synthetic oligonucleotide
  Sense strand starting at position 1000 of SEQ ID NO: 589013
guaguaaaugacuggauua

SEQ ID NO: 905101 - RNA, 19 nt, Artificial Sequence
  Description of Artificial Sequence: Synthetic oligonucleotide
  Antisense strand to SEQ ID NO: 905100
uaauccagucauuuacuac

SEQ ID NO: 905102 - RNA, 19 nt, Artificial Sequence
  Description of Artificial Sequence: Synthetic oligonucleotide
  Sense strand starting at position 1007 of SEQ ID NO: 589013
augacuggauuacaucaaa

SEQ ID NO: 905103 - RNA, 19 nt, Artificial Sequence
  Description of Artificial Sequence: Synthetic oligonucleotide
  Antisense strand to SEQ ID NO: 905102
uuugauguaauccagucau

SEQ ID NO: 905104 - RNA, 19 nt, Artificial Sequence
  Description of Artificial Sequence: Synthetic oligonucleotide
  Sense strand starting at position 1098 of SEQ ID NO: 589013
uugagaugcgugggcaacu

SEQ ID NO: 905105 - RNA, 19 nt, Artificial Sequence
  Description of Artificial Sequence: Synthetic oligonucleotide
  Antisense strand to SEQ ID NO: 905104
aguugcccacgcaucucaa

SEQ ID NO: 905106 - RNA, 19 nt, Artificial Sequence
  Description of Artificial Sequence: Synthetic oligonucleotide
  Sense strand starting at position 1110 of SEQ ID NO: 589013
ggcaacuaauuagacuaaa

SEQ ID NO: 905107 - RNA, 19 nt, Artificial Sequence
  Description of Artificial Sequence: Synthetic oligonucleotide
  Antisense strand to SEQ ID NO: 905106
uuuagucuaauuaguugcc

SEQ ID NO: 905108 - RNA, 19 nt, Artificial Sequence
  Description of Artificial Sequence: Synthetic oligonucleotide
  Sense strand starting at position 1157 of SEQ ID NO: 589013
gugggaaagugauucagag

SEQ ID NO: 905109 - RNA, 19 nt, Artificial Sequence
  Description of Artificial Sequence: Synthetic oligonucleotide
  Antisense strand to SEQ ID NO: 905108
cucugaaucacuuucccac

SEQ ID NO: 905110 - RNA, 19 nt, Artificial Sequence
  Description of Artificial Sequence: Synthetic oligonucleotide
  Sense strand starting at position 1176 of SEQ ID NO: 589013
gcaaacaacugaguuguaa

SEQ ID NO: 905111 - RNA, 19 nt, Artificial Sequence
  Description of Artificial Sequence: Synthetic oligonucleotide
  Antisense strand to SEQ ID NO: 905110
uuacaacucaguuguuugc

SEQ ID NO: 905112 - RNA, 19 nt, Artificial Sequence
  Description of Artificial Sequence: Synthetic oligonucleotide
  Sense strand starting at position 1188 of SEQ ID NO: 589013
guuguaaugcaccaaugaa

SEQ ID NO: 905113 - RNA, 19 nt, Artificial Sequence
  Description of Artificial Sequence: Synthetic oligonucleotide
  Antisense strand to SEQ ID NO: 905112
uucauuggugcauuacaac

SEQ ID NO: 905114 - RNA, 19 nt, Artificial Sequence
  Description of Artificial Sequence: Synthetic oligonucleotide
  Sense strand starting at position 1220 of SEQ ID NO: 589013
gaguauguauuauuaacag

SEQ ID NO: 905115 - RNA, 19 nt, Artificial Sequence
  Description of Artificial Sequence: Synthetic oligonucleotide
  Antisense strand to SEQ ID NO: 905114
cuguuaauaauacauacuc

SEQ ID NO: 905116 - RNA, 19 nt, Artificial Sequence
  Description of Artificial Sequence: Synthetic oligonucleotide
  Sense strand starting at position 1224 of SEQ ID NO: 589013
auguauuauuaacagagag

SEQ ID NO: 905117 - RNA, 19 nt, Artificial Sequence
  Description of Artificial Sequence: Synthetic oligonucleotide
  Antisense strand to SEQ ID NO: 905116
cucucuguuaauaauacau

SEQ ID NO: 905118 - RNA, 19 nt, Artificial Sequence
  Description of Artificial Sequence: Synthetic oligonucleotide
  Sense strand starting at position 1238 of SEQ ID NO: 589013
gagagagcuuugccguuua

SEQ ID NO: 905119 - RNA, 19 nt, Artificial Sequence
  Description of Artificial Sequence: Synthetic oligonucleotide
  Antisense strand to SEQ ID NO: 905118
uaaacggcaaagcucucuc

SEQ ID NO: 905120 - RNA, 19 nt, Artificial Sequence
  Description of Artificial Sequence: Synthetic oligonucleotide
  Sense strand starting at position 1377 of SEQ ID NO: 589013
guagaacugaacugugacu

SEQ ID NO: 905121 - RNA, 19 nt, Artificial Sequence
  Description of Artificial Sequence: Synthetic oligonucleotide
  Antisense strand to SEQ ID NO: 905120
agucacaguucaguucuac

SEQ ID NO: 905122 - RNA, 19 nt, Artificial Sequence
  Description of Artificial Sequence: Synthetic oligonucleotide
  Sense strand starting at position 1920 of SEQ ID NO: 589013
gcucguuaccugccaaugu

SEQ ID NO: 905123 - RNA, 19 nt, Artificial Sequence
  Description of Artificial Sequence: Synthetic oligonucleotide
  Antisense strand to SEQ ID NO: 905122
acauuggcagguaacgagc

SEQ ID NO: 905124 - RNA, 19 nt, Artificial Sequence
  Description of Artificial Sequence: Synthetic oligonucleotide
  Sense strand starting at position 2148 of SEQ ID NO: 589013
gagacuugauaauauguau

SEQ ID NO: 905125 - RNA, 19 nt, Artificial Sequence
  Description of Artificial Sequence: Synthetic oligonucleotide
  Antisense strand to SEQ ID NO: 905124
auacauauuaucaagucuc

SEQ ID NO: 905126 - RNA, 19 nt, Artificial Sequence
  Description of Artificial Sequence: Synthetic oligonucleotide
  Sense strand starting at position 2160 of SEQ ID NO: 589013
uauguauuguacucggagu

SEQ ID NO: 905127 - RNA, 19 nt, Artificial Sequence
  Description of Artificial Sequence: Synthetic oligonucleotide
  Antisense strand to SEQ ID NO: 905126
acuccgaguacaauacaua

SEQ ID NO: 905128 - RNA, 19 nt, Artificial Sequence
  Description of Artificial Sequence: Synthetic oligonucleotide
  Sense strand starting at position 2162 of SEQ ID NO: 589013
uguauuguacucggaguca

SEQ ID NO: 905129 - RNA, 19 nt, Artificial Sequence
  Description of Artificial Sequence: Synthetic oligonucleotide
  Antisense strand to SEQ ID NO: 905128
ugacuccgaguacaauaca

SEQ ID NO: 905130 - RNA, 19 nt, Artificial Sequence
  Description of Artificial Sequence: Synthetic oligonucleotide
  Sense strand starting at position 2173 of SEQ ID NO: 589013
cggagucaucaggagagua

SEQ ID NO: 905131 - RNA, 19 nt, Artificial Sequence
  Description of Artificial Sequence: Synthetic oligonucleotide
  Antisense strand to SEQ ID NO: 905130
uacucuccugaugacuccg

SEQ ID NO: 905132 - RNA, 19 nt, Artificial Sequence
  Description of Artificial Sequence: Synthetic oligonucleotide
  Sense strand starting at position 2238 of SEQ ID NO: 589013
ccgugaugaccucacaaag

SEQ ID NO: 905133 - RNA, 19 nt, Artificial Sequence
  Description of Artificial Sequence: Synthetic oligonucleotide
  Antisense strand to SEQ ID NO: 905132
cuuugugaggucaucacgg

SEQ ID NO: 905134 - RNA, 19 nt, Artificial Sequence
  Description of Artificial Sequence: Synthetic oligonucleotide
  Sense strand starting at position 2472 of SEQ ID NO: 589013
ggacuaagcuggcuugaag

SEQ ID NO: 905135 - RNA, 19 nt, Artificial Sequence
  Description of Artificial Sequence: Synthetic oligonucleotide
  Antisense strand to SEQ ID NO: 905134
cuucaagccagcuuagucc

SEQ ID NO: 905136 - RNA, 19 nt, Artificial Sequence
  Description of Artificial Sequence: Synthetic oligonucleotide
  Sense strand starting at position 2479 of SEQ ID NO: 589013
gcuggcuugaaggacuaau

SEQ ID NO: 905137 - RNA, 19 nt, Artificial Sequence
  Description of Artificial Sequence: Synthetic oligonucleotide
  Antisense strand to SEQ ID NO: 905136
auuaguccuucaagccagc

SEQ ID NO: 905138 - RNA, 19 nt, Artificial Sequence
  Description of Artificial Sequence: Synthetic oligonucleotide
  Sense strand starting at position 2765 of SEQ ID NO: 589013
agccguuuauuucuguuau

SEQ ID NO: 905139 - RNA, 19 nt, Artificial Sequence
  Description of Artificial Sequence: Synthetic oligonucleotide
  Antisense strand to SEQ ID NO: 905138
auaacagaaauaaacggcu

SEQ ID NO: 905140 - RNA, 19 nt, Artificial Sequence
  Description of Artificial Sequence: Synthetic oligonucleotide
  Sense strand starting at position 2767 of SEQ ID NO: 589013
ccguuuauuucuguuauau

SEQ ID NO: 905141 - RNA, 19 nt, Artificial Sequence
  Description of Artificial Sequence: Synthetic oligonucleotide
  Antisense strand to SEQ ID NO: 905140
auauaacagaaauaaacgg

SEQ ID NO: 905142 - RNA, 19 nt, Artificial Sequence
  Description of Artificial Sequence: Synthetic oligonucleotide
  Sense strand starting at position 2796 of SEQ ID NO: 589013
acuccuugaguccaggauu

SEQ ID NO: 905143 - RNA, 19 nt, Artificial Sequence
  Description of Artificial Sequence: Synthetic oligonucleotide
  Antisense strand to SEQ ID NO: 905142
aauccuggacucaaggagu

SEQ ID NO: 905144 - RNA, 19 nt, Artificial Sequence
  Description of Artificial Sequence: Synthetic oligonucleotide
  Sense strand starting at position 2844 of SEQ ID NO: 589013
cuuagaguuguuuguugac

SEQ ID NO: 905145 - RNA, 19 nt, Artificial Sequence
  Description of Artificial Sequence: Synthetic oligonucleotide
  Antisense strand to SEQ ID NO: 905144
gucaacaaacaacucuaag

SEQ ID NO: 905146 - RNA, 19 nt, Artificial Sequence
  Description of Artificial Sequence: Synthetic oligonucleotide
  Sense strand starting at position 2850 of SEQ ID NO: 589013
guuguuuguugaccgaaga

SEQ ID NO: 905147 - RNA, 19 nt, Artificial Sequence
  Description of Artificial Sequence: Synthetic oligonucleotide
  Antisense strand to SEQ ID NO: 905146
ucuucggucaacaaacaac

SEQ ID NO: 905148 - RNA, 19 nt, Artificial Sequence
  Description of Artificial Sequence: Synthetic oligonucleotide
  Sense strand starting at position 2925 of SEQ ID NO: 589013
uguugucaacuccaagaau

SEQ ID NO: 905149 - RNA, 19 nt, Artificial Sequence
  Description of Artificial Sequence: Synthetic oligonucleotide
  Antisense strand to SEQ ID NO: 905148
auucuuggaguugacaaca

SEQ ID NO: 905150 - RNA, 19 nt, Artificial Sequence
  Description of Artificial Sequence: Synthetic oligonucleotide
  Sense strand starting at position 3315 of SEQ ID NO: 589013
cggcaugccuuaucucaau

SEQ ID NO: 905151 - RNA, 19 nt, Artificial Sequence
  Description of Artificial Sequence: Synthetic oligonucleotide
  Antisense strand to SEQ ID NO: 905150
auugagauaaggcaugccg

SEQ ID NO: 905152 - RNA, 19 nt, Artificial Sequence
  Description of Artificial Sequence: Synthetic oligonucleotide
  Sense strand starting at position 3332 of SEQ ID NO: 589013
auuggagcuuuccucugua

SEQ ID NO: 905153 - RNA, 19 nt, Artificial Sequence
  Description of Artificial Sequence: Synthetic oligonucleotide
  Antisense strand to SEQ ID NO: 905152
uacagaggaaagcuccaau

SEQ ID NO: 905154 - RNA, 19 nt, Artificial Sequence
  Description of Artificial Sequence: Synthetic oligonucleotide
  Sense strand starting at position 3335 of SEQ ID NO: 589013
ggagcuuuccucuguaaua

SEQ ID NO: 905155 - RNA, 19 nt, Artificial Sequence
  Description of Artificial Sequence: Synthetic oligonucleotide
  Antisense strand to SEQ ID NO: 905154
uauuacagaggaaagcucc

SEQ ID NO: 905156 - RNA, 19 nt, Artificial Sequence
  Description of Artificial Sequence: Synthetic oligonucleotide
  Sense strand starting at position 332 of SEQ ID NO: 589014
gggucagugagcuagauuc

SEQ ID NO: 905157 - RNA, 19 nt, Artificial Sequence
  Description of Artificial Sequence: Synthetic oligonucleotide
  Antisense strand to SEQ ID NO: 905156
gaaucuagcucacugaccc

SEQ ID NO: 905158 - RNA, 19 nt, Artificial Sequence
  Description of Artificial Sequence: Synthetic oligonucleotide
  Sense strand starting at position 441 of SEQ ID NO: 589014
gggaaugacucgccaugag

SEQ ID NO: 905159 - RNA, 19 nt, Artificial Sequence
  Description of Artificial Sequence: Synthetic oligonucleotide
  Antisense strand to SEQ ID NO: 905158
cucauggcgagucauuccc

SEQ ID NO: 905160 - RNA, 19 nt, Artificial Sequence
  Description of Artificial Sequence: Synthetic oligonucleotide
  Sense strand starting at position 546 of SEQ ID NO: 589014
cacggucauccuugacaau

SEQ ID NO: 905161 - RNA, 19 nt, Artificial Sequence
  Description of Artificial Sequence: Synthetic oligonucleotide
  Antisense strand to SEQ ID NO: 905160
auugucaaggaugaccgug

SEQ ID NO: 905162 - RNA, 19 nt, Artificial Sequence
  Description of Artificial Sequence: Synthetic oligonucleotide
  Sense strand starting at position 547 of SEQ ID NO: 589014
acggucauccuugacaauc

SEQ ID NO: 905163 - RNA, 19 nt, Artificial Sequence
  Description of Artificial Sequence: Synthetic oligonucleotide
  Antisense strand to SEQ ID NO: 905162
gauugucaaggaugaccgu

SEQ ID NO: 905164 - RNA, 19 nt, Artificial Sequence
  Description of Artificial Sequence: Synthetic oligonucleotide
  Sense strand starting at position 586 of SEQ ID NO: 589014
ggaucaaaguuccuaugcu

SEQ ID NO: 905165 - RNA, 19 nt, Artificial Sequence
  Description of Artificial Sequence: Synthetic oligonucleotide
  Antisense strand to SEQ ID NO: 905164
agcauaggaacuuugaucc

SEQ ID NO: 905166 - RNA, 19 nt, Artificial Sequence
  Description of Artificial Sequence: Synthetic oligonucleotide
  Sense strand starting at position 645 of SEQ ID NO: 589014
cuagcuaaagagugaugga

SEQ ID NO: 905167 - RNA, 19 nt, Artificial Sequence
  Description of Artificial Sequence: Synthetic oligonucleotide
  Antisense strand to SEQ ID NO: 905166
uccaucacucuuuagcuag

SEQ ID NO: 905168 - RNA, 19 nt, Artificial Sequence
  Description of Artificial Sequence: Synthetic oligonucleotide
  Sense strand starting at position 756 of SEQ ID NO: 589014
ucagacaccugcucagaaa

SEQ ID NO: 905169 - RNA, 19 nt, Artificial Sequence
  Description of Artificial Sequence: Synthetic oligonucleotide
  Antisense strand to SEQ ID NO: 905168
uuucugagcaggugucuga

SEQ ID NO: 905170 - RNA, 19 nt, Artificial Sequence
  Description of Artificial Sequence: Synthetic oligonucleotide
  Sense strand starting at position 1254 of SEQ ID NO: 589014
ugucuuuggagcuggaaca

SEQ ID NO: 905171 - RNA, 19 nt, Artificial Sequence
  Description of Artificial Sequence: Synthetic oligonucleotide
  Antisense strand to SEQ ID NO: 905170
uguuccagcuccaaagaca

SEQ ID NO: 905172 - RNA, 19 nt, Artificial Sequence
  Description of Artificial Sequence: Synthetic oligonucleotide
  Sense strand starting at position 1272 of SEQ ID NO: 589014
agaugaaguagcuguaaga

SEQ ID NO: 905173 - RNA, 19 nt, Artificial Sequence
  Description of Artificial Sequence: Synthetic oligonucleotide
  Antisense strand to SEQ ID NO: 905172
ucuuacagcuacuucaucu

SEQ ID NO: 905174 - RNA, 19 nt, Artificial Sequence
  Description of Artificial Sequence: Synthetic oligonucleotide
  Sense strand starting at position 1288 of SEQ ID NO: 589014
agaagcagaucuguuuauu

SEQ ID NO: 905175 - RNA, 19 nt, Artificial Sequence
  Description of Artificial Sequence: Synthetic oligonucleotide
  Antisense strand to SEQ ID NO: 905174
aauaaacagaucugcuucu

SEQ ID NO: 905176 - RNA, 19 nt, Artificial Sequence
  Description of Artificial Sequence: Synthetic oligonucleotide
  Sense strand starting at position 1353 of SEQ ID NO: 589014
acaugucagccucaguuga

SEQ ID NO: 905177 - RNA, 19 nt, Artificial Sequence
  Description of Artificial Sequence: Synthetic oligonucleotide
  Antisense strand to SEQ ID NO: 905176
ucaacugaggcugacaugu

SEQ ID NO: 905178 - RNA, 19 nt, Artificial Sequence
  Description of Artificial Sequence: Synthetic oligonucleotide
  Sense strand starting at position 1366 of SEQ ID NO: 589014
aguugagacguccauaaag

SEQ ID NO: 905179 - RNA, 19 nt, Artificial Sequence
  Description of Artificial Sequence: Synthetic oligonucleotide
  Antisense strand to SEQ ID NO: 905178
cuuuauggacgucucaacu

SEQ ID NO: 905180 - RNA, 19 nt, Artificial Sequence
  Description of Artificial Sequence: Synthetic oligonucleotide
  Sense strand starting at position 1368 of SEQ ID NO: 589014
uugagacguccauaaaguu

SEQ ID NO: 905181 - RNA, 19 nt, Artificial Sequence
  Description of Artificial Sequence: Synthetic oligonucleotide
  Antisense strand to SEQ ID NO: 905180
aacuuuauggacgucucaa

SEQ ID NO: 905182 - RNA, 19 nt, Artificial Sequence
  Description of Artificial Sequence: Synthetic oligonucleotide
  Sense strand starting at position 1406 of SEQ ID NO: 589014
caagcauaucgccagauag

SEQ ID NO: 905183 - RNA, 19 nt, Artificial Sequence
  Description of Artificial Sequence: Synthetic oligonucleotide
  Antisense strand to SEQ ID NO: 905182
cuaucuggcgauaugcuug

SEQ ID NO: 905184 - RNA, 19 nt, Artificial Sequence
  Description of Artificial Sequence: Synthetic oligonucleotide
  Sense strand starting at position 1467 of SEQ ID NO: 589014
uggucagcuguucaagaug

SEQ ID NO: 905185 - RNA, 19 nt, Artificial Sequence
  Description of Artificial Sequence: Synthetic oligonucleotide
  Antisense strand to SEQ ID NO: 905184
caucuugaacagcugacca

SEQ ID NO: 905186 - RNA, 19 nt, Artificial Sequence
  Description of Artificial Sequence: Synthetic oligonucleotide
  Sense strand starting at position 1600 of SEQ ID NO: 589014
ugagccuaauauguagaau

SEQ ID NO: 905187 - RNA, 19 nt, Artificial Sequence
  Description of Artificial Sequence: Synthetic oligonucleotide
  Antisense strand to SEQ ID NO: 905186
auucuacauauuaggcuca

SEQ ID NO: 905188 - RNA, 19 nt, Artificial Sequence
  Description of Artificial Sequence: Synthetic oligonucleotide
  Sense strand starting at position 1603 of SEQ ID NO: 589014
gccuaauauguagaauuau

SEQ ID NO: 905189 - RNA, 19 nt, Artificial Sequence
  Description of Artificial Sequence: Synthetic oligonucleotide
  Antisense strand to SEQ ID NO: 905188
auaauucuacauauuaggc

SEQ ID NO: 905190 - RNA, 19 nt, Artificial Sequence
  Description of Artificial Sequence: Synthetic oligonucleotide
  Sense strand starting at position 1614 of SEQ ID NO: 589014
agaauuauaacgugaggca

SEQ ID NO: 905191 - RNA, 19 nt, Artificial Sequence
  Description of Artificial Sequence: Synthetic oligonucleotide
  Antisense strand to SEQ ID NO: 905190
ugccucacguuauaauucu

SEQ ID NO: 905192 - RNA, 19 nt, Artificial Sequence
  Description of Artificial Sequence: Synthetic oligonucleotide
  Sense strand starting at position 1615 of SEQ ID NO: 589014
gaauuauaacgugaggcaa

SEQ ID NO: 905193 - RNA, 19 nt, Artificial Sequence
  Description of Artificial Sequence: Synthetic oligonucleotide
  Antisense strand to SEQ ID NO: 905192
uugccucacguuauaauuc

SEQ ID NO: 905194 - RNA, 19 nt, Artificial Sequence
  Description of Artificial Sequence: Synthetic oligonucleotide
  Sense strand starting at position 1706 of SEQ ID NO: 589014
ucaggcugacucuaccaau

SEQ ID NO: 905195 - RNA, 19 nt, Artificial Sequence
  Description of Artificial Sequence: Synthetic oligonucleotide
  Antisense strand to SEQ ID NO: 905194
auugguagagucagccuga

SEQ ID NO: 905196 - RNA, 19 nt, Artificial Sequence
  Description of Artificial Sequence: Synthetic oligonucleotide
  Sense strand starting at position 1832 of SEQ ID NO: 589014
gugagcauuuccuugguau

SEQ ID NO: 905197 - RNA, 19 nt, Artificial Sequence
  Description of Artificial Sequence: Synthetic oligonucleotide
  Antisense strand to SEQ ID NO: 905196
auaccaaggaaaugcucac

SEQ ID NO: 905198 - RNA, 19 nt, Artificial Sequence
  Description of Artificial Sequence: Synthetic oligonucleotide
  Sense strand starting at position 1834 of SEQ ID NO: 589014
gagcauuuccuugguaugu

SEQ ID NO: 905199 - RNA, 19 nt, Artificial Sequence
  Description of Artificial Sequence: Synthetic oligonucleotide
  Antisense strand to SEQ ID NO: 905198
acauaccaaggaaaugcuc

SEQ ID NO: 905200 - RNA, 19 nt, Artificial Sequence
  Description of Artificial Sequence: Synthetic oligonucleotide
  Sense strand starting at position 1845 of SEQ ID NO: 589014
ugguaugugcuugaauaga

SEQ ID NO: 905201 - RNA, 19 nt, Artificial Sequence
  Description of Artificial Sequence: Synthetic oligonucleotide
  Antisense strand to SEQ ID NO: 905200
ucuauucaagcacauacca

SEQ ID NO: 905202 - RNA, 19 nt, Artificial Sequence
  Description of Artificial Sequence: Synthetic oligonucleotide
  Sense strand starting at position 1850 of SEQ ID NO: 589014
ugugcuugaauagauguau

SEQ ID NO: 905203 - RNA, 19 nt, Artificial Sequence
  Description of Artificial Sequence: Synthetic oligonucleotide
  Antisense strand to SEQ ID NO: 905202
auacaucuauucaagcaca

SEQ ID NO: 905204 - RNA, 19 nt, Artificial Sequence
  Description of Artificial Sequence: Synthetic oligonucleotide
  Sense strand starting at position 1864 of SEQ ID NO: 589014
uguaucucagagcacauaa

SEQ ID NO: 905205 - RNA, 19 nt, Artificial Sequence
  Description of Artificial Sequence: Synthetic oligonucleotide
  Antisense strand to SEQ ID NO: 905204
uuaugugcucugagauaca

SEQ ID NO: 905206 - RNA, 19 nt, Artificial Sequence
  Description of Artificial Sequence: Synthetic oligonucleotide
  Sense strand starting at position 1888 of SEQ ID NO: 589014
cuucguaggcuucagaaag

SEQ ID NO: 905207 - RNA, 19 nt, Artificial Sequence
  Description of Artificial Sequence: Synthetic oligonucleotide
  Antisense strand to SEQ ID NO: 905206
cuuucugaagccuacgaag

SEQ ID NO: 905208 - RNA, 19 nt, Artificial Sequence
  Description of Artificial Sequence: Synthetic oligonucleotide
  Sense strand starting at position 1973 of SEQ ID NO: 589014
agauaugugcuuggaaaua

SEQ ID NO: 905209 - RNA, 19 nt, Artificial Sequence
  Description of Artificial Sequence: Synthetic oligonucleotide
  Antisense strand to SEQ ID NO: 905208
uauuuccaagcacauaucu

SEQ ID NO: 905210 - RNA, 19 nt, Artificial Sequence
  Description of Artificial Sequence: Synthetic oligonucleotide
  Sense strand starting at position 2120 of SEQ ID NO: 589014
acaccuaggucaguucuua

SEQ ID NO: 905211 - RNA, 19 nt, Artificial Sequence
  Description of Artificial Sequence: Synthetic oligonucleotide
  Antisense strand to SEQ ID NO: 905210
uaagaacugaccuaggugu

SEQ ID NO: 905212 - RNA, 19 nt, Artificial Sequence
  Description of Artificial Sequence: Synthetic oligonucleotide
  Sense strand starting at position 2124 of SEQ ID NO: 589014
cuaggucaguucuuacaga

SEQ ID NO: 905213 - RNA, 19 nt, Artificial Sequence
  Description of Artificial Sequence: Synthetic oligonucleotide
  Antisense strand to SEQ ID NO: 905212
ucuguaagaacugaccuag

SEQ ID NO: 905214 - RNA, 19 nt, Artificial Sequence
  Description of Artificial Sequence: Synthetic oligonucleotide
  Sense strand starting at position 2396 of SEQ ID NO: 589014
cagauacuuuaguucucga

SEQ ID NO: 905215 - RNA, 19 nt, Artificial Sequence
  Description of Artificial Sequence: Synthetic oligonucleotide
  Antisense strand to SEQ ID NO: 905214
ucgagaacuaaaguaucug

SEQ ID NO: 905216 - RNA, 19 nt, Artificial Sequence
  Description of Artificial Sequence: Synthetic oligonucleotide
  Sense strand starting at position 2401 of SEQ ID NO: 589014
acuuuaguucucgacccau

SEQ ID NO: 905217 - RNA, 19 nt, Artificial Sequence
  Description of Artificial Sequence: Synthetic oligonucleotide
  Antisense strand to SEQ ID NO: 905216
augggucgagaacuaaagu

SEQ ID NO: 905218 - RNA, 19 nt, Artificial Sequence
  Description of Artificial Sequence: Synthetic oligonucleotide
  Sense strand starting at position 2564 of SEQ ID NO: 589014
ccaaaucugucauuacagu

SEQ ID NO: 905219 - RNA, 19 nt, Artificial Sequence
  Description of Artificial Sequence: Synthetic oligonucleotide
  Antisense strand to SEQ ID NO: 905218
acuguaaugacagauuugg

SEQ ID NO: 905220 - RNA, 19 nt, Artificial Sequence
  Description of Artificial Sequence: Synthetic oligonucleotide
  Sense strand starting at position 2762 of SEQ ID NO: 589014
gcacuaucuuugguaauca

SEQ ID NO: 905221 - RNA, 19 nt, Artificial Sequence
  Description of Artificial Sequence: Synthetic oligonucleotide
  Antisense strand to SEQ ID NO: 905220
ugauuaccaaagauagugc

SEQ ID NO: 905222 - RNA, 19 nt, Artificial Sequence
  Description of Artificial Sequence: Synthetic oligonucleotide
  Sense strand starting at position 2771 of SEQ ID NO: 589014
uugguaaucacugagcugu

SEQ ID NO: 905223 - RNA, 19 nt, Artificial Sequence
  Description of Artificial Sequence: Synthetic oligonucleotide
  Antisense strand to SEQ ID NO: 905222
acagcucagugauuaccaa

SEQ ID NO: 905224 - RNA, 19 nt, Artificial Sequence
  Description of Artificial Sequence: Synthetic oligonucleotide
  Sense strand starting at position 2823 of SEQ ID NO: 589014
cccaaauguccacagugaa

SEQ ID NO: 905225 - RNA, 19 nt, Artificial Sequence
  Description of Artificial Sequence: Synthetic oligonucleotide
  Antisense strand to SEQ ID NO: 905224
uucacuguggacauuuggg

SEQ ID NO: 905226 - RNA, 19 nt, Artificial Sequence
  Description of Artificial Sequence: Synthetic oligonucleotide
  Sense strand starting at position 2883 of SEQ ID NO: 589014
agacaaugagccuaucuuu

SEQ ID NO: 905227 - RNA, 19 nt, Artificial Sequence
  Description of Artificial Sequence: Synthetic oligonucleotide
  Antisense strand to SEQ ID NO: 905226
aaagauaggcucauugucu

SEQ ID NO: 905228 - RNA, 19 nt, Artificial Sequence
  Description of Artificial Sequence: Synthetic oligonucleotide
  Sense strand starting at position 3286 of SEQ ID NO: 589014
ucuugcugugguuaagaca

SEQ ID NO: 905229 - RNA, 19 nt, Artificial Sequence
  Description of Artificial Sequence: Synthetic oligonucleotide
  Antisense strand to SEQ ID NO: 905228
ugucuuaaccacagcaaga

SEQ ID NO: 905230 - RNA, 19 nt, Artificial Sequence
  Description of Artificial Sequence: Synthetic oligonucleotide
  Sense strand starting at position 3369 of SEQ ID NO: 589014
cgaauaagccauugaccaa

SEQ ID NO: 905231 - RNA, 19 nt, Artificial Sequence
  Description of Artificial Sequence: Synthetic oligonucleotide
  Antisense strand to SEQ ID NO: 905230
uuggucaauggcuuauucg

SEQ ID NO: 905232 - RNA, 19 nt, Artificial Sequence
  Description of Artificial Sequence: Synthetic oligonucleotide
  Sense strand starting at position 3397 of SEQ ID NO: 589014
uccacaucacgugagcuau

SEQ ID NO: 905233 - RNA, 19 nt, Artificial Sequence
  Description of Artificial Sequence: Synthetic oligonucleotide
  Antisense strand to SEQ ID NO: 905232
auagcucacgugaugugga

SEQ ID NO: 905234 - RNA, 19 nt, Artificial Sequence
  Description of Artificial Sequence: Synthetic oligonucleotide
  Sense strand starting at position 3554 of SEQ ID NO: 589014
augaaaucauuaccugagu

SEQ ID NO: 905235 - RNA, 19 nt, Artificial Sequence
  Description of Artificial Sequence: Synthetic oligonucleotide
  Antisense strand to SEQ ID NO: 905234
acucagguaaugauuucau

SEQ ID NO: 905236 - RNA, 19 nt, Artificial Sequence
  Description of Artificial Sequence: Synthetic oligonucleotide
  Sense strand starting at position 145 of SEQ ID NO: 589015
ugugauuccucccugcaaa

SEQ ID NO: 905237 - RNA, 19 nt, Artificial Sequence
  Description of Artificial Sequence: Synthetic oligonucleotide
  Antisense strand to SEQ ID NO: 905236
uuugcagggaggaaucaca

SEQ ID NO: 905238 - RNA, 19 nt, Artificial Sequence
  Description of Artificial Sequence: Synthetic oligonucleotide
  Sense strand starting at position 209 of SEQ ID NO: 589015
aguuaacuaccuuggaguu

SEQ ID NO: 905239 - RNA, 19 nt, Artificial Sequence
  Description of Artificial Sequence: Synthetic oligonucleotide
  Antisense strand to SEQ ID NO: 905238
aacuccaagguaguuaacu

SEQ ID NO: 905240 - RNA, 19 nt, Artificial Sequence
  Description of Artificial Sequence: Synthetic oligonucleotide
  Sense strand starting at position 210 of SEQ ID NO: 589015
guuaacuaccuuggaguua

SEQ ID NO: 905241 - RNA, 19 nt, Artificial Sequence
  Description of Artificial Sequence: Synthetic oligonucleotide
  Antisense strand to SEQ ID NO: 905240
uaacuccaagguaguuaac

SEQ ID NO: 905242 - RNA, 19 nt, Artificial Sequence
  Description of Artificial Sequence: Synthetic oligonucleotide
  Sense strand starting at position 296 of SEQ ID NO: 589015
gucuguggucgcuaaggaa

SEQ ID NO: 905243 - RNA, 19 nt, Artificial Sequence
  Description of Artificial Sequence: Synthetic oligonucleotide
  Antisense strand to SEQ ID NO: 905242
uuccuuagcgaccacagac

SEQ ID NO: 905244 - RNA, 19 nt, Artificial Sequence
  Description of Artificial Sequence: Synthetic oligonucleotide
  Sense strand starting at position 336 of SEQ ID NO: 589015
acgaucucgccucagauga

SEQ ID NO: 905245 - RNA, 19 nt, Artificial Sequence
  Description of Artificial Sequence: Synthetic oligonucleotide
  Antisense strand to SEQ ID NO: 905244
ucaucugaggcgagaucgu

SEQ ID NO: 905246 - RNA, 19 nt, Artificial Sequence
  Description of Artificial Sequence: Synthetic oligonucleotide
  Sense strand starting at position 346 of SEQ ID NO: 589015
cucagaugauacuugucau

SEQ ID NO: 905247 - RNA, 19 nt, Artificial Sequence
  Description of Artificial Sequence: Synthetic oligonucleotide
  Antisense strand to SEQ ID NO: 905246
augacaaguaucaucugag

SEQ ID NO: 905248 - RNA, 19 nt, Artificial Sequence
  Description of Artificial Sequence: Synthetic oligonucleotide
  Sense strand starting at position 349 of SEQ ID NO: 589015
agaugauacuugucaucug

SEQ ID NO: 905249 - RNA, 19 nt, Artificial Sequence
  Description of Artificial Sequence: Synthetic oligonucleotide
  Antisense strand to SEQ ID NO: 905248
cagaugacaaguaucaucu

SEQ ID NO: 905250 - RNA, 19 nt, Artificial Sequence
  Description of Artificial Sequence: Synthetic oligonucleotide
  Sense strand starting at position 352 of SEQ ID NO: 589015
ugauacuugucaucuguga

SEQ ID NO: 905251 - RNA, 19 nt, Artificial Sequence
  Description of Artificial Sequence: Synthetic oligonucleotide
  Antisense strand to SEQ ID NO: 905250
ucacagaugacaaguauca

SEQ ID NO: 905252 - RNA, 19 nt, Artificial Sequence
  Description of Artificial Sequence: Synthetic oligonucleotide
  Sense strand starting at position 436 of SEQ ID NO: 589015
cuaucagucucccuacaug

SEQ ID NO: 905253 - RNA, 19 nt, Artificial Sequence
  Description of Artificial Sequence: Synthetic oligonucleotide
  Antisense strand to SEQ ID NO: 905252
cauguagggagacugauag

SEQ ID NO: 905254 - RNA, 19 nt, Artificial Sequence
  Description of Artificial Sequence: Synthetic oligonucleotide
  Sense strand starting at position 459 of SEQ ID NO: 589015
guuccacccuuuguggaua

SEQ ID NO: 905255 - RNA, 19 nt, Artificial Sequence
  Description of Artificial Sequence: Synthetic oligonucleotide
  Antisense strand to SEQ ID NO: 905254
uauccacaaaggguggaac

SEQ ID NO: 905256 - RNA, 19 nt, Artificial Sequence
  Description of Artificial Sequence: Synthetic oligonucleotide
  Sense strand starting at position 473 of SEQ ID NO: 589015
ggauacuucuaccuguaga

SEQ ID NO: 905257 - RNA, 19 nt, Artificial Sequence
  Description of Artificial Sequence: Synthetic oligonucleotide
  Antisense strand to SEQ ID NO: 905256
ucuacagguagaaguaucc

SEQ ID NO: 905258 - RNA, 19 nt, Artificial Sequence
  Description of Artificial Sequence: Synthetic oligonucleotide
  Sense strand starting at position 2486 of SEQ ID NO: 589015
cuuaguagcuacuugauua

SEQ ID NO: 905259 - RNA, 19 nt, Artificial Sequence
  Description of Artificial Sequence: Synthetic oligonucleotide
  Antisense strand to SEQ ID NO: 905258
uaaucaaguagcuacuaag

SEQ ID NO: 905260 - RNA, 19 nt, Artificial Sequence
  Description of Artificial Sequence: Synthetic oligonucleotide
  Sense strand starting at position 2490 of SEQ ID NO: 589015
guagcuacuugauuaggau

SEQ ID NO: 905261 - RNA, 19 nt, Artificial Sequence
  Description of Artificial Sequence: Synthetic oligonucleotide
  Antisense strand to SEQ ID NO: 905260
auccuaaucaaguagcuac

SEQ ID NO: 905262 - RNA, 19 nt, Artificial Sequence
  Description of Artificial Sequence: Synthetic oligonucleotide
  Sense strand starting at position 2502 of SEQ ID NO: 589015
uuaggaugugcugacaaug

SEQ ID NO: 905263 - RNA, 19 nt, Artificial Sequence
  Description of Artificial Sequence: Synthetic oligonucleotide
  Antisense strand to SEQ ID NO: 905262
cauugucagcacauccuaa

SEQ ID NO: 905264 - RNA, 19 nt, Artificial Sequence
  Description of Artificial Sequence: Synthetic oligonucleotide
  Sense strand starting at position 2567 of SEQ ID NO: 589015
gcaagugugcccuuuggca

SEQ ID NO: 905265 - RNA, 19 nt, Artificial Sequence
  Description of Artificial Sequence: Synthetic oligonucleotide
  Antisense strand to SEQ ID NO: 905264
ugccaaagggcacacuugc

SEQ ID NO: 905266 - RNA, 19 nt, Artificial Sequence
  Description of Artificial Sequence: Synthetic oligonucleotide
  Sense strand starting at position 2606 of SEQ ID NO: 589015
gcaguuccacgugagaaac

SEQ ID NO: 905267 - RNA, 19 nt, Artificial Sequence
  Description of Artificial Sequence: Synthetic oligonucleotide
  Antisense strand to SEQ ID NO: 905266
guuucucacguggaacugc

SEQ ID NO: 905268 - RNA, 19 nt, Artificial Sequence
  Description of Artificial Sequence: Synthetic oligonucleotide
  Sense strand starting at position 2671 of SEQ ID NO: 589015
agaggaaguugugaggaaa

SEQ ID NO: 905269 - RNA, 19 nt, Artificial Sequence
  Description of Artificial Sequence: Synthetic oligonucleotide
  Antisense strand to SEQ ID NO: 905268
uuuccucacaacuuccucu

SEQ ID NO: 905270 - RNA, 19 nt, Artificial Sequence
  Description of Artificial Sequence: Synthetic oligonucleotide
  Sense strand starting at position 2714 of SEQ ID NO: 589015
agcccuucucauugugauu

SEQ ID NO: 905271 - RNA, 19 nt, Artificial Sequence
  Description of Artificial Sequence: Synthetic oligonucleotide
  Antisense strand to SEQ ID NO: 905270
aaucacaaugagaagggcu

SEQ ID NO: 905272 - RNA, 19 nt, Artificial Sequence
  Description of Artificial Sequence: Synthetic oligonucleotide
  Sense strand starting at position 2779 of SEQ ID NO: 589015
aaacuacugugguugaacu

SEQ ID NO: 905273 - RNA, 19 nt, Artificial Sequence
  Description of Artificial Sequence: Synthetic oligonucleotide
  Antisense strand to SEQ ID NO: 905272
aguucaaccacaguaguuu

SEQ ID NO: 905274 - RNA, 19 nt, Artificial Sequence
  Description of Artificial Sequence: Synthetic oligonucleotide
  Sense strand starting at position 2781 of SEQ ID NO: 589015
acuacugugguugaacuua

SEQ ID NO: 905275 - RNA, 19 nt, Artificial Sequence
  Description of Artificial Sequence: Synthetic oligonucleotide
  Antisense strand to SEQ ID NO: 905274
uaaguucaaccacaguagu

SEQ ID NO: 905276 - RNA, 19 nt, Artificial Sequence
  Description of Artificial Sequence: Synthetic oligonucleotide
  Sense strand starting at position 2801 of SEQ ID NO: 589015
gggucaaaguucccuauag

SEQ ID NO: 905277 - RNA, 19 nt, Artificial Sequence
  Description of Artificial Sequence: Synthetic oligonucleotide
  Antisense strand to SEQ ID NO: 905276
cuauagggaacuuugaccc

SEQ ID NO: 905278 - RNA, 19 nt, Artificial Sequence
  Description of Artificial Sequence: Synthetic oligonucleotide
  Sense strand starting at position 2803 of SEQ ID NO: 589015
gucaaaguucccuauaggu

SEQ ID NO: 905279 - RNA, 19 nt, Artificial Sequence
  Description of Artificial Sequence: Synthetic oligonucleotide
  Antisense strand to SEQ ID NO: 905278
accuauagggaacuuugac

SEQ ID NO: 905280 - RNA, 19 nt, Artificial Sequence
  Description of Artificial Sequence: Synthetic oligonucleotide
  Sense strand starting at position 2864 of SEQ ID NO: 589015
agauaaucauaaccgaagu

SEQ ID NO: 905281 - RNA, 19 nt, Artificial Sequence
  Description of Artificial Sequence: Synthetic oligonucleotide
  Antisense strand to SEQ ID NO: 905280
acuucgguuaugauuaucu

SEQ ID NO: 905282 - RNA, 19 nt, Artificial Sequence
  Description of Artificial Sequence: Synthetic oligonucleotide
  Sense strand starting at position 2946 of SEQ ID NO: 589015
aggcauguccuaggauaac

SEQ ID NO: 905283 - RNA, 19 nt, Artificial Sequence
  Description of Artificial Sequence: Synthetic oligonucleotide
  Antisense strand to SEQ ID NO: 905282
guuauccuaggacaugccu

SEQ ID NO: 905284 - RNA, 19 nt, Artificial Sequence
  Description of Artificial Sequence: Synthetic oligonucleotide
  Sense strand starting at position 3031 of SEQ ID NO: 589015
uagacagaucuugguucca

SEQ ID NO: 905285 - RNA, 19 nt, Artificial Sequence
  Description of Artificial Sequence: Synthetic oligonucleotide
  Antisense strand to SEQ ID NO: 905284
uggaaccaagaucugucua

SEQ ID NO: 905286 - RNA, 19 nt, Artificial Sequence
  Description of Artificial Sequence: Synthetic oligonucleotide
  Sense strand starting at position 3033 of SEQ ID NO: 589015
gacagaucuugguuccaac

SEQ ID NO: 905287 - RNA, 19 nt, Artificial Sequence
  Description of Artificial Sequence: Synthetic oligonucleotide
  Antisense strand to SEQ ID NO: 905286
guuggaaccaagaucuguc

SEQ ID NO: 905288 - RNA, 19 nt, Artificial Sequence
  Description of Artificial Sequence: Synthetic oligonucleotide
  Sense strand starting at position 3068 of SEQ ID NO: 589015
cucccuguaucaucaguuu

SEQ ID NO: 905289 - RNA, 19 nt, Artificial Sequence
  Description of Artificial Sequence: Synthetic oligonucleotide
  Antisense strand to SEQ ID NO: 905288
aaacugaugauacagggag

SEQ ID NO: 905290 - RNA, 19 nt, Artificial Sequence
  Description of Artificial Sequence: Synthetic oligonucleotide
  Sense strand starting at position 3314 of SEQ ID NO: 589015
ugauuaaauguauguacag

SEQ ID NO: 905291 - RNA, 19 nt, Artificial Sequence
  Description of Artificial Sequence: Synthetic oligonucleotide
  Antisense strand to SEQ ID NO: 905290
cuguacauacauuuaauca

SEQ ID NO: 905292 - RNA, 19 nt, Artificial Sequence
  Description of Artificial Sequence: Synthetic oligonucleotide
  Sense strand starting at position 3344 of SEQ ID NO: 589015
gugacuggcacaugguuaa

SEQ ID NO: 905293 - RNA, 19 nt, Artificial Sequence
  Description of Artificial Sequence: Synthetic oligonucleotide
  Antisense strand to SEQ ID NO: 905292
uuaaccaugugccagucac

SEQ ID NO: 905294 - RNA, 19 nt, Artificial Sequence
  Description of Artificial Sequence: Synthetic oligonucleotide
  Sense strand starting at position 3348 of SEQ ID NO: 589015
cuggcacaugguuaaugau

SEQ ID NO: 905295 - RNA, 19 nt, Artificial Sequence
  Description of Artificial Sequence: Synthetic oligonucleotide
  Antisense strand to SEQ ID NO: 905294
aucauuaaccaugugccag

SEQ ID NO: 905296 - RNA, 19 nt, Artificial Sequence
  Description of Artificial Sequence: Synthetic oligonucleotide
  Sense strand starting at position 3402 of SEQ ID NO: 589015
agcuguauucuggauacca

SEQ ID NO: 905297 - RNA, 19 nt, Artificial Sequence
  Description of Artificial Sequence: Synthetic oligonucleotide
  Antisense strand to SEQ ID NO: 905296
ugguauccagaauacagcu

SEQ ID NO: 905298 - RNA, 19 nt, Artificial Sequence
  Description of Artificial Sequence: Synthetic oligonucleotide
  Sense strand starting at position 3483 of SEQ ID NO: 589015
gagugauuauagcucacuc

SEQ ID NO: 905299 - RNA, 19 nt, Artificial Sequence
  Description of Artificial Sequence: Synthetic oligonucleotide
  Antisense strand to SEQ ID NO: 905298
gagugagcuauaaucacuc

SEQ ID NO: 905300 - RNA, 19 nt, Artificial Sequence
  Description of Artificial Sequence: Synthetic oligonucleotide
  Sense strand starting at position 3485 of SEQ ID NO: 589015
gugauuauagcucacucua

SEQ ID NO: 905301 - RNA, 19 nt, Artificial Sequence
  Description of Artificial Sequence: Synthetic oligonucleotide
  Antisense strand to SEQ ID NO: 905300
uagagugagcuauaaucac

SEQ ID NO: 905302 - RNA, 19 nt, Artificial Sequence
  Description of Artificial Sequence: Synthetic oligonucleotide
  Sense strand starting at position 3811 of SEQ ID NO: 589015
acauuaguagaguacaugu

SEQ ID NO: 905303 - RNA, 19 nt, Artificial Sequence
  Description of Artificial Sequence: Synthetic oligonucleotide
  Antisense strand to SEQ ID NO: 905302
acauguacucuacuaaugu

SEQ ID NO: 905304 - RNA, 19 nt, Artificial Sequence
  Description of Artificial Sequence: Synthetic oligonucleotide
  Sense strand starting at position 3813 of SEQ ID NO: 589015
auuaguagaguacauguau

SEQ ID NO: 905305 - RNA, 19 nt, Artificial Sequence
  Description of Artificial Sequence: Synthetic oligonucleotide
  Antisense strand to SEQ ID NO: 905304
auacauguacucuacuaau

SEQ ID NO: 905306 - RNA, 19 nt, Artificial Sequence
  Description of Artificial Sequence: Synthetic oligonucleotide
  Sense strand starting at position 3850 of SEQ ID NO: 589015
auugauacaucacuguuga

SEQ ID NO: 905307 - RNA, 19 nt, Artificial Sequence
  Description of Artificial Sequence: Synthetic oligonucleotide
  Antisense strand to SEQ ID NO: 905306
ucaacagugauguaucaau

SEQ ID NO: 905308 - RNA, 19 nt, Artificial Sequence
  Description of Artificial Sequence: Synthetic oligonucleotide
  Sense strand starting at position 3851 of SEQ ID NO: 589015
uugauacaucacuguugac

SEQ ID NO: 905309 - RNA, 19 nt, Artificial Sequence
  Description of Artificial Sequence: Synthetic oligonucleotide
  Antisense strand to SEQ ID NO: 905308
gucaacagugauguaucaa

SEQ ID NO: 905310 - RNA, 19 nt, Artificial Sequence
  Description of Artificial Sequence: Synthetic oligonucleotide
  Sense strand starting at position 3952 of SEQ ID NO: 589015
uuuccuguuucuguagauu

SEQ ID NO: 905311 - RNA, 19 nt, Artificial Sequence
  Description of Artificial Sequence: Synthetic oligonucleotide
  Antisense strand to SEQ ID NO: 905310
aaucuacagaaacaggaaa

SEQ ID NO: 905312 - RNA, 19 nt, Artificial Sequence
  Description of Artificial Sequence: Synthetic oligonucleotide
  Sense strand starting at position 3960 of SEQ ID NO: 589015
uucuguagauuccucuuga

SEQ ID NO: 905313 - RNA, 19 nt, Artificial Sequence
  Description of Artificial Sequence: Synthetic oligonucleotide
  Antisense strand to SEQ ID NO: 905312
ucaagaggaaucuacagaa

SEQ ID NO: 905314 - RNA, 19 nt, Artificial Sequence
  Description of Artificial Sequence: Synthetic oligonucleotide
  Sense strand starting at position 3961 of SEQ ID NO: 589015
ucuguagauuccucuugac

SEQ ID NO: 905315 - RNA, 19 nt, Artificial Sequence
  Description of Artificial Sequence: Synthetic oligonucleotide
  Antisense strand to SEQ ID NO: 905314
gucaagaggaaucuacaga

SEQ ID NO: 905316 - RNA, 19 nt, Artificial Sequence
  Description of Artificial Sequence: Synthetic oligonucleotide
  Sense strand starting at position 26 of SEQ ID NO: 589016
gcuaauuguagaugaugga

SEQ ID NO: 905317 - RNA, 19 nt, Artificial Sequence
  Description of Artificial Sequence: Synthetic oligonucleotide
  Antisense strand to SEQ ID NO: 905316
uccaucaucuacaauuagc

SEQ ID NO: 905318 - RNA, 19 nt, Artificial Sequence
  Description of Artificial Sequence: Synthetic oligonucleotide
  Sense strand starting at position 221 of SEQ ID NO: 589016
uuuggaacucguuaaacca

SEQ ID NO: 905319 - RNA, 19 nt, Artificial Sequence
  Description of Artificial Sequence: Synthetic oligonucleotide
  Antisense strand to SEQ ID NO: 905318
ugguuuaacgaguuccaaa

SEQ ID NO: 905320 - RNA, 19 nt, Artificial Sequence
  Description of Artificial Sequence: Synthetic oligonucleotide
  Sense strand starting at position 319 of SEQ ID NO: 589016
cguuguuugcgaucuucag

SEQ ID NO: 905321 - RNA, 19 nt, Artificial Sequence
  Description of Artificial Sequence: Synthetic oligonucleotide
  Antisense strand to SEQ ID NO: 905320
cugaagaucgcaaacaacg

SEQ ID NO: 905322 - RNA, 19 nt, Artificial Sequence
  Description of Artificial Sequence: Synthetic oligonucleotide
  Sense strand starting at position 323 of SEQ ID NO: 589016
guuugcgaucuucagagau

SEQ ID NO: 905323 - RNA, 19 nt, Artificial Sequence
  Description of Artificial Sequence: Synthetic oligonucleotide
  Antisense strand to SEQ ID NO: 905322
aucucugaagaucgcaaac

SEQ ID NO: 905324 - RNA, 19 nt, Artificial Sequence
  Description of Artificial Sequence: Synthetic oligonucleotide
  Sense strand starting at position 337 of SEQ ID NO: 589016
gagauuaagucaguaauua

SEQ ID NO: 905325 - RNA, 19 nt, Artificial Sequence
  Description of Artificial Sequence: Synthetic oligonucleotide
  Antisense strand to SEQ ID NO: 905324
uaauuacugacuuaaucuc

SEQ ID NO: 905326 - RNA, 19 nt, Artificial Sequence
  Description of Artificial Sequence: Synthetic oligonucleotide
  Sense strand starting at position 341 of SEQ ID NO: 589016
uuaagucaguaauuaugga

SEQ ID NO: 905327 - RNA, 19 nt, Artificial Sequence
  Description of Artificial Sequence: Synthetic oligonucleotide
  Antisense strand to SEQ ID NO: 905326
uccauaauuacugacuuaa

SEQ ID NO: 905328 - RNA, 19 nt, Artificial Sequence
  Description of Artificial Sequence: Synthetic oligonucleotide
  Sense strand starting at position 549 of SEQ ID NO: 589016
acccaaugauuggcaucua

SEQ ID NO: 905329 - RNA, 19 nt, Artificial Sequence
  Description of Artificial Sequence: Synthetic oligonucleotide
  Antisense strand to SEQ ID NO: 905328
uagaugccaaucauugggu

SEQ ID NO: 905330 - RNA, 19 nt, Artificial Sequence
  Description of Artificial Sequence: Synthetic oligonucleotide
  Sense strand starting at position 594 of SEQ ID NO: 589016
aagagcaagucaucaguga

SEQ ID NO: 905331 - RNA, 19 nt, Artificial Sequence
  Description of Artificial Sequence: Synthetic oligonucleotide
  Antisense strand to SEQ ID NO: 905330
ucacugaugacuugcucuu

SEQ ID NO: 905332 - RNA, 19 nt, Artificial Sequence
  Description of Artificial Sequence: Synthetic oligonucleotide
  Sense strand starting at position 595 of SEQ ID NO: 589016
agagcaagucaucagugaa

SEQ ID NO: 905333 - RNA, 19 nt, Artificial Sequence
  Description of Artificial Sequence: Synthetic oligonucleotide
  Antisense strand to SEQ ID NO: 905332
uucacugaugacuugcucu

SEQ ID NO: 905334 - RNA, 19 nt, Artificial Sequence
  Description of Artificial Sequence: Synthetic oligonucleotide
  Sense strand starting at position 598 of SEQ ID NO: 589016
gcaagucaucagugaaaga

SEQ ID NO: 905335 - RNA, 19 nt, Artificial Sequence
  Description of Artificial Sequence: Synthetic oligonucleotide
  Antisense strand to SEQ ID NO: 905334
ucuuucacugaugacuugc

SEQ ID NO: 905336 - RNA, 19 nt, Artificial Sequence
  Description of Artificial Sequence: Synthetic oligonucleotide
  Sense strand starting at position 718 of SEQ ID NO: 589016
ugggaaagauuucaggagu

SEQ ID NO: 905337 - RNA, 19 nt, Artificial Sequence
  Description of Artificial Sequence: Synthetic oligonucleotide
  Antisense strand to SEQ ID NO: 905336
acuccugaaaucuuuccca

SEQ ID NO: 905338 - RNA, 19 nt, Artificial Sequence
  Description of Artificial Sequence: Synthetic oligonucleotide
  Sense strand starting at position 918 of SEQ ID NO: 589016
ucccuuuccuuugugagga

SEQ ID NO: 905339 - RNA, 19 nt, Artificial Sequence
  Description of Artificial Sequence: Synthetic oligonucleotide
  Antisense strand to SEQ ID NO: 905338
uccucacaaaggaaaggga

SEQ ID NO: 905340 - RNA, 19 nt, Artificial Sequence
  Description of Artificial Sequence: Synthetic oligonucleotide
  Sense strand starting at position 1858 of SEQ ID NO: 589016
gccagugugaaggacuaaa

SEQ ID NO: 905341 - RNA, 19 nt, Artificial Sequence
  Description of Artificial Sequence: Synthetic oligonucleotide
  Antisense strand to SEQ ID NO: 905340
uuuaguccuucacacuggc

SEQ ID NO: 905342 - RNA, 19 nt, Artificial Sequence
  Description of Artificial Sequence: Synthetic oligonucleotide
  Sense strand starting at position 2272 of SEQ ID NO: 589016
ggguaaguuaaugguggaa

SEQ ID NO: 905343 - RNA, 19 nt, Artificial Sequence
  Description of Artificial Sequence: Synthetic oligonucleotide
  Antisense strand to SEQ ID NO: 905342
uuccaccauuaacuuaccc

SEQ ID NO: 905344 - RNA, 19 nt, Artificial Sequence
  Description of Artificial Sequence: Synthetic oligonucleotide
  Sense strand starting at position 2400 of SEQ ID NO: 589016
cccgguuuggucagacgau

SEQ ID NO: 905345 - RNA, 19 nt, Artificial Sequence
  Description of Artificial Sequence: Synthetic oligonucleotide
  Antisense strand to SEQ ID NO: 905344
aucgucugaccaaaccggg

SEQ ID NO: 905346 - RNA, 19 nt, Artificial Sequence
  Description of Artificial Sequence: Synthetic oligonucleotide
  Sense strand starting at position 2538 of SEQ ID NO: 589016
gggacaauuuaauauaguu

SEQ ID NO: 905347 - RNA, 19 nt, Artificial Sequence
  Description of Artificial Sequence: Synthetic oligonucleotide
  Antisense strand to SEQ ID NO: 905346
aacuauauuaaauuguccc

SEQ ID NO: 905348 - RNA, 19 nt, Artificial Sequence
  Description of Artificial Sequence: Synthetic oligonucleotide
  Sense strand starting at position 2612 of SEQ ID NO: 589016
aguggcauuaaggauaguu

SEQ ID NO: 905349 - RNA, 19 nt, Artificial Sequence
  Description of Artificial Sequence: Synthetic oligonucleotide
  Antisense strand to SEQ ID NO: 905348
aacuauccuuaaugccacu

SEQ ID NO: 905350 - RNA, 19 nt, Artificial Sequence
  Description of Artificial Sequence: Synthetic oligonucleotide
  Sense strand starting at position 2668 of SEQ ID NO: 589016
cucugagaauccuaauuug

SEQ ID NO: 905351 - RNA, 19 nt, Artificial Sequence
  Description of Artificial Sequence: Synthetic oligonucleotide
  Antisense strand to SEQ ID NO: 905350
caaauuaggauucucagag

SEQ ID NO: 905352 - RNA, 19 nt, Artificial Sequence
  Description of Artificial Sequence: Synthetic oligonucleotide
  Sense strand starting at position 2710 of SEQ ID NO: 589016
gaugacuugcaaggaaugu

SEQ ID NO: 905353 - RNA, 19 nt, Artificial Sequence
  Description of Artificial Sequence: Synthetic oligonucleotide
  Antisense strand to SEQ ID NO: 905352
acauuccuugcaagucauc

SEQ ID NO: 905354 - RNA, 19 nt, Artificial Sequence
  Description of Artificial Sequence: Synthetic oligonucleotide
  Sense strand starting at position 2831 of SEQ ID NO: 589016
guccaacccuguucugaga

SEQ ID NO: 905355 - RNA, 19 nt, Artificial Sequence
  Description of Artificial Sequence: Synthetic oligonucleotide
  Antisense strand to SEQ ID NO: 905354
ucucagaacaggguuggac

SEQ ID NO: 905356 - RNA, 19 nt, Artificial Sequence
  Description of Artificial Sequence: Synthetic oligonucleotide
  Sense strand starting at position 2878 of SEQ ID NO: 589016
uuagcagagcucuauggaa

SEQ ID NO: 905357 - RNA, 19 nt, Artificial Sequence
  Description of Artificial Sequence: Synthetic oligonucleotide
  Antisense strand to SEQ ID NO: 905356
uuccauagagcucugcuaa

SEQ ID NO: 905358 - RNA, 19 nt, Artificial Sequence
  Description of Artificial Sequence: Synthetic oligonucleotide
  Sense strand starting at position 2880 of SEQ ID NO: 589016
agcagagcucuauggaauc

SEQ ID NO: 905359 - RNA, 19 nt, Artificial Sequence
  Description of Artificial Sequence: Synthetic oligonucleotide
  Antisense strand to SEQ ID NO: 905358
gauuccauagagcucugcu

SEQ ID NO: 905360 - RNA, 19 nt, Artificial Sequence
  Description of Artificial Sequence: Synthetic oligonucleotide
  Sense strand starting at position 2890 of SEQ ID NO: 589016
uauggaaucugggucuaag

SEQ ID NO: 905361 - RNA, 19 nt, Artificial Sequence
  Description of Artificial Sequence: Synthetic oligonucleotide
  Antisense strand to SEQ ID NO: 905360
cuuagacccagauuccaua

SEQ ID NO: 905362 - RNA, 19 nt, Artificial Sequence
  Description of Artificial Sequence: Synthetic oligonucleotide
  Sense strand starting at position 2910 of SEQ ID NO: 589016
gaauccugaggguaucgau

SEQ ID NO: 905363 - RNA, 19 nt, Artificial Sequence
  Description of Artificial Sequence: Synthetic oligonucleotide
  Antisense strand to SEQ ID NO: 905362
aucgauacccucaggauuc

SEQ ID NO: 905364 - RNA, 19 nt, Artificial Sequence
  Description of Artificial Sequence: Synthetic oligonucleotide
  Sense strand starting at position 2986 of SEQ ID NO: 589016
aggccuucugcuuaaugaa

SEQ ID NO: 905365 - RNA, 19 nt, Artificial Sequence
  Description of Artificial Sequence: Synthetic oligonucleotide
  Antisense strand to SEQ ID NO: 905364
uucauuaagcagaaggccu

SEQ ID NO: 905366 - RNA, 19 nt, Artificial Sequence
  Description of Artificial Sequence: Synthetic oligonucleotide
  Sense strand starting at position 3003 of SEQ ID NO: 589016
aaggaugacuacuugguua

SEQ ID NO: 905367 - RNA, 19 nt, Artificial Sequence
  Description of Artificial Sequence: Synthetic oligonucleotide
  Antisense strand to SEQ ID NO: 905366
uaaccaaguagucauccuu

SEQ ID NO: 905368 - RNA, 19 nt, Artificial Sequence
  Description of Artificial Sequence: Synthetic oligonucleotide
  Sense strand starting at position 3005 of SEQ ID NO: 589016
ggaugacuacuugguuaug

SEQ ID NO: 905369 - RNA, 19 nt, Artificial Sequence
  Description of Artificial Sequence: Synthetic oligonucleotide
  Antisense strand to SEQ ID NO: 905368
cauaaccaaguagucaucc

SEQ ID NO: 905370 - RNA, 19 nt, Artificial Sequence
  Description of Artificial Sequence: Synthetic oligonucleotide
  Sense strand starting at position 3006 of SEQ ID NO: 589016
gaugacuacuugguuaugu

SEQ ID NO: 905371 - RNA, 19 nt, Artificial Sequence
  Description of Artificial Sequence: Synthetic oligonucleotide
  Antisense strand to SEQ ID NO: 905370
acauaaccaaguagucauc

SEQ ID NO: 905372 - RNA, 19 nt, Artificial Sequence
  Description of Artificial Sequence: Synthetic oligonucleotide
  Sense strand starting at position 3031 of SEQ ID NO: 589016
gugagaugaucacugcuuc

SEQ ID NO: 905373 - RNA, 19 nt, Artificial Sequence
  Description of Artificial Sequence: Synthetic oligonucleotide
  Antisense strand to SEQ ID NO: 905372
gaagcagugaucaucucac

SEQ ID NO: 905374 - RNA, 19 nt, Artificial Sequence
  Description of Artificial Sequence: Synthetic oligonucleotide
  Sense strand starting at position 3032 of SEQ ID NO: 589016
ugagaugaucacugcuucu

SEQ ID NO: 905375 - RNA, 19 nt, Artificial Sequence
  Description of Artificial Sequence: Synthetic oligonucleotide
  Antisense strand to SEQ ID NO: 905374
agaagcagugaucaucuca

SEQ ID NO: 905376 - RNA, 19 nt, Artificial Sequence
  Description of Artificial Sequence: Synthetic oligonucleotide
  Sense strand starting at position 3368 of SEQ ID NO: 589016
ucugucucccugcauuuau

SEQ ID NO: 905377 - RNA, 19 nt, Artificial Sequence
  Description of Artificial Sequence: Synthetic oligonucleotide
  Antisense strand to SEQ ID NO: 905376
auaaaugcagggagacaga

SEQ ID NO: 905378 - RNA, 19 nt, Artificial Sequence
  Description of Artificial Sequence: Synthetic oligonucleotide
  Sense strand starting at position 3397 of SEQ ID NO: 589016
auuaucugugucuacauua

SEQ ID NO: 905379 - RNA, 19 nt, Artificial Sequence
  Description of Artificial Sequence: Synthetic oligonucleotide
  Antisense strand to SEQ ID NO: 905378
uaauguagacacagauaau

SEQ ID NO: 905380 - RNA, 19 nt, Artificial Sequence
  Description of Artificial Sequence: Synthetic oligonucleotide
  Sense strand starting at position 3460 of SEQ ID NO: 589016
auuuaccuguaagaagaua

SEQ ID NO: 905381 - RNA, 19 nt, Artificial Sequence
  Description of Artificial Sequence: Synthetic oligonucleotide
  Antisense strand to SEQ ID NO: 905380
uaucuucuuacagguaaau

SEQ ID NO: 905382 - RNA, 19 nt, Artificial Sequence
  Description of Artificial Sequence: Synthetic oligonucleotide
  Sense strand starting at position 3478 of SEQ ID NO: 589016
accauauaguuauccauug

SEQ ID NO: 905383 - RNA, 19 nt, Artificial Sequence
  Description of Artificial Sequence: Synthetic oligonucleotide
  Antisense strand to SEQ ID NO: 905382
caauggauaacuauauggu

SEQ ID NO: 905384 - RNA, 19 nt, Artificial Sequence
  Description of Artificial Sequence: Synthetic oligonucleotide
  Sense strand starting at position 3483 of SEQ ID NO: 589016
auaguuauccauuguuaug

SEQ ID NO: 905385 - RNA, 19 nt, Artificial Sequence
  Description of Artificial Sequence: Synthetic oligonucleotide
  Antisense strand to SEQ ID NO: 905384
cauaacaauggauaacuau

SEQ ID NO: 905386 - RNA, 19 nt, Artificial Sequence
  Description of Artificial Sequence: Synthetic oligonucleotide
  Sense strand starting at position 3519 of SEQ ID NO: 589016
uccugaccugcaugagaau

SEQ ID NO: 905387 - RNA, 19 nt, Artificial Sequence
  Description of Artificial Sequence: Synthetic oligonucleotide
  Antisense strand to SEQ ID NO: 905386
auucucaugcaggucagga

SEQ ID NO: 905388 - RNA, 19 nt, Artificial Sequence
  Description of Artificial Sequence: Synthetic oligonucleotide
  Sense strand starting at position 3548 of SEQ ID NO: 589016
ggcacuaugguguaaauca

SEQ ID NO: 905389 - RNA, 19 nt, Artificial Sequence
  Description of Artificial Sequence: Synthetic oligonucleotide
  Antisense strand to SEQ ID NO: 905388
ugauuuacaccauagugcc

SEQ ID NO: 905390 - RNA, 19 nt, Artificial Sequence
  Description of Artificial Sequence: Synthetic oligonucleotide
  Sense strand starting at position 3557 of SEQ ID NO: 589016
guguaaaucagagauuagu

SEQ ID NO: 905391 - RNA, 19 nt, Artificial Sequence
  Description of Artificial Sequence: Synthetic oligonucleotide
  Antisense strand to SEQ ID NO: 905390
acuaaucucugauuuacac

SEQ ID NO: 905392 - RNA, 19 nt, Artificial Sequence
  Description of Artificial Sequence: Synthetic oligonucleotide
  Sense strand starting at position 3721 of SEQ ID NO: 589016
uguaucacagaguaaucau

SEQ ID NO: 905393 - RNA, 19 nt, Artificial Sequence
  Description of Artificial Sequence: Synthetic oligonucleotide
  Antisense strand to SEQ ID NO: 905392
augauuacucugugauaca

SEQ ID NO: 905394 - RNA, 19 nt, Artificial Sequence
  Description of Artificial Sequence: Synthetic oligonucleotide
  Sense strand starting at position 3856 of SEQ ID NO: 589016
agauguuuauuuguggcau

SEQ ID NO: 905395 - RNA, 19 nt, Artificial Sequence
  Description of Artificial Sequence: Synthetic oligonucleotide
  Antisense strand to SEQ ID NO: 905394
augccacaaauaaacaucu

SEQ ID NO: 905396 - RNA, 19 nt, Artificial Sequence
  Description of Artificial Sequence: Synthetic oligonucleotide
  Sense strand starting at position 209 of SEQ ID NO: 589017
uuaccuugagugugucaca

SEQ ID NO: 905397 - RNA, 19 nt, Artificial Sequence
  Description of Artificial Sequence: Synthetic oligonucleotide
  Antisense strand to SEQ ID NO: 905396
ugugacacacucaagguaa

SEQ ID NO: 905398 - RNA, 19 nt, Artificial Sequence
  Description of Artificial Sequence: Synthetic oligonucleotide
  Sense strand starting at position 210 of SEQ ID NO: 589017
uaccuugagugugucacaa

SEQ ID NO: 905399 - RNA, 19 nt, Artificial Sequence
  Description of Artificial Sequence: Synthetic oligonucleotide
  Antisense strand to SEQ ID NO: 905398
uugugacacacucaaggua

SEQ ID NO: 905400 - RNA, 19 nt, Artificial Sequence
  Description of Artificial Sequence: Synthetic oligonucleotide
  Sense strand starting at position 275 of SEQ ID NO: 589017
cagaguccugugcaucaaa

SEQ ID NO: 905401 - RNA, 19 nt, Artificial Sequence
  Description of Artificial Sequence: Synthetic oligonucleotide
  Antisense strand to SEQ ID NO: 905400
uuugaugcacaggacucug

SEQ ID NO: 905402 - RNA, 19 nt, Artificial Sequence
  Description of Artificial Sequence: Synthetic oligonucleotide
  Sense strand starting at position 278 of SEQ ID NO: 589017
aguccugugcaucaaauca

SEQ ID NO: 905403 - RNA, 19 nt, Artificial Sequence
  Description of Artificial Sequence: Synthetic oligonucleotide
  Antisense strand to SEQ ID NO: 905402
ugauuugaugcacaggacu

SEQ ID NO: 905404 - RNA, 19 nt, Artificial Sequence
  Description of Artificial Sequence: Synthetic oligonucleotide
  Sense strand starting at position 448 of SEQ ID NO: 589017
caguguauguuugguagca

SEQ ID NO: 905405 - RNA, 19 nt, Artificial Sequence
  Description of Artificial Sequence: Synthetic oligonucleotide
  Antisense strand to SEQ ID NO: 905404
ugcuaccaaacauacacug

SEQ ID NO: 905406 - RNA, 19 nt, Artificial Sequence
  Description of Artificial Sequence: Synthetic oligonucleotide
  Sense strand starting at position 449 of SEQ ID NO: 589017
aguguauguuugguagcaa

SEQ ID NO: 905407 - RNA, 19 nt, Artificial Sequence
  Description of Artificial Sequence: Synthetic oligonucleotide
  Antisense strand to SEQ ID NO: 905406
uugcuaccaaacauacacu

SEQ ID NO: 905408 - RNA, 19 nt, Artificial Sequence
  Description of Artificial Sequence: Synthetic oligonucleotide
  Sense strand starting at position 450 of SEQ ID NO: 589017
guguauguuugguagcaac

SEQ ID NO: 905409 - RNA, 19 nt, Artificial Sequence
  Description of Artificial Sequence: Synthetic oligonucleotide
  Antisense strand to SEQ ID NO: 905408
guugcuaccaaacauacac

SEQ ID NO: 905410 - RNA, 19 nt, Artificial Sequence
  Description of Artificial Sequence: Synthetic oligonucleotide
  Sense strand starting at position 623 of SEQ ID NO: 589017
ucucucuuucugggacuaa

SEQ ID NO: 905411 - RNA, 19 nt, Artificial Sequence
  Description of Artificial Sequence: Synthetic oligonucleotide
  Antisense strand to SEQ ID NO: 905410
uuagucccagaaagagaga

SEQ ID NO: 905412 - RNA, 19 nt, Artificial Sequence
  Description of Artificial Sequence: Synthetic oligonucleotide
  Sense strand starting at position 632 of SEQ ID NO: 589017
cugggacuaacugguuaga

SEQ ID NO: 905413 - RNA, 19 nt, Artificial Sequence
  Description of Artificial Sequence: Synthetic oligonucleotide
  Antisense strand to SEQ ID NO: 905412
ucuaaccaguuagucccag

SEQ ID NO: 905414 - RNA, 19 nt, Artificial Sequence
  Description of Artificial Sequence: Synthetic oligonucleotide
  Sense strand starting at position 634 of SEQ ID NO: 589017
gggacuaacugguuagacu

SEQ ID NO: 905415 - RNA, 19 nt, Artificial Sequence
  Description of Artificial Sequence: Synthetic oligonucleotide
  Antisense strand to SEQ ID NO: 905414
agucuaaccaguuaguccc

SEQ ID NO: 905416 - RNA, 19 nt, Artificial Sequence
  Description of Artificial Sequence: Synthetic oligonucleotide
  Sense strand starting at position 663 of SEQ ID NO: 589017
aggccuucuucccacaagu

SEQ ID NO: 905417 - RNA, 19 nt, Artificial Sequence
  Description of Artificial Sequence: Synthetic oligonucleotide
  Antisense strand to SEQ ID NO: 905416
acuugugggaagaaggccu

SEQ ID NO: 905418 - RNA, 19 nt, Artificial Sequence
  Description of Artificial Sequence: Synthetic oligonucleotide
  Sense strand starting at position 672 of SEQ ID NO: 589017
ucccacaaguccuugggaa

SEQ ID NO: 905419 - RNA, 19 nt, Artificial Sequence
  Description of Artificial Sequence: Synthetic oligonucleotide
  Antisense strand to SEQ ID NO: 905418
uucccaaggacuuguggga

SEQ ID NO: 905420 - RNA, 19 nt, Artificial Sequence
  Description of Artificial Sequence: Synthetic oligonucleotide
  Sense strand starting at position 673 of SEQ ID NO: 589017
cccacaaguccuugggaaa

SEQ ID NO: 905421 - RNA, 19 nt, Artificial Sequence
  Description of Artificial Sequence: Synthetic oligonucleotide
  Antisense strand to SEQ ID NO: 905420
uuucccaaggacuuguggg

SEQ ID NO: 905422 - RNA, 19 nt, Artificial Sequence
  Description of Artificial Sequence: Synthetic oligonucleotide
  Sense strand starting at position 716 of SEQ ID NO: 589017
gguggaaucuucuagcagu

SEQ ID NO: 905423 - RNA, 19 nt, Artificial Sequence
  Description of Artificial Sequence: Synthetic oligonucleotide
  Antisense strand to SEQ ID NO: 905422
acugcuagaagauuccacc

SEQ ID NO: 905424 - RNA, 19 nt, Artificial Sequence
  Description of Artificial Sequence: Synthetic oligonucleotide
  Sense strand starting at position 1189 of SEQ ID NO: 589017
caucguugggcucgcgauu

SEQ ID NO: 905425 - RNA, 19 nt, Artificial Sequence
  Description of Artificial Sequence: Synthetic oligonucleotide
  Antisense strand to SEQ ID NO: 905424
aaucgcgagcccaacgaug

SEQ ID NO: 905426 - RNA, 19 nt, Artificial Sequence
  Description of Artificial Sequence: Synthetic oligonucleotide
  Sense strand starting at position 1201 of SEQ ID NO: 589017
cgcgauuuaccuggauggu

SEQ ID NO: 905427 - RNA, 19 nt, Artificial Sequence
  Description of Artificial Sequence: Synthetic oligonucleotide
  Antisense strand to SEQ ID NO: 905426
accauccagguaaaucgcg

SEQ ID NO: 905428 - RNA, 19 nt, Artificial Sequence
  Description of Artificial Sequence: Synthetic oligonucleotide
  Sense strand starting at position 1262 of SEQ ID NO: 589017
ccgucaggaccuuguagaa

SEQ ID NO: 905429 - RNA, 19 nt, Artificial Sequence
  Description of Artificial Sequence: Synthetic oligonucleotide
  Antisense strand to SEQ ID NO: 905428
uucuacaagguccugacgg

SEQ ID NO: 905430 - RNA, 19 nt, Artificial Sequence
  Description of Artificial Sequence: Synthetic oligonucleotide
  Sense strand starting at position 2228 of SEQ ID NO: 589017
cgccuucguccgagugcuu

SEQ ID NO: 905431 - RNA, 19 nt, Artificial Sequence
  Description of Artificial Sequence: Synthetic oligonucleotide
  Antisense strand to SEQ ID NO: 905430
aagcacucggacgaaggcg

SEQ ID NO: 905432 - RNA, 19 nt, Artificial Sequence
  Description of Artificial Sequence: Synthetic oligonucleotide
  Sense strand starting at position 2418 of SEQ ID NO: 589017
gcugucgccugaugacuuu

SEQ ID NO: 905433 - RNA, 19 nt, Artificial Sequence
  Description of Artificial Sequence: Synthetic oligonucleotide
  Antisense strand to SEQ ID NO: 905432
aaagucaucaggcgacagc

SEQ ID NO: 905434 - RNA, 19 nt, Artificial Sequence
  Description of Artificial Sequence: Synthetic oligonucleotide
  Sense strand starting at position 2535 of SEQ ID NO: 589017
ggcaaauucugauccauug

SEQ ID NO: 905435 - RNA, 19 nt, Artificial Sequence
  Description of Artificial Sequence: Synthetic oligonucleotide
  Antisense strand to SEQ ID NO: 905434
caauggaucagaauuugcc

SEQ ID NO: 905436 - RNA, 19 nt, Artificial Sequence
  Description of Artificial Sequence: Synthetic oligonucleotide
  Sense strand starting at position 3271 of SEQ ID NO: 589017
cgccuuuggaggcaagauu

SEQ ID NO: 905437 - RNA, 19 nt, Artificial Sequence
  Description of Artificial Sequence: Synthetic oligonucleotide
  Antisense strand to SEQ ID NO: 905436
aaucuugccuccaaaggcg

SEQ ID NO: 905438 - RNA, 19 nt, Artificial Sequence
  Description of Artificial Sequence: Synthetic oligonucleotide
  Sense strand starting at position 3282 of SEQ ID NO: 589017
gcaagauucucccugcccu

SEQ ID NO: 905439 - RNA, 19 nt, Artificial Sequence
  Description of Artificial Sequence: Synthetic oligonucleotide
  Antisense strand to SEQ ID NO: 905438
agggcagggagaaucuugc

SEQ ID NO: 905440 - RNA, 19 nt, Artificial Sequence
  Description of Artificial Sequence: Synthetic oligonucleotide
  Sense strand starting at position 3314 of SEQ ID NO: 589017
ccagguaucaggugacuag

SEQ ID NO: 905441 - RNA, 19 nt, Artificial Sequence
  Description of Artificial Sequence: Synthetic oligonucleotide
  Antisense strand to SEQ ID NO: 905440
cuagucaccugauaccugg

SEQ ID NO: 905442 - RNA, 19 nt, Artificial Sequence
  Description of Artificial Sequence: Synthetic oligonucleotide
  Sense strand starting at position 3317 of SEQ ID NO: 589017
gguaucaggugacuagaga

SEQ ID NO: 905443 - RNA, 19 nt, Artificial Sequence
  Description of Artificial Sequence: Synthetic oligonucleotide
  Antisense strand to SEQ ID NO: 905442
ucucuagucaccugauacc

SEQ ID NO: 905444 - RNA, 19 nt, Artificial Sequence
  Description of Artificial Sequence: Synthetic oligonucleotide
  Sense strand starting at position 3534 of SEQ ID NO: 589017
aggaaaugcgaucaaucuu

SEQ ID NO: 905445 - RNA, 19 nt, Artificial Sequence
  Description of Artificial Sequence: Synthetic oligonucleotide
  Antisense strand to SEQ ID NO: 905444
aagauugaucgcauuuccu

SEQ ID NO: 905446 - RNA, 19 nt, Artificial Sequence
  Description of Artificial Sequence: Synthetic oligonucleotide
  Sense strand starting at position 3540 of SEQ ID NO: 589017
ugcgaucaaucuugcgaug

SEQ ID NO: 905447 - RNA, 19 nt, Artificial Sequence
  Description of Artificial Sequence: Synthetic oligonucleotide
  Antisense strand to SEQ ID NO: 905446
caucgcaagauugaucgca

SEQ ID NO: 905448 - RNA, 19 nt, Artificial Sequence
  Description of Artificial Sequence: Synthetic oligonucleotide
  Sense strand starting at position 3543 of SEQ ID NO: 589017
gaucaaucuugcgauggcu

SEQ ID NO: 905449 - RNA, 19 nt, Artificial Sequence
  Description of Artificial Sequence: Synthetic oligonucleotide
  Antisense strand to SEQ ID NO: 905448
agccaucgcaagauugauc

SEQ ID NO: 905450 - RNA, 19 nt, Artificial Sequence
  Description of Artificial Sequence: Synthetic oligonucleotide
  Sense strand starting at position 3545 of SEQ ID NO: 589017
ucaaucuugcgauggcuuu

SEQ ID NO: 905451 - RNA, 19 nt, Artificial Sequence
  Description of Artificial Sequence: Synthetic oligonucleotide
  Antisense strand to SEQ ID NO: 905450
aaagccaucgcaagauuga

SEQ ID NO: 905452 - RNA, 19 nt, Artificial Sequence
  Description of Artificial Sequence: Synthetic oligonucleotide
  Sense strand starting at position 3585 of SEQ ID NO: 589017
agccguaccucuguaaauu

SEQ ID NO: 905453 - RNA, 19 nt, Artificial Sequence
  Description of Artificial Sequence: Synthetic oligonucleotide
  Antisense strand to SEQ ID NO: 905452
aauuuacagagguacggcu

SEQ ID NO: 905454 - RNA, 19 nt, Artificial Sequence
  Description of Artificial Sequence: Synthetic oligonucleotide
  Sense strand starting at position 3586 of SEQ ID NO: 589017
gccguaccucuguaaauua

SEQ ID NO: 905455 - RNA, 19 nt, Artificial Sequence
  Description of Artificial Sequence: Synthetic oligonucleotide
  Antisense strand to SEQ ID NO: 905454
uaauuuacagagguacggc

SEQ ID NO: 905456 - RNA, 19 nt, Artificial Sequence
  Description of Artificial Sequence: Synthetic oligonucleotide
  Sense strand starting at position 3616 of SEQ ID NO: 589017
cagaacagugccuagcaaa

SEQ ID NO: 905457 - RNA, 19 nt, Artificial Sequence
  Description of Artificial Sequence: Synthetic oligonucleotide
  Antisense strand to SEQ ID NO: 905456
uuugcuaggcacuguucug

SEQ ID NO: 905458 - RNA, 19 nt, Artificial Sequence
  Description of Artificial Sequence: Synthetic oligonucleotide
  Sense strand starting at position 3650 of SEQ ID NO: 589017
cuuagaucuguccaggugu

SEQ ID NO: 905459 - RNA, 19 nt, Artificial Sequence
  Description of Artificial Sequence: Synthetic oligonucleotide
  Antisense strand to SEQ ID NO: 905458
acaccuggacagaucuaag

SEQ ID NO: 905460 - RNA, 19 nt, Artificial Sequence
  Description of Artificial Sequence: Synthetic oligonucleotide
  Sense strand starting at position 3652 of SEQ ID NO: 589017
uagaucuguccaggugugu

SEQ ID NO: 905461 - RNA, 19 nt, Artificial Sequence
  Description of Artificial Sequence: Synthetic oligonucleotide
  Antisense strand to SEQ ID NO: 905460
acacaccuggacagaucua

SEQ ID NO: 905462 - RNA, 19 nt, Artificial Sequence
  Description of Artificial Sequence: Synthetic oligonucleotide
  Sense strand starting at position 3707 of SEQ ID NO: 589017
uuuguaucaagggagaguu

SEQ ID NO: 905463 - RNA, 19 nt, Artificial Sequence
  Description of Artificial Sequence: Synthetic oligonucleotide
  Antisense strand to SEQ ID NO: 905462
aacucucccuugauacaaa

SEQ ID NO: 905464 - RNA, 19 nt, Artificial Sequence
  Description of Artificial Sequence: Synthetic oligonucleotide
  Sense strand starting at position 3717 of SEQ ID NO: 589017
gggagaguuagacacgguu

SEQ ID NO: 905465 - RNA, 19 nt, Artificial Sequence
  Description of Artificial Sequence: Synthetic oligonucleotide
  Antisense strand to SEQ ID NO: 905464
aaccgugucuaacucuccc

SEQ ID NO: 905466 - RNA, 19 nt, Artificial Sequence
  Description of Artificial Sequence: Synthetic oligonucleotide
  Sense strand starting at position 320 of SEQ ID NO: 589018
cagaaugugcugugacuaa

SEQ ID NO: 905467 - RNA, 19 nt, Artificial Sequence
  Description of Artificial Sequence: Synthetic oligonucleotide
  Antisense strand to SEQ ID NO: 905466
uuagucacagcacauucug

SEQ ID NO: 905468 - RNA, 19 nt, Artificial Sequence
  Description of Artificial Sequence: Synthetic oligonucleotide
  Sense strand starting at position 426 of SEQ ID NO: 589018
agcaucaucuuucucagua

SEQ ID NO: 905469 - RNA, 19 nt, Artificial Sequence
  Description of Artificial Sequence: Synthetic oligonucleotide
  Antisense strand to SEQ ID NO: 905468
uacugagaaagaugaugcu

SEQ ID NO: 905470 - RNA, 19 nt, Artificial Sequence
  Description of Artificial Sequence: Synthetic oligonucleotide
  Sense strand starting at position 597 of SEQ ID NO: 589018
caugguaacgauuacuaua

SEQ ID NO: 905471 - RNA, 19 nt, Artificial Sequence
  Description of Artificial Sequence: Synthetic oligonucleotide
  Antisense strand to SEQ ID NO: 905470
uauaguaaucguuaccaug

SEQ ID NO: 905472 - RNA, 19 nt, Artificial Sequence
  Description of Artificial Sequence: Synthetic oligonucleotide
  Sense strand starting at position 599 of SEQ ID NO: 589018
ugguaacgauuacuauaua

SEQ ID NO: 905473 - RNA, 19 nt, Artificial Sequence
  Description of Artificial Sequence: Synthetic oligonucleotide
  Antisense strand to SEQ ID NO: 905472
uauauaguaaucguuacca

SEQ ID NO: 905474 - RNA, 19 nt, Artificial Sequence
  Description of Artificial Sequence: Synthetic oligonucleotide
  Sense strand starting at position 657 of SEQ ID NO: 589018
aaucgauaucaguaaugug

SEQ ID NO: 905475 - RNA, 19 nt, Artificial Sequence
  Description of Artificial Sequence: Synthetic oligonucleotide
  Antisense strand to SEQ ID NO: 905474
cacauuacugauaucgauu

SEQ ID NO: 905476 - RNA, 19 nt, Artificial Sequence
  Description of Artificial Sequence: Synthetic oligonucleotide
  Sense strand starting at position 667 of SEQ ID NO: 589018
aguaaugugcucuauauaa

SEQ ID NO: 905477 - RNA, 19 nt, Artificial Sequence
  Description of Artificial Sequence: Synthetic oligonucleotide
  Antisense strand to SEQ ID NO: 905476
uuauauagagcacauuacu

SEQ ID NO: 905478 - RNA, 19 nt, Artificial Sequence
  Description of Artificial Sequence: Synthetic oligonucleotide
  Sense strand starting at position 842 of SEQ ID NO: 589018
uuccuucuagaauguaaga

SEQ ID NO: 905479 - RNA, 19 nt, Artificial Sequence
  Description of Artificial Sequence: Synthetic oligonucleotide
  Antisense strand to SEQ ID NO: 905478
ucuuacauucuagaaggaa

SEQ ID NO: 905480 - RNA, 19 nt, Artificial Sequence
  Description of Artificial Sequence: Synthetic oligonucleotide
  Sense strand starting at position 906 of SEQ ID NO: 589018
gccaauaacagugaauggu

SEQ ID NO: 905481 - RNA, 19 nt, Artificial Sequence
  Description of Artificial Sequence: Synthetic oligonucleotide
  Antisense strand to SEQ ID NO: 905480
accauucacuguuauuggc

SEQ ID NO: 905482 - RNA, 19 nt, Artificial Sequence
  Description of Artificial Sequence: Synthetic oligonucleotide
  Sense strand starting at position 915 of SEQ ID NO: 589018
agugaaugguaucuaguag

SEQ ID NO: 905483 - RNA, 19 nt, Artificial Sequence
  Description of Artificial Sequence: Synthetic oligonucleotide
  Antisense strand to SEQ ID NO: 905482
cuacuagauaccauucacu

SEQ ID NO: 905484 - RNA, 19 nt, Artificial Sequence
  Description of Artificial Sequence: Synthetic oligonucleotide
  Sense strand starting at position 926 of SEQ ID NO: 589018
ucuaguaggccucaagaag

SEQ ID NO: 905485 - RNA, 19 nt, Artificial Sequence
  Description of Artificial Sequence: Synthetic oligonucleotide
  Antisense strand to SEQ ID NO: 905484
cuucuugaggccuacuaga

SEQ ID NO: 905486 - RNA, 19 nt, Artificial Sequence
  Description of Artificial Sequence: Synthetic oligonucleotide
  Sense strand starting at position 1090 of SEQ ID NO: 589018
cggagguuugguggacauu

SEQ ID NO: 905487 - RNA, 19 nt, Artificial Sequence
  Description of Artificial Sequence: Synthetic oligonucleotide
  Antisense strand to SEQ ID NO: 905486
aauguccaccaaaccuccg

SEQ ID NO: 905488 - RNA, 19 nt, Artificial Sequence
  Description of Artificial Sequence: Synthetic oligonucleotide
  Sense strand starting at position 1282 of SEQ ID NO: 589018
caucucggcccagaugaaa

SEQ ID NO: 905489 - RNA, 19 nt, Artificial Sequence
  Description of Artificial Sequence: Synthetic oligonucleotide
  Antisense strand to SEQ ID NO: 905488
uuucaucugggccgagaug

SEQ ID NO: 905490 - RNA, 19 nt, Artificial Sequence
  Description of Artificial Sequence: Synthetic oligonucleotide
  Sense strand starting at position 1535 of SEQ ID NO: 589018
agcgcaaacguuucccauu

SEQ ID NO: 905491 - RNA, 19 nt, Artificial Sequence
  Description of Artificial Sequence: Synthetic oligonucleotide
  Antisense strand to SEQ ID NO: 905490
aaugggaaacguuugcgcu

SEQ ID NO: 905492 - RNA, 19 nt, Artificial Sequence
  Description of Artificial Sequence: Synthetic oligonucleotide
  Sense strand starting at position 1607 of SEQ ID NO: 589018
cacucacguguagaugaua

SEQ ID NO: 905493 - RNA, 19 nt, Artificial Sequence
  Description of Artificial Sequence: Synthetic oligonucleotide
  Antisense strand to SEQ ID NO: 905492
uaucaucuacacgugagug

SEQ ID NO: 905494 - RNA, 19 nt, Artificial Sequence
  Description of Artificial Sequence: Synthetic oligonucleotide
  Sense strand starting at position 2484 of SEQ ID NO: 589018
ggagcuugucuagaaaucc

SEQ ID NO: 905495 - RNA, 19 nt, Artificial Sequence
  Description of Artificial Sequence: Synthetic oligonucleotide
  Antisense strand to SEQ ID NO: 905494
ggauuucuagacaagcucc

SEQ ID NO: 905496 - RNA, 19 nt, Artificial Sequence
  Description of Artificial Sequence: Synthetic oligonucleotide
  Sense strand starting at position 2833 of SEQ ID NO: 589018
ugccacucuguggaguaaa

SEQ ID NO: 905497 - RNA, 19 nt, Artificial Sequence
  Description of Artificial Sequence: Synthetic oligonucleotide
  Antisense strand to SEQ ID NO: 905496
uuuacuccacagaguggca

SEQ ID NO: 905498 - RNA, 19 nt, Artificial Sequence
  Description of Artificial Sequence: Synthetic oligonucleotide
  Sense strand starting at position 2869 of SEQ ID NO: 589018
aagaccaucucguuaguaa

SEQ ID NO: 905499 - RNA, 19 nt, Artificial Sequence
  Description of Artificial Sequence: Synthetic oligonucleotide
  Antisense strand to SEQ ID NO: 905498
uuacuaacgagauggucuu

SEQ ID NO: 905500 - RNA, 19 nt, Artificial Sequence
  Description of Artificial Sequence: Synthetic oligonucleotide
  Sense strand starting at position 2870 of SEQ ID NO: 589018
agaccaucucguuaguaaa

SEQ ID NO: 905501 - RNA, 19 nt, Artificial Sequence
  Description of Artificial Sequence: Synthetic oligonucleotide
  Antisense strand to SEQ ID NO: 905500
uuuacuaacgagauggucu

SEQ ID NO: 905502 - RNA, 19 nt, Artificial Sequence
  Description of Artificial Sequence: Synthetic oligonucleotide
  Sense strand starting at position 2872 of SEQ ID NO: 589018
accaucucguuaguaaauu

SEQ ID NO: 905503 - RNA, 19 nt, Artificial Sequence
  Description of Artificial Sequence: Synthetic oligonucleotide
  Antisense strand to SEQ ID NO: 905502
aauuuacuaacgagauggu

SEQ ID NO: 905504 - RNA, 19 nt, Artificial Sequence
  Description of Artificial Sequence: Synthetic oligonucleotide
  Sense strand starting at position 3044 of SEQ ID NO: 589018
augucacuuuggguaguaa

SEQ ID NO: 905505 - RNA, 19 nt, Artificial Sequence
  Description of Artificial Sequence: Synthetic oligonucleotide
  Antisense strand to SEQ ID NO: 905504
uuacuacccaaagugacau

SEQ ID NO: 905506 - RNA, 19 nt, Artificial Sequence
  Description of Artificial Sequence: Synthetic oligonucleotide
  Sense strand starting at position 3053 of SEQ ID NO: 589018
uggguaguaagguaacuaa

SEQ ID NO: 905507 - RNA, 19 nt, Artificial Sequence
  Description of Artificial Sequence: Synthetic oligonucleotide
  Antisense strand to SEQ ID NO: 905506
uuaguuaccuuacuaccca

SEQ ID NO: 905508 - RNA, 19 nt, Artificial Sequence
  Description of Artificial Sequence: Synthetic oligonucleotide
  Sense strand starting at position 3056 of SEQ ID NO: 589018
guaguaagguaacuaagua

SEQ ID NO: 905509 - RNA, 19 nt, Artificial Sequence
  Description of Artificial Sequence: Synthetic oligonucleotide
  Antisense strand to SEQ ID NO: 905508
uacuuaguuaccuuacuac

SEQ ID NO: 905510 - RNA, 19 nt, Artificial Sequence
  Description of Artificial Sequence: Synthetic oligonucleotide
  Sense strand starting at position 3103 of SEQ ID NO: 589018
agaugcuaguacucaaugu

SEQ ID NO: 905511 - RNA, 19 nt, Artificial Sequence
  Description of Artificial Sequence: Synthetic oligonucleotide
  Antisense strand to SEQ ID NO: 905510
acauugaguacuagcaucu

SEQ ID NO: 905512 - RNA, 19 nt, Artificial Sequence
  Description of Artificial Sequence: Synthetic oligonucleotide
  Sense strand starting at position 3178 of SEQ ID NO: 589018
uguugcaagugauuuccuu

SEQ ID NO: 905513 - RNA, 19 nt, Artificial Sequence
  Description of Artificial Sequence: Synthetic oligonucleotide
  Antisense strand to SEQ ID NO: 905512
aaggaaaucacuugcaaca

SEQ ID NO: 905514 - RNA, 19 nt, Artificial Sequence
  Description of Artificial Sequence: Synthetic oligonucleotide
  Sense strand starting at position 3585 of SEQ ID NO: 589018
auuauugcuguuuauggua

SEQ ID NO: 905515 - RNA, 19 nt, Artificial Sequence
  Description of Artificial Sequence: Synthetic oligonucleotide
  Antisense strand to SEQ ID NO: 905514
uaccauaaacagcaauaau

SEQ ID NO: 905516 - RNA, 19 nt, Artificial Sequence
  Description of Artificial Sequence: Synthetic oligonucleotide
  Sense strand starting at position 3593 of SEQ ID NO: 589018
uguuuaugguaguuaauag

SEQ ID NO: 905517 - RNA, 19 nt, Artificial Sequence
  Description of Artificial Sequence: Synthetic oligonucleotide
  Antisense strand to SEQ ID NO: 905516
cuauuaacuaccauaaaca

SEQ ID NO: 905518 - RNA, 19 nt, Artificial Sequence
  Description of Artificial Sequence: Synthetic oligonucleotide
  Sense strand starting at position 3594 of SEQ ID NO: 589018
guuuaugguaguuaauagu

SEQ ID NO: 905519 - RNA, 19 nt, Artificial Sequence
  Description of Artificial Sequence: Synthetic oligonucleotide
  Antisense strand to SEQ ID NO: 905518
acuauuaacuaccauaaac

SEQ ID NO: 905520 - RNA, 19 nt, Artificial Sequence
  Description of Artificial Sequence: Synthetic oligonucleotide
  Sense strand starting at position 3600 of SEQ ID NO: 589018
gguaguuaauagucacuga

SEQ ID NO: 905521 - RNA, 19 nt, Artificial Sequence
  Description of Artificial Sequence: Synthetic oligonucleotide
  Antisense strand to SEQ ID NO: 905520
ucagugacuauuaacuacc

SEQ ID NO: 905522 - RNA, 19 nt, Artificial Sequence
  Description of Artificial Sequence: Synthetic oligonucleotide
  Sense strand starting at position 3603 of SEQ ID NO: 589018
aguuaauagucacugaaug

SEQ ID NO: 905523 - RNA, 19 nt, Artificial Sequence
  Description of Artificial Sequence: Synthetic oligonucleotide
  Antisense strand to SEQ ID NO: 905522
cauucagugacuauuaacu

SEQ ID NO: 905524 - RNA, 19 nt, Artificial Sequence
  Description of Artificial Sequence: Synthetic oligonucleotide
  Sense strand starting at position 3604 of SEQ ID NO: 589018
guuaauagucacugaauga

SEQ ID NO: 905525 - RNA, 19 nt, Artificial Sequence
  Description of Artificial Sequence: Synthetic oligonucleotide
  Antisense strand to SEQ ID NO: 905524
ucauucagugacuauuaac

SEQ ID NO: 905526 - RNA, 19 nt, Artificial Sequence
  Description of Artificial Sequence: Synthetic oligonucleotide
  Sense strand starting at position 3608 of SEQ ID NO: 589018
auagucacugaaugaucua

SEQ ID NO: 905527 - RNA, 19 nt, Artificial Sequence
  Description of Artificial Sequence: Synthetic oligonucleotide
  Antisense strand to SEQ ID NO: 905526
uagaucauucagugacuau

SEQ ID NO: 905528 - RNA, 19 nt, Artificial Sequence
  Description of Artificial Sequence: Synthetic oligonucleotide
  Sense strand starting at position 3663 of SEQ ID NO: 589018
agaguuaauguccgaacca

SEQ ID NO: 905529 - RNA, 19 nt, Artificial Sequence
  Description of Artificial Sequence: Synthetic oligonucleotide
  Antisense strand to SEQ ID NO: 905528
ugguucggacauuaacucu

SEQ ID NO: 905530 - RNA, 19 nt, Artificial Sequence
  Description of Artificial Sequence: Synthetic oligonucleotide
  Sense strand starting at position 3674 of SEQ ID NO: 589018
ccgaaccauuccucgauua

SEQ ID NO: 905531 - RNA, 19 nt, Artificial Sequence
  Description of Artificial Sequence: Synthetic oligonucleotide
  Antisense strand to SEQ ID NO: 905530
uaaucgaggaaugguucgg

SEQ ID NO: 905532 - RNA, 19 nt, Artificial Sequence
  Description of Artificial Sequence: Synthetic oligonucleotide
  Sense strand starting at position 3675 of SEQ ID NO: 589018
cgaaccauuccucgauuaa

SEQ ID NO: 905533 - RNA, 19 nt, Artificial Sequence
  Description of Artificial Sequence: Synthetic oligonucleotide
  Antisense strand to SEQ ID NO: 905532
uuaaucgaggaaugguucg

SEQ ID NO: 905534 - RNA, 19 nt, Artificial Sequence
  Description of Artificial Sequence: Synthetic oligonucleotide
  Sense strand starting at position 3712 of SEQ ID NO: 589018
ugcagaaucagugggaaag

SEQ ID NO: 905535 - RNA, 19 nt, Artificial Sequence
  Description of Artificial Sequence: Synthetic oligonucleotide
  Antisense strand to SEQ ID NO: 905534
cuuucccacugauucugca

SEQ ID NO: 905536 - RNA, 19 nt, Artificial Sequence
  Description of Artificial Sequence: Synthetic oligonucleotide
  Sense strand starting at position 3714 of SEQ ID NO: 589018
cagaaucagugggaaagaa

SEQ ID NO: 905537 - RNA, 19 nt, Artificial Sequence
  Description of Artificial Sequence: Synthetic oligonucleotide
  Antisense strand to SEQ ID NO: 905536
uucuuucccacugauucug

SEQ ID NO: 905538 - RNA, 19 nt, Artificial Sequence
  Description of Artificial Sequence: Synthetic oligonucleotide
  Sense strand starting at position 3760 of SEQ ID NO: 589018
uugagaguuacuggcugau

SEQ ID NO: 905539 - RNA, 19 nt, Artificial Sequence
  Description of Artificial Sequence: Synthetic oligonucleotide
  Antisense strand to SEQ ID NO: 905538
aucagccaguaacucucaa

SEQ ID NO: 905540 - RNA, 19 nt, Artificial Sequence
  Description of Artificial Sequence: Synthetic oligonucleotide
  Sense strand starting at position 3762 of SEQ ID NO: 589018
gagaguuacuggcugauaa

SEQ ID NO: 905541 - RNA, 19 nt, Artificial Sequence
  Description of Artificial Sequence: Synthetic oligonucleotide
  Antisense strand to SEQ ID NO: 905540
uuaucagccaguaacucuc

SEQ ID NO: 905542 - RNA, 19 nt, Artificial Sequence
  Description of Artificial Sequence: Synthetic oligonucleotide
  Sense strand starting at position 3763 of SEQ ID NO: 589018
agaguuacuggcugauaaa

SEQ ID NO: 905543 - RNA, 19 nt, Artificial Sequence
  Description of Artificial Sequence: Synthetic oligonucleotide
  Antisense strand to SEQ ID NO: 905542
uuuaucagccaguaacucu

SEQ ID NO: 905544 - RNA, 19 nt, Artificial Sequence
  Description of Artificial Sequence: Synthetic oligonucleotide
  Sense strand starting at position 3949 of SEQ ID NO: 589018
gguuauggcaccuauaguc

SEQ ID NO: 905545 - RNA, 19 nt, Artificial Sequence
  Description of Artificial Sequence: Synthetic oligonucleotide
  Antisense strand to SEQ ID NO: 905544
gacuauaggugccauaacc

SEQ ID NO: 905546 - RNA, 19 nt, Artificial Sequence
  Description of Artificial Sequence: Synthetic oligonucleotide
  Sense strand starting at position 31 of SEQ ID NO: 589019
aucucuggugcugaaauca

SEQ ID NO: 905547 - RNA, 19 nt, Artificial Sequence
  Description of Artificial Sequence: Synthetic oligonucleotide
  Antisense strand to SEQ ID NO: 905546
ugauuucagcaccagagau

SEQ ID NO: 905548 - RNA, 19 nt, Artificial Sequence
  Description of Artificial Sequence: Synthetic oligonucleotide
  Sense strand starting at position 42 of SEQ ID NO: 589019
ugaaaucaccaguguccua

SEQ ID NO: 905549 - RNA, 19 nt, Artificial Sequence
  Description of Artificial Sequence: Synthetic oligonucleotide
  Antisense strand to SEQ ID NO: 905548
uaggacacuggugauuuca

SEQ ID NO: 905550 - RNA, 19 nt, Artificial Sequence
  Description of Artificial Sequence: Synthetic oligonucleotide
  Sense strand starting at position 49 of SEQ ID NO: 589019
accaguguccuaggaauuc

SEQ ID NO: 905551 - RNA, 19 nt, Artificial Sequence
  Description of Artificial Sequence: Synthetic oligonucleotide
  Antisense strand to SEQ ID NO: 905550
gaauuccuaggacacuggu

SEQ ID NO: 905552 - RNA, 19 nt, Artificial Sequence
  Description of Artificial Sequence: Synthetic oligonucleotide
  Sense strand starting at position 360 of SEQ ID NO: 589019
aguguaauuuguuacuaug

SEQ ID NO: 905553 - RNA, 19 nt, Artificial Sequence
  Description of Artificial Sequence: Synthetic oligonucleotide
  Antisense strand to SEQ ID NO: 905552
cauaguaacaaauuacacu

SEQ ID NO: 905554 - RNA, 19 nt, Artificial Sequence
  Description of Artificial Sequence: Synthetic oligonucleotide
  Sense strand starting at position 374 of SEQ ID NO: 589019
cuaugaaauuucuggacag

SEQ ID NO: 905555 - RNA, 19 nt, Artificial Sequence
  Description of Artificial Sequence: Synthetic oligonucleotide
  Antisense strand to SEQ ID NO: 905554
cuguccagaaauuucauag

SEQ ID NO: 905556 - RNA, 19 nt, Artificial Sequence
  Description of Artificial Sequence: Synthetic oligonucleotide
  Sense strand starting at position 375 of SEQ ID NO: 589019
uaugaaauuucuggacagu

SEQ ID NO: 905557 - RNA, 19 nt, Artificial Sequence
  Description of Artificial Sequence: Synthetic oligonucleotide
  Antisense strand to SEQ ID NO: 905556
acuguccagaaauuucaua

SEQ ID NO: 905558 - RNA, 19 nt, Artificial Sequence
  Description of Artificial Sequence: Synthetic oligonucleotide
  Sense strand starting at position 384 of SEQ ID NO: 589019
ucuggacagucuucgaaga

SEQ ID NO: 905559 - RNA, 19 nt, Artificial Sequence
  Description of Artificial Sequence: Synthetic oligonucleotide
  Antisense strand to SEQ ID NO: 905558
ucuucgaagacuguccaga

SEQ ID NO: 905560 - RNA, 19 nt, Artificial Sequence
  Description of Artificial Sequence: Synthetic oligonucleotide
  Sense strand starting at position 398 of SEQ ID NO: 589019
gaagacuaagccugugaag

SEQ ID NO: 905561 - RNA, 19 nt, Artificial Sequence
  Description of Artificial Sequence: Synthetic oligonucleotide
  Antisense strand to SEQ ID NO: 905560
cuucacaggcuuagucuuc

SEQ ID NO: 905562 - RNA, 19 nt, Artificial Sequence
  Description of Artificial Sequence: Synthetic oligonucleotide
  Sense strand starting at position 508 of SEQ ID NO: 589019
gccaaacuguggucuauca

SEQ ID NO: 905563 - RNA, 19 nt, Artificial Sequence
  Description of Artificial Sequence: Synthetic oligonucleotide
  Antisense strand to SEQ ID NO: 905562
ugauagaccacaguuuggc

SEQ ID NO: 905564 - RNA, 19 nt, Artificial Sequence
  Description of Artificial Sequence: Synthetic oligonucleotide
  Sense strand starting at position 588 of SEQ ID NO: 589019
ggucugaguggcuagggau

SEQ ID NO: 905565 - RNA, 19 nt, Artificial Sequence
  Description of Artificial Sequence: Synthetic oligonucleotide
  Antisense strand to SEQ ID NO: 905564
aucccuagccacucagacc

SEQ ID NO: 905566 - RNA, 19 nt, Artificial Sequence
  Description of Artificial Sequence: Synthetic oligonucleotide
  Sense strand starting at position 603 of SEQ ID NO: 589019
ggauauagauuguaagaga

SEQ ID NO: 905567 - RNA, 19 nt, Artificial Sequence
  Description of Artificial Sequence: Synthetic oligonucleotide
  Antisense strand to SEQ ID NO: 905566
ucucuuacaaucuauaucc

SEQ ID NO: 905568 - RNA, 19 nt, Artificial Sequence
  Description of Artificial Sequence: Synthetic oligonucleotide
  Sense strand starting at position 612 of SEQ ID NO: 589019
uuguaagagacuuguggaa

SEQ ID NO: 905569 - RNA, 19 nt, Artificial Sequence
  Description of Artificial Sequence: Synthetic oligonucleotide
  Antisense strand to SEQ ID NO: 905568
uuccacaagucucuuacaa

SEQ ID NO: 905570 - RNA, 19 nt, Artificial Sequence
  Description of Artificial Sequence: Synthetic oligonucleotide
  Sense strand starting at position 733 of SEQ ID NO: 589019
gcgugaacgacaugaguau

SEQ ID NO: 905571 - RNA, 19 nt, Artificial Sequence
  Description of Artificial Sequence: Synthetic oligonucleotide
  Antisense strand to SEQ ID NO: 905570
auacucaugucguucacgc

SEQ ID NO: 905572 - RNA, 19 nt, Artificial Sequence
  Description of Artificial Sequence: Synthetic oligonucleotide
  Sense strand starting at position 734 of SEQ ID NO: 589019
cgugaacgacaugaguauu

SEQ ID NO: 905573 - RNA, 19 nt, Artificial Sequence
  Description of Artificial Sequence: Synthetic oligonucleotide
  Antisense strand to SEQ ID NO: 905572
aauacucaugucguucacg

SEQ ID NO: 905574 - RNA, 19 nt, Artificial Sequence
  Description of Artificial Sequence: Synthetic oligonucleotide
  Sense strand starting at position 745 of SEQ ID NO: 589019
ugaguauuagaaggcgaga

SEQ ID NO: 905575 - RNA, 19 nt, Artificial Sequence
  Description of Artificial Sequence: Synthetic oligonucleotide
  Antisense strand to SEQ ID NO: 905574
ucucgccuucuaauacuca

SEQ ID NO: 905576 - RNA, 19 nt, Artificial Sequence
  Description of Artificial Sequence: Synthetic oligonucleotide
  Sense strand starting at position 748 of SEQ ID NO: 589019
guauuagaaggcgagaagu

SEQ ID NO: 905577 - RNA, 19 nt, Artificial Sequence
  Description of Artificial Sequence: Synthetic oligonucleotide
  Antisense strand to SEQ ID NO: 905576
acuucucgccuucuaauac

SEQ ID NO: 905578 - RNA, 19 nt, Artificial Sequence
  Description of Artificial Sequence: Synthetic oligonucleotide
  Sense strand starting at position 884 of SEQ ID NO: 589019
cuaaccucccucgagacau

SEQ ID NO: 905579 - RNA, 19 nt, Artificial Sequence
  Description of Artificial Sequence: Synthetic oligonucleotide
  Antisense strand to SEQ ID NO: 905578
augucucgagggagguuag

SEQ ID NO: 905580 - RNA, 19 nt, Artificial Sequence
  Description of Artificial Sequence: Synthetic oligonucleotide
  Sense strand starting at position 945 of SEQ ID NO: 589019
cuggaaacccuucgaaucu

SEQ ID NO: 905581 - RNA, 19 nt, Artificial Sequence
  Description of Artificial Sequence: Synthetic oligonucleotide
  Antisense strand to SEQ ID NO: 905580
agauucgaaggguuuccag

SEQ ID NO: 905582 - RNA, 19 nt, Artificial Sequence
  Description of Artificial Sequence: Synthetic oligonucleotide
  Sense strand starting at position 971 of SEQ ID NO: 589019
gcgcgaauccuaccacagu

SEQ ID NO: 905583 - RNA, 19 nt, Artificial Sequence
  Description of Artificial Sequence: Synthetic oligonucleotide
  Antisense strand to SEQ ID NO: 905582
acugugguaggauucgcgc

SEQ ID NO: 905584 - RNA, 19 nt, Artificial Sequence
  Description of Artificial Sequence: Synthetic oligonucleotide
  Sense strand starting at position 999 of SEQ ID NO: 589019
gaguuaggguucuuauucu

SEQ ID NO: 905585 - RNA, 19 nt, Artificial Sequence
  Description of Artificial Sequence: Synthetic oligonucleotide
  Antisense strand to SEQ ID NO: 905584
agaauaagaacccuaacuc

SEQ ID NO: 905586 - RNA, 19 nt, Artificial Sequence
  Description of Artificial Sequence: Synthetic oligonucleotide
  Sense strand starting at position 1005 of SEQ ID NO: 589019
ggguucuuauucuugagag

SEQ ID NO: 905587 - RNA, 19 nt, Artificial Sequence
  Description of Artificial Sequence: Synthetic oligonucleotide
  Antisense strand to SEQ ID NO: 905586
cucucaagaauaagaaccc

SEQ ID NO: 905588 - RNA, 19 nt, Artificial Sequence
  Description of Artificial Sequence: Synthetic oligonucleotide
  Sense strand starting at position 1007 of SEQ ID NO: 589019
guucuuauucuugagagcu

SEQ ID NO: 905589 - RNA, 19 nt, Artificial Sequence
  Description of Artificial Sequence: Synthetic oligonucleotide
  Antisense strand to SEQ ID NO: 905588
agcucucaagaauaagaac

SEQ ID NO: 905590 - RNA, 19 nt, Artificial Sequence
  Description of Artificial Sequence: Synthetic oligonucleotide
  Sense strand starting at position 1243 of SEQ ID NO: 589019
aauacaaacggcgagauau

SEQ ID NO: 905591 - RNA, 19 nt, Artificial Sequence
  Description of Artificial Sequence: Synthetic oligonucleotide
  Antisense strand to SEQ ID NO: 905590
auaucucgccguuuguauu

SEQ ID NO: 905592 - RNA, 19 nt, Artificial Sequence
  Description of Artificial Sequence: Synthetic oligonucleotide
  Sense strand starting at position 2266 of SEQ ID NO: 589019
ggauaugguucuuuggucu

SEQ ID NO: 905593 - RNA, 19 nt, Artificial Sequence
  Description of Artificial Sequence: Synthetic oligonucleotide
  Antisense strand to SEQ ID NO: 905592
agaccaaagaaccauaucc

SEQ ID NO: 905594 - RNA, 19 nt, Artificial Sequence
  Description of Artificial Sequence: Synthetic oligonucleotide
  Sense strand starting at position 2269 of SEQ ID NO: 589019
uaugguucuuuggucucaa

SEQ ID NO: 905595 - RNA, 19 nt, Artificial Sequence
  Description of Artificial Sequence: Synthetic oligonucleotide
  Antisense strand to SEQ ID NO: 905594
uugagaccaaagaaccaua

SEQ ID NO: 905596 - RNA, 19 nt, Artificial Sequence
  Description of Artificial Sequence: Synthetic oligonucleotide
  Sense strand starting at position 2270 of SEQ ID NO: 589019
augguucuuuggucucaaa

SEQ ID NO: 905597 - RNA, 19 nt, Artificial Sequence
  Description of Artificial Sequence: Synthetic oligonucleotide
  Antisense strand to SEQ ID NO: 905596
uuugagaccaaagaaccau

SEQ ID NO: 905598 - RNA, 19 nt, Artificial Sequence
  Description of Artificial Sequence: Synthetic oligonucleotide
  Sense strand starting at position 2310 of SEQ ID NO: 589019
ccuggcgugcacuuguaua

SEQ ID NO: 905599 - RNA, 19 nt, Artificial Sequence
  Description of Artificial Sequence: Synthetic oligonucleotide
  Antisense strand to SEQ ID NO: 905598
uauacaagugcacgccagg

SEQ ID NO: 905600 - RNA, 19 nt, Artificial Sequence
  Description of Artificial Sequence: Synthetic oligonucleotide
  Sense strand starting at position 2312 of SEQ ID NO: 589019
uggcgugcacuuguauaau

SEQ ID NO: 905601 - RNA, 19 nt, Artificial Sequence
  Description of Artificial Sequence: Synthetic oligonucleotide
  Antisense strand to SEQ ID NO: 905600
auuauacaagugcacgcca

SEQ ID NO: 905602 - RNA, 19 nt, Artificial Sequence
  Description of Artificial Sequence: Synthetic oligonucleotide
  Sense strand starting at position 2318 of SEQ ID NO: 589019
gcacuuguauaauccugga

SEQ ID NO: 905603 - RNA, 19 nt, Artificial Sequence
  Description of Artificial Sequence: Synthetic oligonucleotide
  Antisense strand to SEQ ID NO: 905602
uccaggauuauacaagugc

SEQ ID NO: 905604 - RNA, 19 nt, Artificial Sequence
  Description of Artificial Sequence: Synthetic oligonucleotide
  Sense strand starting at position 2322 of SEQ ID NO: 589019
uuguauaauccuggaaagg

SEQ ID NO: 905605 - RNA, 19 nt, Artificial Sequence
  Description of Artificial Sequence: Synthetic oligonucleotide
  Antisense strand to SEQ ID NO: 905604
ccuuuccaggauuauacaa

SEQ ID NO: 905606 - RNA, 19 nt, Artificial Sequence
  Description of Artificial Sequence: Synthetic oligonucleotide
  Sense strand starting at position 2510 of SEQ ID NO: 589019
ugcuacuuucgcgcggaaa

SEQ ID NO: 905607 - RNA, 19 nt, Artificial Sequence
  Description of Artificial Sequence: Synthetic oligonucleotide
  Antisense strand to SEQ ID NO: 905606
uuuccgcgcgaaaguagca

SEQ ID NO: 905608 - RNA, 19 nt, Artificial Sequence
  Description of Artificial Sequence: Synthetic oligonucleotide
  Sense strand starting at position 2693 of SEQ ID NO: 589019
ccggacauuuccguucgua

SEQ ID NO: 905609 - RNA, 19 nt, Artificial Sequence
  Description of Artificial Sequence: Synthetic oligonucleotide
  Antisense strand to SEQ ID NO: 905608
uacgaacggaaauguccgg

SEQ ID NO: 905610 - RNA, 19 nt, Artificial Sequence
  Description of Artificial Sequence: Synthetic oligonucleotide
  Sense strand starting at position 2696 of SEQ ID NO: 589019
gacauuuccguucguagac

SEQ ID NO: 905611 - RNA, 19 nt, Artificial Sequence
  Description of Artificial Sequence: Synthetic oligonucleotide
  Antisense strand to SEQ ID NO: 905610
gucuacgaacggaaauguc

SEQ ID NO: 905612 - RNA, 19 nt, Artificial Sequence
  Description of Artificial Sequence: Synthetic oligonucleotide
  Sense strand starting at position 2729 of SEQ ID NO: 589019
gugccuuuggccuaaggga

SEQ ID NO: 905613 - RNA, 19 nt, Artificial Sequence
  Description of Artificial Sequence: Synthetic oligonucleotide
  Antisense strand to SEQ ID NO: 905612
ucccuuaggccaaaggcac

SEQ ID NO: 905614 - RNA, 19 nt, Artificial Sequence
  Description of Artificial Sequence: Synthetic oligonucleotide
  Sense strand starting at position 2814 of SEQ ID NO: 589019
agacccuacuaggauuaaa

SEQ ID NO: 905615 - RNA, 19 nt, Artificial Sequence
  Description of Artificial Sequence: Synthetic oligonucleotide
  Antisense strand to SEQ ID NO: 905614
uuuaauccuaguagggucu

SEQ ID NO: 905616 - RNA, 19 nt, Artificial Sequence
  Description of Artificial Sequence: Synthetic oligonucleotide
  Sense strand starting at position 3357 of SEQ ID NO: 589019
ggugcuaauuauucccaua

SEQ ID NO: 905617 - RNA, 19 nt, Artificial Sequence
  Description of Artificial Sequence: Synthetic oligonucleotide
  Antisense strand to SEQ ID NO: 905616
uaugggaauaauuagcacc

SEQ ID NO: 905618 - RNA, 19 nt, Artificial Sequence
  Description of Artificial Sequence: Synthetic oligonucleotide
  Sense strand starting at position 3940 of SEQ ID NO: 589019
agaugauauuuagguuggu

SEQ ID NO: 905619 - RNA, 19 nt, Artificial Sequence
  Description of Artificial Sequence: Synthetic oligonucleotide
  Antisense strand to SEQ ID NO: 905618
accaaccuaaauaucaucu

SEQ ID NO: 905620 - RNA, 19 nt, Artificial Sequence
  Description of Artificial Sequence: Synthetic oligonucleotide
  Sense strand starting at position 3943 of SEQ ID NO: 589019
ugauauuuagguuggugca

SEQ ID NO: 905621 - RNA, 19 nt, Artificial Sequence
  Description of Artificial Sequence: Synthetic oligonucleotide
  Antisense strand to SEQ ID NO: 905620
ugcaccaaccuaaauauca

SEQ ID NO: 905622 - RNA, 19 nt, Artificial Sequence
  Description of Artificial Sequence: Synthetic oligonucleotide
  Sense strand starting at position 3980 of SEQ ID NO: 589019
ccauuucuuucgguggcaa

SEQ ID NO: 905623 - RNA, 19 nt, Artificial Sequence
  Description of Artificial Sequence: Synthetic oligonucleotide
  Antisense strand to SEQ ID NO: 905622
uugccaccgaaagaaaugg

SEQ ID NO: 905624 - RNA, 19 nt, Artificial Sequence
  Description of Artificial Sequence: Synthetic oligonucleotide
  Sense strand starting at position 3981 of SEQ ID NO: 589019
cauuucuuucgguggcaaa

SEQ ID NO: 905625 - RNA, 19 nt, Artificial Sequence
  Description of Artificial Sequence: Synthetic oligonucleotide
  Antisense strand to SEQ ID NO: 905624
uuugccaccgaaagaaaug

SEQ ID NO: 905626 - RNA, 19 nt, Artificial Sequence
  Description of Artificial Sequence: Synthetic oligonucleotide
  Sense strand starting at position 109 of SEQ ID NO: 589020
aagacaauggccugcugau

SEQ ID NO: 905627 - RNA, 19 nt, Artificial Sequence
  Description of Artificial Sequence: Synthetic oligonucleotide
  Antisense strand to SEQ ID NO: 905626
aucagcaggccauugucuu

SEQ ID NO: 905628 - RNA, 19 nt, Artificial Sequence
  Description of Artificial Sequence: Synthetic oligonucleotide
  Sense strand starting at position 292 of SEQ ID NO: 589020
ucacgagugcuccugccua

SEQ ID NO: 905629 - RNA, 19 nt, Artificial Sequence
  Description of Artificial Sequence: Synthetic oligonucleotide
  Antisense strand to SEQ ID NO: 905628
uaggcaggagcacucguga

SEQ ID NO: 905630 - RNA, 19 nt, Artificial Sequence
  Description of Artificial Sequence: Synthetic oligonucleotide
  Sense strand starting at position 324 of SEQ ID NO: 589020
aaggaccagcucuguaaua

SEQ ID NO: 905631 - RNA, 19 nt, Artificial Sequence
  Description of Artificial Sequence: Synthetic oligonucleotide
  Antisense strand to SEQ ID NO: 905630
uauuacagagcugguccuu

SEQ ID NO: 905632 - RNA, 19 nt, Artificial Sequence
  Description of Artificial Sequence: Synthetic oligonucleotide
  Sense strand starting at position 326 of SEQ ID NO: 589020
ggaccagcucuguaauaca

SEQ ID NO: 905633 - RNA, 19 nt, Artificial Sequence
  Description of Artificial Sequence: Synthetic oligonucleotide
  Antisense strand to SEQ ID NO: 905632
uguauuacagagcuggucc

SEQ ID NO: 905634 - RNA, 19 nt, Artificial Sequence
  Description of Artificial Sequence: Synthetic oligonucleotide
  Sense strand starting at position 350 of SEQ ID NO: 589020
gccguagagaauuaaacug

SEQ ID NO: 905635 - RNA, 19 nt, Artificial Sequence
  Description of Artificial Sequence: Synthetic oligonucleotide
  Antisense strand to SEQ ID NO: 905634
caguuuaauucucuacggc

SEQ ID NO: 905636 - RNA, 19 nt, Artificial Sequence
  Description of Artificial Sequence: Synthetic oligonucleotide
  Sense strand starting at position 534 of SEQ ID NO: 589020
ucucauaaucccgggaaau

SEQ ID NO: 905637 - RNA, 19 nt, Artificial Sequence
  Description of Artificial Sequence: Synthetic oligonucleotide
  Antisense strand to SEQ ID NO: 905636
auuucccgggauuaugaga

SEQ ID NO: 905638 - RNA, 19 nt, Artificial Sequence
  Description of Artificial Sequence: Synthetic oligonucleotide
  Sense strand starting at position 535 of SEQ ID NO: 589020
cucauaaucccgggaaaug

SEQ ID NO: 905639 - RNA, 19 nt, Artificial Sequence
  Description of Artificial Sequence: Synthetic oligonucleotide
  Antisense strand to SEQ ID NO: 905638
cauuucccgggauuaugag

SEQ ID NO: 905640 - RNA, 19 nt, Artificial Sequence
  Description of Artificial Sequence: Synthetic oligonucleotide
  Sense strand starting at position 638 of SEQ ID NO: 589020
gaaacaucguuauuggaga

SEQ ID NO: 905641 - RNA, 19 nt, Artificial Sequence
  Description of Artificial Sequence: Synthetic oligonucleotide
  Antisense strand to SEQ ID NO: 905640
ucuccaauaacgauguuuc

SEQ ID NO: 905642 - RNA, 19 nt, Artificial Sequence
  Description of Artificial Sequence: Synthetic oligonucleotide
  Sense strand starting at position 678 of SEQ ID NO: 589020
uucuaaucuguagagccaa

SEQ ID NO: 905643 - RNA, 19 nt, Artificial Sequence
  Description of Artificial Sequence: Synthetic oligonucleotide
  Antisense strand to SEQ ID NO: 905642
uuggcucuacagauuagaa

SEQ ID NO: 905644 - RNA, 19 nt, Artificial Sequence
  Description of Artificial Sequence: Synthetic oligonucleotide
  Sense strand starting at position 728 of SEQ ID NO: 589020
agguaaaggcucuaguuga

SEQ ID NO: 905645 - RNA, 19 nt, Artificial Sequence
  Description of Artificial Sequence: Synthetic oligonucleotide
  Antisense strand to SEQ ID NO: 905644
ucaacuagagccuuuaccu

SEQ ID NO: 905646 - RNA, 19 nt, Artificial Sequence
  Description of Artificial Sequence: Synthetic oligonucleotide
  Sense strand starting at position 733 of SEQ ID NO: 589020
aaggcucuaguugauaaau

SEQ ID NO: 905647 - RNA, 19 nt, Artificial Sequence
  Description of Artificial Sequence: Synthetic oligonucleotide
  Antisense strand to SEQ ID NO: 905646
auuuaucaacuagagccuu

SEQ ID NO: 905648 - RNA, 19 nt, Artificial Sequence
  Description of Artificial Sequence: Synthetic oligonucleotide
  Sense strand starting at position 742 of SEQ ID NO: 589020
guugauaaaugcucucuca

SEQ ID NO: 905649 - RNA, 19 nt, Artificial Sequence
  Description of Artificial Sequence: Synthetic oligonucleotide
  Antisense strand to SEQ ID NO: 905648
ugagagagcauuuaucaac

SEQ ID NO: 905650 - RNA, 19 nt, Artificial Sequence
  Description of Artificial Sequence: Synthetic oligonucleotide
  Sense strand starting at position 778 of SEQ ID NO: 589020
ucagauaugauaggcugua

SEQ ID NO: 905651 - RNA, 19 nt, Artificial Sequence
  Description of Artificial Sequence: Synthetic oligonucleotide
  Antisense strand to SEQ ID NO: 905650
uacagccuaucauaucuga

SEQ ID NO: 905652 - RNA, 19 nt, Artificial Sequence
  Description of Artificial Sequence: Synthetic oligonucleotide
  Sense strand starting at position 779 of SEQ ID NO: 589020
cagauaugauaggcuguaa

SEQ ID NO: 905653 - RNA, 19 nt, Artificial Sequence
  Description of Artificial Sequence: Synthetic oligonucleotide
  Antisense strand to SEQ ID NO: 905652
uuacagccuaucauaucug

SEQ ID NO: 905654 - RNA, 19 nt, Artificial Sequence
  Description of Artificial Sequence: Synthetic oligonucleotide
  Sense strand starting at position 855 of SEQ ID NO: 589020
agauaaucucucugaaguc

SEQ ID NO: 905655 - RNA, 19 nt, Artificial Sequence
  Description of Artificial Sequence: Synthetic oligonucleotide
  Antisense strand to SEQ ID NO: 905654
gacuucagagagauuaucu

SEQ ID NO: 905656 - RNA, 19 nt, Artificial Sequence
  Description of Artificial Sequence: Synthetic oligonucleotide
  Sense strand starting at position 1027 of SEQ ID NO: 589020
cuucuuagaugggucaagu

SEQ ID NO: 905657 - RNA, 19 nt, Artificial Sequence
  Description of Artificial Sequence: Synthetic oligonucleotide
  Antisense strand to SEQ ID NO: 905656
acuugacccaucuaagaag

SEQ ID NO: 905658 - RNA, 19 nt, Artificial Sequence
  Description of Artificial Sequence: Synthetic oligonucleotide
  Sense strand starting at position 1196 of SEQ ID NO: 589020
ccgguuaguguucagggaa

SEQ ID NO: 905659 - RNA, 19 nt, Artificial Sequence
  Description of Artificial Sequence: Synthetic oligonucleotide
  Antisense strand to SEQ ID NO: 905658
uucccugaacacuaaccgg

SEQ ID NO: 905660 - RNA, 19 nt, Artificial Sequence
  Description of Artificial Sequence: Synthetic oligonucleotide
  Sense strand starting at position 1393 of SEQ ID NO: 589020
cguccacucucacuagaga

SEQ ID NO: 905661 - RNA, 19 nt, Artificial Sequence
  Description of Artificial Sequence: Synthetic oligonucleotide
  Antisense strand to SEQ ID NO: 905660
ucucuagugagaguggacg

SEQ ID NO: 905662 - RNA, 19 nt, Artificial Sequence
  Description of Artificial Sequence: Synthetic oligonucleotide
  Sense strand starting at position 1414 of SEQ ID NO: 589020
cccagucacuguuuaauag

SEQ ID NO: 905663 - RNA, 19 nt, Artificial Sequence
  Description of Artificial Sequence: Synthetic oligonucleotide
  Antisense strand to SEQ ID NO: 905662
cuauuaaacagugacuggg

SEQ ID NO: 905664 - RNA, 19 nt, Artificial Sequence
  Description of Artificial Sequence: Synthetic oligonucleotide
  Sense strand starting at position 1531 of SEQ ID NO: 589020
gaacucaagugauuguuaa

SEQ ID NO: 905665 - RNA, 19 nt, Artificial Sequence
  Description of Artificial Sequence: Synthetic oligonucleotide
  Antisense strand to SEQ ID NO: 905664
uuaacaaucacuugaguuc

SEQ ID NO: 905666 - RNA, 19 nt, Artificial Sequence
  Description of Artificial Sequence: Synthetic oligonucleotide
  Sense strand starting at position 1532 of SEQ ID NO: 589020
aacucaagugauuguuaag

SEQ ID NO: 905667 - RNA, 19 nt, Artificial Sequence
  Description of Artificial Sequence: Synthetic oligonucleotide
  Antisense strand to SEQ ID NO: 905666
cuuaacaaucacuugaguu

SEQ ID NO: 905668 - RNA, 19 nt, Artificial Sequence
  Description of Artificial Sequence: Synthetic oligonucleotide
  Sense strand starting at position 1542 of SEQ ID NO: 589020
auuguuaagugauugccaa

SEQ ID NO: 905669 - RNA, 19 nt, Artificial Sequence
  Description of Artificial Sequence: Synthetic oligonucleotide
  Antisense strand to SEQ ID NO: 905668
uuggcaaucacuuaacaau

SEQ ID NO: 905670 - RNA, 19 nt, Artificial Sequence
  Description of Artificial Sequence: Synthetic oligonucleotide
  Sense strand starting at position 1587 of SEQ ID NO: 589020
ggauguaaaguuuggguga

SEQ ID NO: 905671 - RNA, 19 nt, Artificial Sequence
  Description of Artificial Sequence: Synthetic oligonucleotide
  Antisense strand to SEQ ID NO: 905670
ucacccaaacuuuacaucc

SEQ ID NO: 905672 - RNA, 19 nt, Artificial Sequence
  Description of Artificial Sequence: Synthetic oligonucleotide
  Sense strand starting at position 2137 of SEQ ID NO: 589020
ucuugcgauccugaaggaa

SEQ ID NO: 905673 - RNA, 19 nt, Artificial Sequence
  Description of Artificial Sequence: Synthetic oligonucleotide
  Antisense strand to SEQ ID NO: 905672
uuccuucaggaucgcaaga

SEQ ID NO: 905674 - RNA, 19 nt, Artificial Sequence
  Description of Artificial Sequence: Synthetic oligonucleotide
  Sense strand starting at position 2152 of SEQ ID NO: 589020
ggaagcuccgcccacuaau

SEQ ID NO: 905675 - RNA, 19 nt, Artificial Sequence
  Description of Artificial Sequence: Synthetic oligonucleotide
  Antisense strand to SEQ ID NO: 905674
auuagugggcggagcuucc

SEQ ID NO: 905676 - RNA, 19 nt, Artificial Sequence
  Description of Artificial Sequence: Synthetic oligonucleotide
  Sense strand starting at position 2420 of SEQ ID NO: 589020
cauaaaguaugucuggaga

SEQ ID NO: 905677 - RNA, 19 nt, Artificial Sequence
  Description of Artificial Sequence: Synthetic oligonucleotide
  Antisense strand to SEQ ID NO: 905676
ucuccagacauacuuuaug

SEQ ID NO: 905678 - RNA, 19 nt, Artificial Sequence
  Description of Artificial Sequence: Synthetic oligonucleotide
  Sense strand starting at position 2436 of SEQ ID NO: 589020
agaccucaguucuuaucua

SEQ ID NO: 905679 - RNA, 19 nt, Artificial Sequence
  Description of Artificial Sequence: Synthetic oligonucleotide
  Antisense strand to SEQ ID NO: 905678
uagauaagaacugaggucu

SEQ ID NO: 905680 - RNA, 19 nt, Artificial Sequence
  Description of Artificial Sequence: Synthetic oligonucleotide
  Sense strand starting at position 2443 of SEQ ID NO: 589020
aguucuuaucuagaccguu

SEQ ID NO: 905681 - RNA, 19 nt, Artificial Sequence
  Description of Artificial Sequence: Synthetic oligonucleotide
  Antisense strand to SEQ ID NO: 905680
aacggucuagauaagaacu

SEQ ID NO: 905682 - RNA, 19 nt, Artificial Sequence
  Description of Artificial Sequence: Synthetic oligonucleotide
  Sense strand starting at position 2472 of SEQ ID NO: 589020
aucauuguaucuccaaugu

SEQ ID NO: 905683 - RNA, 19 nt, Artificial Sequence
  Description of Artificial Sequence: Synthetic oligonucleotide
  Antisense strand to SEQ ID NO: 905682
acauuggagauacaaugau

SEQ ID NO: 905684 - RNA, 19 nt, Artificial Sequence
  Description of Artificial Sequence: Synthetic oligonucleotide
  Sense strand starting at position 2480 of SEQ ID NO: 589020
aucuccaaugucuggaaua

SEQ ID NO: 905685 - RNA, 19 nt, Artificial Sequence
  Description of Artificial Sequence: Synthetic oligonucleotide
  Antisense strand to SEQ ID NO: 905684
uauuccagacauuggagau

SEQ ID NO: 905686 - RNA, 19 nt, Artificial Sequence
  Description of Artificial Sequence: Synthetic oligonucleotide
  Sense strand starting at position 2482 of SEQ ID NO: 589020
cuccaaugucuggaauagu

SEQ ID NO: 905687 - RNA, 19 nt, Artificial Sequence
  Description of Artificial Sequence: Synthetic oligonucleotide
  Antisense strand to SEQ ID NO: 905686
acuauuccagacauuggag

SEQ ID NO: 905688 - RNA, 19 nt, Artificial Sequence
  Description of Artificial Sequence: Synthetic oligonucleotide
  Sense strand starting at position 2492 of SEQ ID NO: 589020
uggaauagugccuagugua

SEQ ID NO: 905689 - RNA, 19 nt, Artificial Sequence
  Description of Artificial Sequence: Synthetic oligonucleotide
  Antisense strand to SEQ ID NO: 905688
uacacuaggcacuauucca

SEQ ID NO: 905690 - RNA, 19 nt, Artificial Sequence
  Description of Artificial Sequence: Synthetic oligonucleotide
  Sense strand starting at position 2513 of SEQ ID NO: 589020
guaaucaguccguaaauau

SEQ ID NO: 905691 - RNA, 19 nt, Artificial Sequence
  Description of Artificial Sequence: Synthetic oligonucleotide
  Antisense strand to SEQ ID NO: 905690
auauuuacggacugauuac

SEQ ID NO: 905692 - RNA, 19 nt, Artificial Sequence
  Description of Artificial Sequence: Synthetic oligonucleotide
  Sense strand starting at position 2559 of SEQ ID NO: 589020
agggauugugaguggagau

SEQ ID NO: 905693 - RNA, 19 nt, Artificial Sequence
  Description of Artificial Sequence: Synthetic oligonucleotide
  Antisense strand to SEQ ID NO: 905692
aucuccacucacaaucccu

SEQ ID NO: 905694 - RNA, 19 nt, Artificial Sequence
  Description of Artificial Sequence: Synthetic oligonucleotide
  Sense strand starting at position 2560 of SEQ ID NO: 589020
gggauugugaguggagaua

SEQ ID NO: 905695 - RNA, 19 nt, Artificial Sequence
  Description of Artificial Sequence: Synthetic oligonucleotide
  Antisense strand to SEQ ID NO: 905694
uaucuccacucacaauccc

SEQ ID NO: 905696 - RNA, 19 nt, Artificial Sequence
  Description of Artificial Sequence: Synthetic oligonucleotide
  Sense strand starting at position 2571 of SEQ ID NO: 589020
uggagauaccucugaucuu

SEQ ID NO: 905697 - RNA, 19 nt, Artificial Sequence
  Description of Artificial Sequence: Synthetic oligonucleotide
  Antisense strand to SEQ ID NO: 905696
aagaucagagguaucucca

SEQ ID NO: 905698 - RNA, 19 nt, Artificial Sequence
  Description of Artificial Sequence: Synthetic oligonucleotide
  Sense strand starting at position 2574 of SEQ ID NO: 589020
agauaccucugaucuuuga

SEQ ID NO: 905699 - RNA, 19 nt, Artificial Sequence
  Description of Artificial Sequence: Synthetic oligonucleotide
  Antisense strand to SEQ ID NO: 905698
ucaaagaucagagguaucu

SEQ ID NO: 905700 - RNA, 19 nt, Artificial Sequence
  Description of Artificial Sequence: Synthetic oligonucleotide
  Sense strand starting at position 2956 of SEQ ID NO: 589020
cuagguaaguagcugaaua

SEQ ID NO: 905701 - RNA, 19 nt, Artificial Sequence
  Description of Artificial Sequence: Synthetic oligonucleotide
  Antisense strand to SEQ ID NO: 905700
uauucagcuacuuaccuag

SEQ ID NO: 905702 - RNA, 19 nt, Artificial Sequence
  Description of Artificial Sequence: Synthetic oligonucleotide
  Sense strand starting at position 3142 of SEQ ID NO: 589020
gguaacaaggccuaucuaa

SEQ ID NO: 905703 - RNA, 19 nt, Artificial Sequence
  Description of Artificial Sequence: Synthetic oligonucleotide
  Antisense strand to SEQ ID NO: 905702
uuagauaggccuuguuacc

SEQ ID NO: 905704 - RNA, 19 nt, Artificial Sequence
  Description of Artificial Sequence: Synthetic oligonucleotide
  Sense strand starting at position 3215 of SEQ ID NO: 589020
ccauguauuugguuucugu

SEQ ID NO: 905705 - RNA, 19 nt, Artificial Sequence
  Description of Artificial Sequence: Synthetic oligonucleotide
  Antisense strand to SEQ ID NO: 905704
acagaaaccaaauacaugg

SEQ ID NO: 905706 - RNA, 19 nt, Artificial Sequence
  Description of Artificial Sequence: Synthetic oligonucleotide
  Sense strand starting at position 58 of SEQ ID NO: 589021
uugggcauuccugagaaug

SEQ ID NO: 905707 - RNA, 19 nt, Artificial Sequence
  Description of Artificial Sequence: Synthetic oligonucleotide
  Antisense strand to SEQ ID NO: 905706
cauucucaggaaugcccaa

SEQ ID NO: 905708 - RNA, 19 nt, Artificial Sequence
  Description of Artificial Sequence: Synthetic oligonucleotide
  Sense strand starting at position 146 of SEQ ID NO: 589021
gaggaauguuguccugccu

SEQ ID NO: 905709 - RNA, 19 nt, Artificial Sequence
  Description of Artificial Sequence: Synthetic oligonucleotide
  Antisense strand to SEQ ID NO: 905708
aggcaggacaacauuccuc

SEQ ID NO: 905710 - RNA, 19 nt, Artificial Sequence
  Description of Artificial Sequence: Synthetic oligonucleotide
  Sense strand starting at position 172 of SEQ ID NO: 589021
ggucauuauugcucuugga

SEQ ID NO: 905711 - RNA, 19 nt, Artificial Sequence
  Description of Artificial Sequence: Synthetic oligonucleotide
  Antisense strand to SEQ ID NO: 905710
uccaagagcaauaaugacc

SEQ ID NO: 905712 - RNA, 19 nt, Artificial Sequence
  Description of Artificial Sequence: Synthetic oligonucleotide
  Sense strand starting at position 176 of SEQ ID NO: 589021
auuauugcucuuggaggua

SEQ ID NO: 905713 - RNA, 19 nt, Artificial Sequence
  Description of Artificial Sequence: Synthetic oligonucleotide
  Antisense strand to SEQ ID NO: 905712
uaccuccaagagcaauaau

SEQ ID NO: 905714 - RNA, 19 nt, Artificial Sequence
  Description of Artificial Sequence: Synthetic oligonucleotide
  Sense strand starting at position 207 of SEQ ID NO: 589021
guuagagaugauuggguca

SEQ ID NO: 905715 - RNA, 19 nt, Artificial Sequence
  Description of Artificial Sequence: Synthetic oligonucleotide
  Antisense strand to SEQ ID NO: 905714
ugacccaaucaucucuaac

SEQ ID NO: 905716 - RNA, 19 nt, Artificial Sequence
  Description of Artificial Sequence: Synthetic oligonucleotide
  Sense strand starting at position 234 of SEQ ID NO: 589021
gcaauugugcugguuugua

SEQ ID NO: 905717 - RNA, 19 nt, Artificial Sequence
  Description of Artificial Sequence: Synthetic oligonucleotide
  Antisense strand to SEQ ID NO: 905716
uacaaaccagcacaauugc

SEQ ID NO: 905718 - RNA, 19 nt, Artificial Sequence
  Description of Artificial Sequence: Synthetic oligonucleotide
  Sense strand starting at position 246 of SEQ ID NO: 589021
guuuguaagcucuggagag

SEQ ID NO: 905719 - RNA, 19 nt, Artificial Sequence
  Description of Artificial Sequence: Synthetic oligonucleotide
  Antisense strand to SEQ ID NO: 905718
cucuccagagcuuacaaac

SEQ ID NO: 905720 - RNA, 19 nt, Artificial Sequence
  Description of Artificial Sequence: Synthetic oligonucleotide
  Sense strand starting at position 250 of SEQ ID NO: 589021
guaagcucuggagagcaau

SEQ ID NO: 905721 - RNA, 19 nt, Artificial Sequence
  Description of Artificial Sequence: Synthetic oligonucleotide
  Antisense strand to SEQ ID NO: 905720
auugcucuccagagcuuac

SEQ ID NO: 905722 - RNA, 19 nt, Artificial Sequence
  Description of Artificial Sequence: Synthetic oligonucleotide
  Sense strand starting at position 342 of SEQ ID NO: 589021
gaccaugucugacucauga

SEQ ID NO: 905723 - RNA, 19 nt, Artificial Sequence
  Description of Artificial Sequence: Synthetic oligonucleotide
  Antisense strand to SEQ ID NO: 905722
ucaugagucagacaugguc

SEQ ID NO: 905724 - RNA, 19 nt, Artificial Sequence
  Description of Artificial Sequence: Synthetic oligonucleotide
  Sense strand starting at position 367 of SEQ ID NO: 589021
aaggcaaguugucugcaga

SEQ ID NO: 905725 - RNA, 19 nt, Artificial Sequence
  Description of Artificial Sequence: Synthetic oligonucleotide
  Antisense strand to SEQ ID NO: 905724
ucugcagacaacuugccuu

SEQ ID NO: 905726 - RNA, 19 nt, Artificial Sequence
  Description of Artificial Sequence: Synthetic oligonucleotide
  Sense strand starting at position 370 of SEQ ID NO: 589021
gcaaguugucugcagauaa

SEQ ID NO: 905727 - RNA, 19 nt, Artificial Sequence
  Description of Artificial Sequence: Synthetic oligonucleotide
  Antisense strand to SEQ ID NO: 905726
uuaucugcagacaacuugc

SEQ ID NO: 905728 - RNA, 19 nt, Artificial Sequence
  Description of Artificial Sequence: Synthetic oligonucleotide
  Sense strand starting at position 703 of SEQ ID NO: 589021
gcagccagacaauaucaau

SEQ ID NO: 905729 - RNA, 19 nt, Artificial Sequence
  Description of Artificial Sequence: Synthetic oligonucleotide
  Antisense strand to SEQ ID NO: 905728
auugauauugucuggcugc

SEQ ID NO: 905730 - RNA, 19 nt, Artificial Sequence
  Description of Artificial Sequence: Synthetic oligonucleotide
  Sense strand starting at position 728 of SEQ ID NO: 589021
gcacuuagucaugagacuu

SEQ ID NO: 905731 - RNA, 19 nt, Artificial Sequence
  Description of Artificial Sequence: Synthetic oligonucleotide
  Antisense strand to SEQ ID NO: 905730
aagucucaugacuaagugc

SEQ ID NO: 905732 - RNA, 19 nt, Artificial Sequence
  Description of Artificial Sequence: Synthetic oligonucleotide
  Sense strand starting at position 762 of SEQ ID NO: 589021
ggcagaaaugcugaacgcu

SEQ ID NO: 905733 - RNA, 19 nt, Artificial Sequence
  Description of Artificial Sequence: Synthetic oligonucleotide
  Antisense strand to SEQ ID NO: 905732
agcguucagcauuucugcc

SEQ ID NO: 905734 - RNA, 19 nt, Artificial Sequence
  Description of Artificial Sequence: Synthetic oligonucleotide
  Sense strand starting at position 789 of SEQ ID NO: 589021
cggacagacuucuauuuau

SEQ ID NO: 905735 - RNA, 19 nt, Artificial Sequence
  Description of Artificial Sequence: Synthetic oligonucleotide
  Antisense strand to SEQ ID NO: 905734
auaaauagaagucuguccg

SEQ ID NO: 905736 - RNA, 19 nt, Artificial Sequence
  Description of Artificial Sequence: Synthetic oligonucleotide
  Sense strand starting at position 855 of SEQ ID NO: 589021
ucaauaaauggcuggugaa

SEQ ID NO: 905737 - RNA, 19 nt, Artificial Sequence
  Description of Artificial Sequence: Synthetic oligonucleotide
  Antisense strand to SEQ ID NO: 905736
uucaccagccauuuauuga

SEQ ID NO: 905738 - RNA, 19 nt, Artificial Sequence
  Description of Artificial Sequence: Synthetic oligonucleotide
  Sense strand starting at position 856 of SEQ ID NO: 589021
caauaaauggcuggugaau

SEQ ID NO: 905739 - RNA, 19 nt, Artificial Sequence
  Description of Artificial Sequence: Synthetic oligonucleotide
  Antisense strand to SEQ ID NO: 905738
auucaccagccauuuauug

SEQ ID NO: 905740 - RNA, 19 nt, Artificial Sequence
  Description of Artificial Sequence: Synthetic oligonucleotide
  Sense strand starting at position 976 of SEQ ID NO: 589021
ucacauagaccuuggcuua

SEQ ID NO: 905741 - RNA, 19 nt, Artificial Sequence
  Description of Artificial Sequence: Synthetic oligonucleotide
  Antisense strand to SEQ ID NO: 905740
uaagccaaggucuauguga

SEQ ID NO: 905742 - RNA, 19 nt, Artificial Sequence
  Description of Artificial Sequence: Synthetic oligonucleotide
  Sense strand starting at position 1169 of SEQ ID NO: 589021
gacaaaccuguuuguagga

SEQ ID NO: 905743 - RNA, 19 nt, Artificial Sequence
  Description of Artificial Sequence: Synthetic oligonucleotide
  Antisense strand to SEQ ID NO: 905742
uccuacaaacagguuuguc

SEQ ID NO: 905744 - RNA, 19 nt, Artificial Sequence
  Description of Artificial Sequence: Synthetic oligonucleotide
  Sense strand starting at position 1270 of SEQ ID NO: 589021
ucaucuuguguauacuaua

SEQ ID NO: 905745 - RNA, 19 nt, Artificial Sequence
  Description of Artificial Sequence: Synthetic oligonucleotide
  Antisense strand to SEQ ID NO: 905744
uauaguauacacaagauga

SEQ ID NO: 905746 - RNA, 19 nt, Artificial Sequence
  Description of Artificial Sequence: Synthetic oligonucleotide
  Sense strand starting at position 1348 of SEQ ID NO: 589021
uccaguucugcagaaggca

SEQ ID NO: 905747 - RNA, 19 nt, Artificial Sequence
  Description of Artificial Sequence: Synthetic oligonucleotide
  Antisense strand to SEQ ID NO: 905746
ugccuucugcagaacugga

SEQ ID NO: 905748 - RNA, 19 nt, Artificial Sequence
  Description of Artificial Sequence: Synthetic oligonucleotide
  Sense strand starting at position 1360 of SEQ ID NO: 589021
gaaggcaaucagcaaguuu

SEQ ID NO: 905749 - RNA, 19 nt, Artificial Sequence
  Description of Artificial Sequence: Synthetic oligonucleotide
  Antisense strand to SEQ ID NO: 905748
aaacuugcugauugccuuc

SEQ ID NO: 905750 - RNA, 19 nt, Artificial Sequence
  Description of Artificial Sequence: Synthetic oligonucleotide
  Sense strand starting at position 1570 of SEQ ID NO: 589021
augccaaacagaugggauu

SEQ ID NO: 905751 - RNA, 19 nt, Artificial Sequence
  Description of Artificial Sequence: Synthetic oligonucleotide
  Antisense strand to SEQ ID NO: 905750
aaucccaucuguuuggcau

SEQ ID NO: 905752 - RNA, 19 nt, Artificial Sequence
  Description of Artificial Sequence: Synthetic oligonucleotide
  Sense strand starting at position 1581 of SEQ ID NO: 589021
augggauugguccgagaua

SEQ ID NO: 905753 - RNA, 19 nt, Artificial Sequence
  Description of Artificial Sequence: Synthetic oligonucleotide
  Antisense strand to SEQ ID NO: 905752
uaucucggaccaaucccau

SEQ ID NO: 905754 - RNA, 19 nt, Artificial Sequence
  Description of Artificial Sequence: Synthetic oligonucleotide
  Sense strand starting at position 1675 of SEQ ID NO: 589021
gugguacacagagagcauu

SEQ ID NO: 905755 - RNA, 19 nt, Artificial Sequence
  Description of Artificial Sequence: Synthetic oligonucleotide
  Antisense strand to SEQ ID NO: 905754
aaugcucucuguguaccac

SEQ ID NO: 905756 - RNA, 19 nt, Artificial Sequence
  Description of Artificial Sequence: Synthetic oligonucleotide
  Sense strand starting at position 2287 of SEQ ID NO: 589021
uaucuugcaugaguuagaa

SEQ ID NO: 905757 - RNA, 19 nt, Artificial Sequence
  Description of Artificial Sequence: Synthetic oligonucleotide
  Antisense strand to SEQ ID NO: 905756
uucuaacucaugcaagaua

SEQ ID NO: 905758 - RNA, 19 nt, Artificial Sequence
  Description of Artificial Sequence: Synthetic oligonucleotide
  Sense strand starting at position 2341 of SEQ ID NO: 589021
cuacucgucugguuggaau

SEQ ID NO: 905759 - RNA, 19 nt, Artificial Sequence
  Description of Artificial Sequence: Synthetic oligonucleotide
  Antisense strand to SEQ ID NO: 905758
auuccaaccagacgaguag

SEQ ID NO: 905760 - RNA, 19 nt, Artificial Sequence
  Description of Artificial Sequence: Synthetic oligonucleotide
  Sense strand starting at position 2343 of SEQ ID NO: 589021
acucgucugguuggaauua

SEQ ID NO: 905761 - RNA, 19 nt, Artificial Sequence
  Description of Artificial Sequence: Synthetic oligonucleotide
  Antisense strand to SEQ ID NO: 905760
uaauuccaaccagacgagu

SEQ ID NO: 905762 - RNA, 19 nt, Artificial Sequence
  Description of Artificial Sequence: Synthetic oligonucleotide
  Sense strand starting at position 2720 of SEQ ID NO: 589021
gagaaaccucuaggagcau

SEQ ID NO: 905763 - RNA, 19 nt, Artificial Sequence
  Description of Artificial Sequence: Synthetic oligonucleotide
  Antisense strand to SEQ ID NO: 905762
augcuccuagagguuucuc

SEQ ID NO: 905764 - RNA, 19 nt, Artificial Sequence
  Description of Artificial Sequence: Synthetic oligonucleotide
  Sense strand starting at position 2732 of SEQ ID NO: 589021
ggagcauuccagugaggag

SEQ ID NO: 905765 - RNA, 19 nt, Artificial Sequence
  Description of Artificial Sequence: Synthetic oligonucleotide
  Antisense strand to SEQ ID NO: 905764
cuccucacuggaaugcucc

SEQ ID NO: 905766 - RNA, 19 nt, Artificial Sequence
  Description of Artificial Sequence: Synthetic oligonucleotide
  Sense strand starting at position 3389 of SEQ ID NO: 589021
gcagaaauggaaugaaguu

SEQ ID NO: 905767 - RNA, 19 nt, Artificial Sequence
  Description of Artificial Sequence: Synthetic oligonucleotide
  Antisense strand to SEQ ID NO: 905766
aacuucauuccauuucugc

SEQ ID NO: 905768 - RNA, 19 nt, Artificial Sequence
  Description of Artificial Sequence: Synthetic oligonucleotide
  Sense strand starting at position 3711 of SEQ ID NO: 589021
acggccuauggguaucuaa

SEQ ID NO: 905769 - RNA, 19 nt, Artificial Sequence
  Description of Artificial Sequence: Synthetic oligonucleotide
  Antisense strand to SEQ ID NO: 905768
uuagauacccauaggccgu

SEQ ID NO: 905770 - RNA, 19 nt, Artificial Sequence
  Description of Artificial Sequence: Synthetic oligonucleotide
  Sense strand starting at position 3714 of SEQ ID NO: 589021
gccuauggguaucuaaaca

SEQ ID NO: 905771 - RNA, 19 nt, Artificial Sequence
  Description of Artificial Sequence: Synthetic oligonucleotide
  Antisense strand to SEQ ID NO: 905770
uguuuagauacccauaggc

SEQ ID NO: 905772 - RNA, 19 nt, Artificial Sequence
  Description of Artificial Sequence: Synthetic oligonucleotide
  Sense strand starting at position 3749 of SEQ ID NO: 589021
ugaacucagcauugguaga

SEQ ID NO: 905773 - RNA, 19 nt, Artificial Sequence
  Description of Artificial Sequence: Synthetic oligonucleotide
  Antisense strand to SEQ ID NO: 905772
ucuaccaaugcugaguuca

SEQ ID NO: 905774 - RNA, 19 nt, Artificial Sequence
  Description of Artificial Sequence: Synthetic oligonucleotide
  Sense strand starting at position 3756 of SEQ ID NO: 589021
agcauugguagaggaugau

SEQ ID NO: 905775 - RNA, 19 nt, Artificial Sequence
  Description of Artificial Sequence: Synthetic oligonucleotide
  Antisense strand to SEQ ID NO: 905774
aucauccucuaccaaugcu

SEQ ID NO: 905776 - RNA, 19 nt, Artificial Sequence
  Description of Artificial Sequence: Synthetic oligonucleotide
  Sense strand starting at position 3795 of SEQ ID NO: 589021
ggcagaaugauguaauagu

SEQ ID NO: 905777 - RNA, 19 nt, Artificial Sequence
  Description of Artificial Sequence: Synthetic oligonucleotide
  Antisense strand to SEQ ID NO: 905776
acuauuacaucauucugcc

SEQ ID NO: 905778 - RNA, 19 nt, Artificial Sequence
  Description of Artificial Sequence: Synthetic oligonucleotide
  Sense strand starting at position 3811 of SEQ ID NO: 589021
aguuaagaucuaggaguuc

SEQ ID NO: 905779 - RNA, 19 nt, Artificial Sequence
  Description of Artificial Sequence: Synthetic oligonucleotide
  Antisense strand to SEQ ID NO: 905778
gaacuccuagaucuuaacu

SEQ ID NO: 905780 - RNA, 19 nt, Artificial Sequence
  Description of Artificial Sequence: Synthetic oligonucleotide
  Sense strand starting at position 3939 of SEQ ID NO: 589021
agucccuaugucuguaaau

SEQ ID NO: 905781 - RNA, 19 nt, Artificial Sequence
  Description of Artificial Sequence: Synthetic oligonucleotide
  Antisense strand to SEQ ID NO: 905780
auuuacagacauagggacu

SEQ ID NO: 905782 - RNA, 19 nt, Artificial Sequence
  Description of Artificial Sequence: Synthetic oligonucleotide
  Sense strand starting at position 3940 of SEQ ID NO: 589021
gucccuaugucuguaaaug

SEQ ID NO: 905783 - RNA, 19 nt, Artificial Sequence
  Description of Artificial Sequence: Synthetic oligonucleotide
  Antisense strand to SEQ ID NO: 905782
cauuuacagacauagggac

SEQ ID NO: 905784 - RNA, 19 nt, Artificial Sequence
  Description of Artificial Sequence: Synthetic oligonucleotide
  Sense strand starting at position 3941 of SEQ ID NO: 589021
ucccuaugucuguaaaugu

SEQ ID NO: 905785 - RNA, 19 nt, Artificial Sequence
  Description of Artificial Sequence: Synthetic oligonucleotide
  Antisense strand to SEQ ID NO: 905784
acauuuacagacauaggga

SEQ ID NO: 905786 - RNA, 19 nt, Artificial Sequence
  Description of Artificial Sequence: Synthetic oligonucleotide
  Sense strand starting at position 69 of SEQ ID NO: 589022
uagguugaaucuguacauu

SEQ ID NO: 905787 - RNA, 19 nt, Artificial Sequence
  Description of Artificial Sequence: Synthetic oligonucleotide
  Antisense strand to SEQ ID NO: 905786
aauguacagauucaaccua

SEQ ID NO: 905788 - RNA, 19 nt, Artificial Sequence
  Description of Artificial Sequence: Synthetic oligonucleotide
  Sense strand starting at position 153 of SEQ ID NO: 589022
ccuguauuucucggagggu

SEQ ID NO: 905789 - RNA, 19 nt, Artificial Sequence
  Description of Artificial Sequence: Synthetic oligonucleotide
  Antisense strand to SEQ ID NO: 905788
acccuccgagaaauacagg

SEQ ID NO: 905790 - RNA, 19 nt, Artificial Sequence
  Description of Artificial Sequence: Synthetic oligonucleotide
  Sense strand starting at position 406 of SEQ ID NO: 589022
ggaggaggguccagaaaug

SEQ ID NO: 905791 - RNA, 19 nt, Artificial Sequence
  Description of Artificial Sequence: Synthetic oligonucleotide
  Antisense strand to SEQ ID NO: 905790
cauuucuggacccuccucc

SEQ ID NO: 905792 - RNA, 19 nt, Artificial Sequence
  Description of Artificial Sequence: Synthetic oligonucleotide
  Sense strand starting at position 540 of SEQ ID NO: 589022
ccuggacuccugcagcaau

SEQ ID NO: 905793 - RNA, 19 nt, Artificial Sequence
  Description of Artificial Sequence: Synthetic oligonucleotide
  Antisense strand to SEQ ID NO: 905792
auugcugcaggaguccagg

SEQ ID NO: 905794 - RNA, 19 nt, Artificial Sequence
  Description of Artificial Sequence: Synthetic oligonucleotide
  Sense strand starting at position 644 of SEQ ID NO: 589022
agggcaagacuuugagacu

SEQ ID NO: 905795 - RNA, 19 nt, Artificial Sequence
  Description of Artificial Sequence: Synthetic oligonucleotide
  Antisense strand to SEQ ID NO: 905794
agucucaaagucuugcccu

SEQ ID NO: 905796 - RNA, 19 nt, Artificial Sequence
  Description of Artificial Sequence: Synthetic oligonucleotide
  Sense strand starting at position 700 of SEQ ID NO: 589022
gcaagaagucccgagucua

SEQ ID NO: 905797 - RNA, 19 nt, Artificial Sequence
  Description of Artificial Sequence: Synthetic oligonucleotide
  Antisense strand to SEQ ID NO: 905796
uagacucgggacuucuugc

SEQ ID NO: 905798 - RNA, 19 nt, Artificial Sequence
  Description of Artificial Sequence: Synthetic oligonucleotide
  Sense strand starting at position 809 of SEQ ID NO: 589022
ucggaauggucuuccagaa

SEQ ID NO: 905799 - RNA, 19 nt, Artificial Sequence
  Description of Artificial Sequence: Synthetic oligonucleotide
  Antisense strand to SEQ ID NO: 905798
uucuggaagaccauuccga

SEQ ID NO: 905800 - RNA, 19 nt, Artificial Sequence
  Description of Artificial Sequence: Synthetic oligonucleotide
  Sense strand starting at position 1026 of SEQ ID NO: 589022
uccgcauucucauuuguaa

SEQ ID NO: 905801 - RNA, 19 nt, Artificial Sequence
  Description of Artificial Sequence: Synthetic oligonucleotide
  Antisense strand to SEQ ID NO: 905800
uuacaaaugagaaugcgga

SEQ ID NO: 905802 - RNA, 19 nt, Artificial Sequence
  Description of Artificial Sequence: Synthetic oligonucleotide
  Sense strand starting at position 1118 of SEQ ID NO: 589022
auaguaacugcuuaauaag

SEQ ID NO: 905803 - RNA, 19 nt, Artificial Sequence
  Description of Artificial Sequence: Synthetic oligonucleotide
  Antisense strand to SEQ ID NO: 905802
cuuauuaagcaguuacuau

SEQ ID NO: 905804 - RNA, 19 nt, Artificial Sequence
  Description of Artificial Sequence: Synthetic oligonucleotide
  Sense strand starting at position 1126 of SEQ ID NO: 589022
ugcuuaauaagagguaguu

SEQ ID NO: 905805 - RNA, 19 nt, Artificial Sequence
  Description of Artificial Sequence: Synthetic oligonucleotide
  Antisense strand to SEQ ID NO: 905804
aacuaccucuuauuaagca

SEQ ID NO: 905806 - RNA, 19 nt, Artificial Sequence
  Description of Artificial Sequence: Synthetic oligonucleotide
  Sense strand starting at position 1238 of SEQ ID NO: 589022
uuuccuaagcguuugcuga

SEQ ID NO: 905807 - RNA, 19 nt, Artificial Sequence
  Description of Artificial Sequence: Synthetic oligonucleotide
  Antisense strand to SEQ ID NO: 905806
ucagcaaacgcuuaggaaa

SEQ ID NO: 905808 - RNA, 19 nt, Artificial Sequence
  Description of Artificial Sequence: Synthetic oligonucleotide
  Sense strand starting at position 1513 of SEQ ID NO: 589022
cagagaaguggucaucuuu

SEQ ID NO: 905809 - RNA, 19 nt, Artificial Sequence
  Description of Artificial Sequence: Synthetic oligonucleotide
  Antisense strand to SEQ ID NO: 905808
aaagaugaccacuucucug

SEQ ID NO: 905810 - RNA, 19 nt, Artificial Sequence
  Description of Artificial Sequence: Synthetic oligonucleotide
  Sense strand starting at position 2238 of SEQ ID NO: 589022
cucggagucagaggaagau

SEQ ID NO: 905811 - RNA, 19 nt, Artificial Sequence
  Description of Artificial Sequence: Synthetic oligonucleotide
  Antisense strand to SEQ ID NO: 905810
aucuuccucugacuccgag

SEQ ID NO: 905812 - RNA, 19 nt, Artificial Sequence
  Description of Artificial Sequence: Synthetic oligonucleotide
  Sense strand starting at position 2259 of SEQ ID NO: 589022
gcaggacucagaggagguu

SEQ ID NO: 905813 - RNA, 19 nt, Artificial Sequence
  Description of Artificial Sequence: Synthetic oligonucleotide
  Antisense strand to SEQ ID NO: 905812
aaccuccucugaguccugc

SEQ ID NO: 905814 - RNA, 19 nt, Artificial Sequence
  Description of Artificial Sequence: Synthetic oligonucleotide
  Sense strand starting at position 2297 of SEQ ID NO: 589022
cucccauaggcuugguaaa

SEQ ID NO: 905815 - RNA, 19 nt, Artificial Sequence
  Description of Artificial Sequence: Synthetic oligonucleotide
  Antisense strand to SEQ ID NO: 905814
uuuaccaagccuaugggag

SEQ ID NO: 905816 - RNA, 19 nt, Artificial Sequence
  Description of Artificial Sequence: Synthetic oligonucleotide
  Sense strand starting at position 2299 of SEQ ID NO: 589022
cccauaggcuugguaaaga

SEQ ID NO: 905817 - RNA, 19 nt, Artificial Sequence
  Description of Artificial Sequence: Synthetic oligonucleotide
  Antisense strand to SEQ ID NO: 905816
ucuuuaccaagccuauggg

SEQ ID NO: 905818 - RNA, 19 nt, Artificial Sequence
  Description of Artificial Sequence: Synthetic oligonucleotide
  Sense strand starting at position 2457 of SEQ ID NO: 589022
gagagaugccuccgggaug

SEQ ID NO: 905819 - RNA, 19 nt, Artificial Sequence
  Description of Artificial Sequence: Synthetic oligonucleotide
  Antisense strand to SEQ ID NO: 905818
caucccggaggcaucucuc

SEQ ID NO: 905820 - RNA, 19 nt, Artificial Sequence
  Description of Artificial Sequence: Synthetic oligonucleotide
  Sense strand starting at position 2606 of SEQ ID NO: 589022
gggaaucacucagcuuaug

SEQ ID NO: 905821 - RNA, 19 nt, Artificial Sequence
  Description of Artificial Sequence: Synthetic oligonucleotide
  Antisense strand to SEQ ID NO: 905820
cauaagcugagugauuccc

SEQ ID NO: 905822 - RNA, 19 nt, Artificial Sequence
  Description of Artificial Sequence: Synthetic oligonucleotide
  Sense strand starting at position 2865 of SEQ ID NO: 589022
aauguuuaaccaggacaug

SEQ ID NO: 905823 - RNA, 19 nt, Artificial Sequence
  Description of Artificial Sequence: Synthetic oligonucleotide
  Antisense strand to SEQ ID NO: 905822
cauguccugguuaaacauu

SEQ ID NO: 905824 - RNA, 19 nt, Artificial Sequence
  Description of Artificial Sequence: Synthetic oligonucleotide
  Sense strand starting at position 2904 of SEQ ID NO: 589022
gggugugcuccagagauac

SEQ ID NO: 905825 - RNA, 19 nt, Artificial Sequence
  Description of Artificial Sequence: Synthetic oligonucleotide
  Antisense strand to SEQ ID NO: 905824
guaucucuggagcacaccc

SEQ ID NO: 905826 - RNA, 19 nt, Artificial Sequence
  Description of Artificial Sequence: Synthetic oligonucleotide
  Sense strand starting at position 2966 of SEQ ID NO: 589022
uugugaaaugcauaucgau

SEQ ID NO: 905827 - RNA, 19 nt, Artificial Sequence
  Description of Artificial Sequence: Synthetic oligonucleotide
  Antisense strand to SEQ ID NO: 905826
aucgauaugcauuucacaa

SEQ ID NO: 905828 - RNA, 19 nt, Artificial Sequence
  Description of Artificial Sequence: Synthetic oligonucleotide
  Sense strand starting at position 2976 of SEQ ID NO: 589022
cauaucgaucguuaagagu

SEQ ID NO: 905829 - RNA, 19 nt, Artificial Sequence
  Description of Artificial Sequence: Synthetic oligonucleotide
  Antisense strand to SEQ ID NO: 905828
acucuuaacgaucgauaug

SEQ ID NO: 905830 - RNA, 19 nt, Artificial Sequence
  Description of Artificial Sequence: Synthetic oligonucleotide
  Sense strand starting at position 3051 of SEQ ID NO: 589022
uccggaaaugaucaguguu

SEQ ID NO: 905831 - RNA, 19 nt, Artificial Sequence
  Description of Artificial Sequence: Synthetic oligonucleotide
  Antisense strand to SEQ ID NO: 905830
aacacugaucauuuccgga

SEQ ID NO: 905832 - RNA, 19 nt, Artificial Sequence
  Description of Artificial Sequence: Synthetic oligonucleotide
  Sense strand starting at position 3053 of SEQ ID NO: 589022
cggaaaugaucaguguuaa

SEQ ID NO: 905833 - RNA, 19 nt, Artificial Sequence
  Description of Artificial Sequence: Synthetic oligonucleotide
  Antisense strand to SEQ ID NO: 905832
uuaacacugaucauuuccg

SEQ ID NO: 905834 - RNA, 19 nt, Artificial Sequence
  Description of Artificial Sequence: Synthetic oligonucleotide
  Sense strand starting at position 3054 of SEQ ID NO: 589022
ggaaaugaucaguguuaac

SEQ ID NO: 905835 - RNA, 19 nt, Artificial Sequence
  Description of Artificial Sequence: Synthetic oligonucleotide
  Antisense strand to SEQ ID NO: 905834
guuaacacugaucauuucc

SEQ ID NO: 905836 - RNA, 19 nt, Artificial Sequence
  Description of Artificial Sequence: Synthetic oligonucleotide
  Sense strand starting at position 3096 of SEQ ID NO: 589022
ccaagaaugcacugguauu

SEQ ID NO: 905837 - RNA, 19 nt, Artificial Sequence
  Description of Artificial Sequence: Synthetic oligonucleotide
  Antisense strand to SEQ ID NO: 905836
aauaccagugcauucuugg

SEQ ID NO: 905838 - RNA, 19 nt, Artificial Sequence
  Description of Artificial Sequence: Synthetic oligonucleotide
  Sense strand starting at position 3167 of SEQ ID NO: 589022
gugaacaacuuucuaugua

SEQ ID NO: 905839 - RNA, 19 nt, Artificial Sequence
  Description of Artificial Sequence: Synthetic oligonucleotide
  Antisense strand to SEQ ID NO: 905838
uacauagaaaguuguucac

SEQ ID NO: 905840 - RNA, 19 nt, Artificial Sequence
  Description of Artificial Sequence: Synthetic oligonucleotide
  Sense strand starting at position 3262 of SEQ ID NO: 589022
ccuuaauggcugcauaaua

SEQ ID NO: 905841 - RNA, 19 nt, Artificial Sequence
  Description of Artificial Sequence: Synthetic oligonucleotide
  Antisense strand to SEQ ID NO: 905840
uauuaugcagccauuaagg

SEQ ID NO: 905842 - RNA, 19 nt, Artificial Sequence
  Description of Artificial Sequence: Synthetic oligonucleotide
  Sense strand starting at position 3285 of SEQ ID NO: 589022
accagauguguguauugua

SEQ ID NO: 905843 - RNA, 19 nt, Artificial Sequence
  Description of Artificial Sequence: Synthetic oligonucleotide
  Antisense strand to SEQ ID NO: 905842
uacaauacacacaucuggu

SEQ ID NO: 905844 - RNA, 19 nt, Artificial Sequence
  Description of Artificial Sequence: Synthetic oligonucleotide
  Sense strand starting at position 3326 of SEQ ID NO: 589022
uugggacauguaggugauu

SEQ ID NO: 905845 - RNA, 19 nt, Artificial Sequence
  Description of Artificial Sequence: Synthetic oligonucleotide
  Antisense strand to SEQ ID NO: 905844
aaucaccuacaugucccaa

SEQ ID NO: 905846 - RNA, 19 nt, Artificial Sequence
  Description of Artificial Sequence: Synthetic oligonucleotide
  Sense strand starting at position 3372 of SEQ ID NO: 589022
ugcaguggauauucucuua

SEQ ID NO: 905847 - RNA, 19 nt, Artificial Sequence
  Description of Artificial Sequence: Synthetic oligonucleotide
  Antisense strand to SEQ ID NO: 905846
uaagagaauauccacugca

SEQ ID NO: 905848 - RNA, 19 nt, Artificial Sequence
  Description of Artificial Sequence: Synthetic oligonucleotide
  Sense strand starting at position 3375 of SEQ ID NO: 589022
aguggauauucucuuaaau

SEQ ID NO: 905849 - RNA, 19 nt, Artificial Sequence
  Description of Artificial Sequence: Synthetic oligonucleotide
  Antisense strand to SEQ ID NO: 905848
auuuaagagaauauccacu

SEQ ID NO: 905850 - RNA, 19 nt, Artificial Sequence
  Description of Artificial Sequence: Synthetic oligonucleotide
  Sense strand starting at position 3405 of SEQ ID NO: 589022
ugcacuuuccaugaugaga

SEQ ID NO: 905851 - RNA, 19 nt, Artificial Sequence
  Description of Artificial Sequence: Synthetic oligonucleotide
  Antisense strand to SEQ ID NO: 905850
ucucaucauggaaagugca

SEQ ID NO: 905852 - RNA, 19 nt, Artificial Sequence
  Description of Artificial Sequence: Synthetic oligonucleotide
  Sense strand starting at position 3459 of SEQ ID NO: 589022
gccaaauggcuuuacagga

SEQ ID NO: 905853 - RNA, 19 nt, Artificial Sequence
  Description of Artificial Sequence: Synthetic oligonucleotide
  Antisense strand to SEQ ID NO: 905852
uccuguaaagccauuuggc

SEQ ID NO: 905854 - RNA, 19 nt, Artificial Sequence
  Description of Artificial Sequence: Synthetic oligonucleotide
  Sense strand starting at position 3632 of SEQ ID NO: 589022
cugagaggguuccuccuua

SEQ ID NO: 905855 - RNA, 19 nt, Artificial Sequence
  Description of Artificial Sequence: Synthetic oligonucleotide
  Antisense strand to SEQ ID NO: 905854
uaaggaggaacccucucag

SEQ ID NO: 905856 - RNA, 19 nt, Artificial Sequence
  Description of Artificial Sequence: Synthetic oligonucleotide
  Sense strand starting at position 3636 of SEQ ID NO: 589022
gaggguuccuccuuaucuc

SEQ ID NO: 905857 - RNA, 19 nt, Artificial Sequence
  Description of Artificial Sequence: Synthetic oligonucleotide
  Antisense strand to SEQ ID NO: 905856
gagauaaggaggaacccuc

SEQ ID NO: 905858 - RNA, 19 nt, Artificial Sequence
  Description of Artificial Sequence: Synthetic oligonucleotide
  Sense strand starting at position 3773 of SEQ ID NO: 589022
gucuucccugaguaguuau

SEQ ID NO: 905859 - RNA, 19 nt, Artificial Sequence
  Description of Artificial Sequence: Synthetic oligonucleotide
  Antisense strand to SEQ ID NO: 905858
auaacuacucagggaagac

SEQ ID NO: 905860 - RNA, 19 nt, Artificial Sequence
  Description of Artificial Sequence: Synthetic oligonucleotide
  Sense strand starting at position 3925 of SEQ ID NO: 589022
ggugguaugguggauauga

SEQ ID NO: 905861 - RNA, 19 nt, Artificial Sequence
  Description of Artificial Sequence: Synthetic oligonucleotide
  Antisense strand to SEQ ID NO: 905860
ucauauccaccauaccacc

SEQ ID NO: 905862 - RNA, 19 nt, Artificial Sequence
  Description of Artificial Sequence: Synthetic oligonucleotide
  Sense strand starting at position 3930 of SEQ ID NO: 589022
uaugguggauaugaagaaa

SEQ ID NO: 905863 - RNA, 19 nt, Artificial Sequence
  Description of Artificial Sequence: Synthetic oligonucleotide
  Antisense strand to SEQ ID NO: 905862
uuucuucauauccaccaua

SEQ ID NO: 905864 - RNA, 19 nt, Artificial Sequence
  Description of Artificial Sequence: Synthetic oligonucleotide
  Sense strand starting at position 3960 of SEQ ID NO: 589022
gggcaaagauaaguaaguu

SEQ ID NO: 905865 - RNA, 19 nt, Artificial Sequence
  Description of Artificial Sequence: Synthetic oligonucleotide
  Antisense strand to SEQ ID NO: 905864
aacuuacuuaucuuugccc

SEQ ID NO: 905866 - RNA, 19 nt, Artificial Sequence
  Description of Artificial Sequence: Synthetic oligonucleotide
  Sense strand starting at position 32 of SEQ ID NO: 589023
caggaagucucuggcuuga

SEQ ID NO: 905867 - RNA, 19 nt, Artificial Sequence
  Description of Artificial Sequence: Synthetic oligonucleotide
  Antisense strand to SEQ ID NO: 905866
ucaagccagagacuuccug

SEQ ID NO: 905868 - RNA, 19 nt, Artificial Sequence
  Description of Artificial Sequence: Synthetic oligonucleotide
  Sense strand starting at position 34 of SEQ ID NO: 589023
ggaagucucuggcuugaac

SEQ ID NO: 905869 - RNA, 19 nt, Artificial Sequence
  Description of Artificial Sequence: Synthetic oligonucleotide
  Antisense strand to SEQ ID NO: 905868
guucaagccagagacuucc

SEQ ID NO: 905870 - RNA, 19 nt, Artificial Sequence
  Description of Artificial Sequence: Synthetic oligonucleotide
  Sense strand starting at position 36 of SEQ ID NO: 589023
aagucucuggcuugaacuu

SEQ ID NO: 905871 - RNA, 19 nt, Artificial Sequence
  Description of Artificial Sequence: Synthetic oligonucleotide
  Antisense strand to SEQ ID NO: 905870
aaguucaagccagagacuu

SEQ ID NO: 905872 - RNA, 19 nt, Artificial Sequence
  Description of Artificial Sequence: Synthetic oligonucleotide
  Sense strand starting at position 249 of SEQ ID NO: 589023
gggaauccugcccgagcaa

SEQ ID NO: 905873 - RNA, 19 nt, Artificial Sequence
  Description of Artificial Sequence: Synthetic oligonucleotide
  Antisense strand to SEQ ID NO: 905872
uugcucgggcaggauuccc

SEQ ID NO: 905874 - RNA, 19 nt, Artificial Sequence
  Description of Artificial Sequence: Synthetic oligonucleotide
  Sense strand starting at position 475 of SEQ ID NO: 589023
cugacauccugcgggaaga

SEQ ID NO: 905875 - RNA, 19 nt, Artificial Sequence
  Description of Artificial Sequence: Synthetic oligonucleotide
  Antisense strand to SEQ ID NO: 905874
ucuucccgcaggaugucag

SEQ ID NO: 905876 - RNA, 19 nt, Artificial Sequence
  Description of Artificial Sequence: Synthetic oligonucleotide
  Sense strand starting at position 543 of SEQ ID NO: 589023
ggcagugcuggguaaucau

SEQ ID NO: 905877 - RNA, 19 nt, Artificial Sequence
  Description of Artificial Sequence: Synthetic oligonucleotide
  Antisense strand to SEQ ID NO: 905876
augauuacccagcacugcc

SEQ ID NO: 905878 - RNA, 19 nt, Artificial Sequence
  Description of Artificial Sequence: Synthetic oligonucleotide
  Sense strand starting at position 557 of SEQ ID NO: 589023
aucauuacccagugggaag

SEQ ID NO: 905879 - RNA, 19 nt, Artificial Sequence
  Description of Artificial Sequence: Synthetic oligonucleotide
  Antisense strand to SEQ ID NO: 905878
cuucccacuggguaaugau

SEQ ID NO: 905880 - RNA, 19 nt, Artificial Sequence
  Description of Artificial Sequence: Synthetic oligonucleotide
  Sense strand starting at position 750 of SEQ ID NO: 589023
ggugaauggucccucucca

SEQ ID NO: 905881 - RNA, 19 nt, Artificial Sequence
  Description of Artificial Sequence: Synthetic oligonucleotide
  Antisense strand to SEQ ID NO: 905880
uggagagggaccauucacc

SEQ ID NO: 905882 - RNA, 19 nt, Artificial Sequence
  Description of Artificial Sequence: Synthetic oligonucleotide
  Sense strand starting at position 883 of SEQ ID NO: 589023
agcugcucccgguaaggau

SEQ ID NO: 905883 - RNA, 19 nt, Artificial Sequence
  Description of Artificial Sequence: Synthetic oligonucleotide
  Antisense strand to SEQ ID NO: 905882
auccuuaccgggagcagcu

SEQ ID NO: 905884 - RNA, 19 nt, Artificial Sequence
  Description of Artificial Sequence: Synthetic oligonucleotide
  Sense strand starting at position 931 of SEQ ID NO: 589023
ccucgauucucucaagucu

SEQ ID NO: 905885 - RNA, 19 nt, Artificial Sequence
  Description of Artificial Sequence: Synthetic oligonucleotide
  Antisense strand to SEQ ID NO: 905884
agacuugagagaaucgagg

SEQ ID NO: 905886 - RNA, 19 nt, Artificial Sequence
  Description of Artificial Sequence: Synthetic oligonucleotide
  Sense strand starting at position 940 of SEQ ID NO: 589023
ucucaagucuuagccaagu

SEQ ID NO: 905887 - RNA, 19 nt, Artificial Sequence
  Description of Artificial Sequence: Synthetic oligonucleotide
  Antisense strand to SEQ ID NO: 905886
acuuggcuaagacuugaga

SEQ ID NO: 905888 - RNA, 19 nt, Artificial Sequence
  Description of Artificial Sequence: Synthetic oligonucleotide
  Sense strand starting at position 1771 of SEQ ID NO: 589023
aguugauguccuugagguc

SEQ ID NO: 905889 - RNA, 19 nt, Artificial Sequence
  Description of Artificial Sequence: Synthetic oligonucleotide
  Antisense strand to SEQ ID NO: 905888
gaccucaaggacaucaacu

SEQ ID NO: 905890 - RNA, 19 nt, Artificial Sequence
  Description of Artificial Sequence: Synthetic oligonucleotide
  Sense strand starting at position 1774 of SEQ ID NO: 589023
ugauguccuugaggucgau

SEQ ID NO: 905891 - RNA, 19 nt, Artificial Sequence
  Description of Artificial Sequence: Synthetic oligonucleotide
  Antisense strand to SEQ ID NO: 905890
aucgaccucaaggacauca

SEQ ID NO: 905892 - RNA, 19 nt, Artificial Sequence
  Description of Artificial Sequence: Synthetic oligonucleotide
  Sense strand starting at position 3089 of SEQ ID NO: 589023
ggcggaaugcgugacauga

SEQ ID NO: 905893 - RNA, 19 nt, Artificial Sequence
  Description of Artificial Sequence: Synthetic oligonucleotide
  Antisense strand to SEQ ID NO: 905892
ucaugucacgcauuccgcc

SEQ ID NO: 905894 - RNA, 19 nt, Artificial Sequence
  Description of Artificial Sequence: Synthetic oligonucleotide
  Sense strand starting at position 3091 of SEQ ID NO: 589023
cggaaugcgugacaugagu

SEQ ID NO: 905895 - RNA, 19 nt, Artificial Sequence
  Description of Artificial Sequence: Synthetic oligonucleotide
  Antisense strand to SEQ ID NO: 905894
acucaugucacgcauuccg

SEQ ID NO: 905896 - RNA, 19 nt, Artificial Sequence
  Description of Artificial Sequence: Synthetic oligonucleotide
  Sense strand starting at position 3093 of SEQ ID NO: 589023
gaaugcgugacaugaguga

SEQ ID NO: 905897 - RNA, 19 nt, Artificial Sequence
  Description of Artificial Sequence: Synthetic oligonucleotide
  Antisense strand to SEQ ID NO: 905896
ucacucaugucacgcauuc

SEQ ID NO: 905898 - RNA, 19 nt, Artificial Sequence
  Description of Artificial Sequence: Synthetic oligonucleotide
  Sense strand starting at position 3271 of SEQ ID NO: 589023
cugaaauuauauggauccu

SEQ ID NO: 905899 - RNA, 19 nt, Artificial Sequence
  Description of Artificial Sequence: Synthetic oligonucleotide
  Antisense strand to SEQ ID NO: 905898
aggauccauauaauuucag

SEQ ID NO: 905900 - RNA, 19 nt, Artificial Sequence
  Description of Artificial Sequence: Synthetic oligonucleotide
  Sense strand starting at position 3424 of SEQ ID NO: 589023
gguggaauccugggccugu

SEQ ID NO: 905901 - RNA, 19 nt, Artificial Sequence
  Description of Artificial Sequence: Synthetic oligonucleotide
  Antisense strand to SEQ ID NO: 905900
acaggcccaggauuccacc

SEQ ID NO: 905902 - RNA, 19 nt, Artificial Sequence
  Description of Artificial Sequence: Synthetic oligonucleotide
  Sense strand starting at position 3425 of SEQ ID NO: 589023
guggaauccugggccugua

SEQ ID NO: 905903 - RNA, 19 nt, Artificial Sequence
  Description of Artificial Sequence: Synthetic oligonucleotide
  Antisense strand to SEQ ID NO: 905902
uacaggcccaggauuccac

SEQ ID NO: 905904 - RNA, 19 nt, Artificial Sequence
  Description of Artificial Sequence: Synthetic oligonucleotide
  Sense strand starting at position 3428 of SEQ ID NO: 589023
gaauccugggccuguauga

SEQ ID NO: 905905 - RNA, 19 nt, Artificial Sequence
  Description of Artificial Sequence: Synthetic oligonucleotide
  Antisense strand to SEQ ID NO: 905904
ucauacaggcccaggauuc

SEQ ID NO: 905906 - RNA, 19 nt, Artificial Sequence
  Description of Artificial Sequence: Synthetic oligonucleotide
  Sense strand starting at position 3559 of SEQ ID NO: 589023
ggguccuguccuggaaauu

SEQ ID NO: 905907 - RNA, 19 nt, Artificial Sequence
  Description of Artificial Sequence: Synthetic oligonucleotide
  Antisense strand to SEQ ID NO: 905906
aauuuccaggacaggaccc

SEQ ID NO: 905908 - RNA, 19 nt, Artificial Sequence
  Description of Artificial Sequence: Synthetic oligonucleotide
  Sense strand starting at position 3560 of SEQ ID NO: 589023
gguccuguccuggaaauug

SEQ ID NO: 905909 - RNA, 19 nt, Artificial Sequence
  Description of Artificial Sequence: Synthetic oligonucleotide
  Antisense strand to SEQ ID NO: 905908
caauuuccaggacaggacc

SEQ ID NO: 905910 - RNA, 19 nt, Artificial Sequence
  Description of Artificial Sequence: Synthetic oligonucleotide
  Sense strand starting at position 3571 of SEQ ID NO: 589023
ggaaauuggucucugcaga

SEQ ID NO: 905911 - RNA, 19 nt, Artificial Sequence
  Description of Artificial Sequence: Synthetic oligonucleotide
  Antisense strand to SEQ ID NO: 905910
ucugcagagaccaauuucc

SEQ ID NO: 905912 - RNA, 19 nt, Artificial Sequence
  Description of Artificial Sequence: Synthetic oligonucleotide
  Sense strand starting at position 3572 of SEQ ID NO: 589023
gaaauuggucucugcagag

SEQ ID NO: 905913 - RNA, 19 nt, Artificial Sequence
  Description of Artificial Sequence: Synthetic oligonucleotide
  Antisense strand to SEQ ID NO: 905912
cucugcagagaccaauuuc

SEQ ID NO: 905914 - RNA, 19 nt, Artificial Sequence
  Description of Artificial Sequence: Synthetic oligonucleotide
  Sense strand starting at position 3779 of SEQ ID NO: 589023
gagagcuuuccucaccgaa

SEQ ID NO: 905915 - RNA, 19 nt, Artificial Sequence
  Description of Artificial Sequence: Synthetic oligonucleotide
  Antisense strand to SEQ ID NO: 905914
uucggugaggaaagcucuc

SEQ ID NO: 905916 - RNA, 19 nt, Artificial Sequence
  Description of Artificial Sequence: Synthetic oligonucleotide
  Sense strand starting at position 3962 of SEQ ID NO: 589023
acuggacuugcuugugaag

SEQ ID NO: 905917 - RNA, 19 nt, Artificial Sequence
  Description of Artificial Sequence: Synthetic oligonucleotide
  Antisense strand to SEQ ID NO: 905916
cuucacaagcaaguccagu

SEQ ID NO: 905918 - RNA, 19 nt, Artificial Sequence
  Description of Artificial Sequence: Synthetic oligonucleotide
  Sense strand starting at position 3964 of SEQ ID NO: 589023
uggacuugcuugugaagaa

SEQ ID NO: 905919 - RNA, 19 nt, Artificial Sequence
  Description of Artificial Sequence: Synthetic oligonucleotide
  Antisense strand to SEQ ID NO: 905918
uucuucacaagcaagucca

SEQ ID NO: 905920 - RNA, 19 nt, Artificial Sequence
  Description of Artificial Sequence: Synthetic oligonucleotide
  Sense strand starting at position 3965 of SEQ ID NO: 589023
ggacuugcuugugaagaau

SEQ ID NO: 905921 - RNA, 19 nt, Artificial Sequence
  Description of Artificial Sequence: Synthetic oligonucleotide
  Antisense strand to SEQ ID NO: 905920
auucuucacaagcaagucc

SEQ ID NO: 905922 - RNA, 19 nt, Artificial Sequence
  Description of Artificial Sequence: Synthetic oligonucleotide
  Sense strand starting at position 3968 of SEQ ID NO: 589023
cuugcuugugaagaaugga

SEQ ID NO: 905923 - RNA, 19 nt, Artificial Sequence
  Description of Artificial Sequence: Synthetic oligonucleotide
  Antisense strand to SEQ ID NO: 905922
uccauucuucacaagcaag

SEQ ID NO: 905924 - RNA, 19 nt, Artificial Sequence
  Description of Artificial Sequence: Synthetic oligonucleotide
  Sense strand starting at position 57 of SEQ ID NO: 589024
ggacucuggcucuggagau

SEQ ID NO: 905925 - RNA, 19 nt, Artificial Sequence
  Description of Artificial Sequence: Synthetic oligonucleotide
  Antisense strand to SEQ ID NO: 905924
aucuccagagccagagucc

SEQ ID NO: 905926 - RNA, 19 nt, Artificial Sequence
  Description of Artificial Sequence: Synthetic oligonucleotide
  Sense strand starting at position 72 of SEQ ID NO: 589024
agaugagugguaugcccuu

SEQ ID NO: 905927 - RNA, 19 nt, Artificial Sequence
  Description of Artificial Sequence: Synthetic oligonucleotide
  Antisense strand to SEQ ID NO: 905926
aagggcauaccacucaucu

SEQ ID NO: 905928 - RNA, 19 nt, Artificial Sequence
  Description of Artificial Sequence: Synthetic oligonucleotide
  Sense strand starting at position 128 of SEQ ID NO: 589024
ugagaucagaugugguaau

SEQ ID NO: 905929 - RNA, 19 nt, Artificial Sequence
  Description of Artificial Sequence: Synthetic oligonucleotide
  Antisense strand to SEQ ID NO: 905928
auuaccacaucugaucuca

SEQ ID NO: 905930 - RNA, 19 nt, Artificial Sequence
  Description of Artificial Sequence: Synthetic oligonucleotide
  Sense strand starting at position 218 of SEQ ID NO: 589024
uugucuucuguauaaguca

SEQ ID NO: 905931 - RNA, 19 nt, Artificial Sequence
  Description of Artificial Sequence: Synthetic oligonucleotide
  Antisense strand to SEQ ID NO: 905930
ugacuuauacagaagacaa

SEQ ID NO: 905932 - RNA, 19 nt, Artificial Sequence
  Description of Artificial Sequence: Synthetic oligonucleotide
  Sense strand starting at position 287 of SEQ ID NO: 589024
agcuaagagucaucaaggu

SEQ ID NO: 905933 - RNA, 19 nt, Artificial Sequence
  Description of Artificial Sequence: Synthetic oligonucleotide
  Antisense strand to SEQ ID NO: 905932
accuugaugacucuuagcu

SEQ ID NO: 905934 - RNA, 19 nt, Artificial Sequence
  Description of Artificial Sequence: Synthetic oligonucleotide
  Sense strand starting at position 439 of SEQ ID NO: 589024
ugaguaauacuuuauccga

SEQ ID NO: 905935 - RNA, 19 nt, Artificial Sequence
  Description of Artificial Sequence: Synthetic oligonucleotide
  Antisense strand to SEQ ID NO: 905934
ucggauaaaguauuacuca

SEQ ID NO: 905936 - RNA, 19 nt, Artificial Sequence
  Description of Artificial Sequence: Synthetic oligonucleotide
  Sense strand starting at position 441 of SEQ ID NO: 589024
aguaauacuuuauccgaau

SEQ ID NO: 905937 - RNA, 19 nt, Artificial Sequence
  Description of Artificial Sequence: Synthetic oligonucleotide
  Antisense strand to SEQ ID NO: 905936
auucggauaaaguauuacu

SEQ ID NO: 905938 - RNA, 19 nt, Artificial Sequence
  Description of Artificial Sequence: Synthetic oligonucleotide
  Sense strand starting at position 442 of SEQ ID NO: 589024
guaauacuuuauccgaauu

SEQ ID NO: 905939 - RNA, 19 nt, Artificial Sequence
  Description of Artificial Sequence: Synthetic oligonucleotide
  Antisense strand to SEQ ID NO: 905938
aauucggauaaaguauuac

SEQ ID NO: 905940 - RNA, 19 nt, Artificial Sequence
  Description of Artificial Sequence: Synthetic oligonucleotide
  Sense strand starting at position 514 of SEQ ID NO: 589024
gaagguaauuugcauagag

SEQ ID NO: 905941 - RNA, 19 nt, Artificial Sequence
  Description of Artificial Sequence: Synthetic oligonucleotide
  Antisense strand to SEQ ID NO: 905940
cucuaugcaaauuaccuuc

SEQ ID NO: 905942 - RNA, 19 nt, Artificial Sequence
  Description of Artificial Sequence: Synthetic oligonucleotide
  Sense strand starting at position 526 of SEQ ID NO: 589024
cauagaguuuccuugggcu

SEQ ID NO: 905943 - RNA, 19 nt, Artificial Sequence
  Description of Artificial Sequence: Synthetic oligonucleotide
  Antisense strand to SEQ ID NO: 905942
agcccaaggaaacucuaug

SEQ ID NO: 905944 - RNA, 19 nt, Artificial Sequence
  Description of Artificial Sequence: Synthetic oligonucleotide
  Sense strand starting at position 604 of SEQ ID NO: 589024
aauugaaugggcugaggua

SEQ ID NO: 905945 - RNA, 19 nt, Artificial Sequence
  Description of Artificial Sequence: Synthetic oligonucleotide
  Antisense strand to SEQ ID NO: 905944
uaccucagcccauucaauu

SEQ ID NO: 905946 - RNA, 19 nt, Artificial Sequence
  Description of Artificial Sequence: Synthetic oligonucleotide
  Sense strand starting at position 613 of SEQ ID NO: 589024
ggcugagguagccaaguuu

SEQ ID NO: 905947 - RNA, 19 nt, Artificial Sequence
  Description of Artificial Sequence: Synthetic oligonucleotide
  Antisense strand to SEQ ID NO: 905946
aaacuuggcuaccucagcc

SEQ ID NO: 905948 - RNA, 19 nt, Artificial Sequence
  Description of Artificial Sequence: Synthetic oligonucleotide
  Sense strand starting at position 682 of SEQ ID NO: 589024
cggguaauuucucaauaua

SEQ ID NO: 905949 - RNA, 19 nt, Artificial Sequence
  Description of Artificial Sequence: Synthetic oligonucleotide
  Antisense strand to SEQ ID NO: 905948
uauauugagaaauuacccg

SEQ ID NO: 905950 - RNA, 19 nt, Artificial Sequence
  Description of Artificial Sequence: Synthetic oligonucleotide
  Sense strand starting at position 896 of SEQ ID NO: 589024
ggcucaaacuuucuaguau

SEQ ID NO: 905951 - RNA, 19 nt, Artificial Sequence
  Description of Artificial Sequence: Synthetic oligonucleotide
  Antisense strand to SEQ ID NO: 905950
auacuagaaaguuugagcc

SEQ ID NO: 905952 - RNA, 19 nt, Artificial Sequence
  Description of Artificial Sequence: Synthetic oligonucleotide
  Sense strand starting at position 1887 of SEQ ID NO: 589024
ccgagaagagccgaaucau

SEQ ID NO: 905953 - RNA, 19 nt, Artificial Sequence
  Description of Artificial Sequence: Synthetic oligonucleotide
  Antisense strand to SEQ ID NO: 905952
augauucggcucuucucgg

SEQ ID NO: 905954 - RNA, 19 nt, Artificial Sequence
  Description of Artificial Sequence: Synthetic oligonucleotide
  Sense strand starting at position 2104 of SEQ ID NO: 589024
uuggaauucucagccaauc

SEQ ID NO: 905955 - RNA, 19 nt, Artificial Sequence
  Description of Artificial Sequence: Synthetic oligonucleotide
  Antisense strand to SEQ ID NO: 905954
gauuggcugagaauuccaa

SEQ ID NO: 905956 - RNA, 19 nt, Artificial Sequence
  Description of Artificial Sequence: Synthetic oligonucleotide
  Sense strand starting at position 2130 of SEQ ID NO: 589024
ggaauagggcgagaucgau

SEQ ID NO: 905957 - RNA, 19 nt, Artificial Sequence
  Description of Artificial Sequence: Synthetic oligonucleotide
  Antisense strand to SEQ ID NO: 905956
aucgaucucgcccuauucc

SEQ ID NO: 905958 - RNA, 19 nt, Artificial Sequence
  Description of Artificial Sequence: Synthetic oligonucleotide
  Sense strand starting at position 2139 of SEQ ID NO: 589024
cgagaucgauuagugaaag

SEQ ID NO: 905959 - RNA, 19 nt, Artificial Sequence
  Description of Artificial Sequence: Synthetic oligonucleotide
  Antisense strand to SEQ ID NO: 905958
cuuucacuaaucgaucucg

SEQ ID NO: 905960 - RNA, 19 nt, Artificial Sequence
  Description of Artificial Sequence: Synthetic oligonucleotide
  Sense strand starting at position 2215 of SEQ ID NO: 589024
cggaguuuauccuccugga

SEQ ID NO: 905961 - RNA, 19 nt, Artificial Sequence
  Description of Artificial Sequence: Synthetic oligonucleotide
  Antisense strand to SEQ ID NO: 905960
uccaggaggauaaacuccg

SEQ ID NO: 905962 - RNA, 19 nt, Artificial Sequence
  Description of Artificial Sequence: Synthetic oligonucleotide
  Sense strand starting at position 2681 of SEQ ID NO: 589024
uggugauaugcugacucaa

SEQ ID NO: 905963 - RNA, 19 nt, Artificial Sequence
  Description of Artificial Sequence: Synthetic oligonucleotide
  Antisense strand to SEQ ID NO: 905962
uugagucagcauaucacca

SEQ ID NO: 905964 - RNA, 19 nt, Artificial Sequence
  Description of Artificial Sequence: Synthetic oligonucleotide
  Sense strand starting at position 2683 of SEQ ID NO: 589024
gugauaugcugacucaauu

SEQ ID NO: 905965 - RNA, 19 nt, Artificial Sequence
  Description of Artificial Sequence: Synthetic oligonucleotide
  Antisense strand to SEQ ID NO: 905964
aauugagucagcauaucac

SEQ ID NO: 905966 - RNA, 19 nt, Artificial Sequence
  Description of Artificial Sequence: Synthetic oligonucleotide
  Sense strand starting at position 2729 of SEQ ID NO: 589024
acauuugacuaagacgagu

SEQ ID NO: 905967 - RNA, 19 nt, Artificial Sequence
  Description of Artificial Sequence: Synthetic oligonucleotide
  Antisense strand to SEQ ID NO: 905966
acucgucuuagucaaaugu

SEQ ID NO: 905968 - RNA, 19 nt, Artificial Sequence
  Description of Artificial Sequence: Synthetic oligonucleotide
  Sense strand starting at position 2796 of SEQ ID NO: 589024
gagaaaccugccugucucu

SEQ ID NO: 905969 - RNA, 19 nt, Artificial Sequence
  Description of Artificial Sequence: Synthetic oligonucleotide
  Antisense strand to SEQ ID NO: 905968
agagacaggcagguuucuc

SEQ ID NO: 905970 - RNA, 19 nt, Artificial Sequence
  Description of Artificial Sequence: Synthetic oligonucleotide
  Sense strand starting at position 2917 of SEQ ID NO: 589024
aggcaaugugaaggacuaa

SEQ ID NO: 905971 - RNA, 19 nt, Artificial Sequence
  Description of Artificial Sequence: Synthetic oligonucleotide
  Antisense strand to SEQ ID NO: 905970
uuaguccuucacauugccu

SEQ ID NO: 905972 - RNA, 19 nt, Artificial Sequence
  Description of Artificial Sequence: Synthetic oligonucleotide
  Sense strand starting at position 2953 of SEQ ID NO: 589024
ugaggauuccuguagcccu

SEQ ID NO: 905973 - RNA, 19 nt, Artificial Sequence
  Description of Artificial Sequence: Synthetic oligonucleotide
  Antisense strand to SEQ ID NO: 905972
agggcuacaggaauccuca

SEQ ID NO: 905974 - RNA, 19 nt, Artificial Sequence
  Description of Artificial Sequence: Synthetic oligonucleotide
  Sense strand starting at position 3080 of SEQ ID NO: 589024
guaguaggcagacgagaua

SEQ ID NO: 905975 - RNA, 19 nt, Artificial Sequence
  Description of Artificial Sequence: Synthetic oligonucleotide
  Antisense strand to SEQ ID NO: 905974
uaucucgucugccuacuac

SEQ ID NO: 905976 - RNA, 19 nt, Artificial Sequence
  Description of Artificial Sequence: Synthetic oligonucleotide
  Sense strand starting at position 3153 of SEQ ID NO: 589024
gagcaaagucaaugacuug

SEQ ID NO: 905977 - RNA, 19 nt, Artificial Sequence
  Description of Artificial Sequence: Synthetic oligonucleotide
  Antisense strand to SEQ ID NO: 905976
caagucauugacuuugcuc

SEQ ID NO: 905978 - RNA, 19 nt, Artificial Sequence
  Description of Artificial Sequence: Synthetic oligonucleotide
  Sense strand starting at position 3171 of SEQ ID NO: 589024
ggugguggcagagauuguu

SEQ ID NO: 905979 - RNA, 19 nt, Artificial Sequence
  Description of Artificial Sequence: Synthetic oligonucleotide
  Antisense strand to SEQ ID NO: 905978
aacaaucucugccaccacc

SEQ ID NO: 905980 - RNA, 19 nt, Artificial Sequence
  Description of Artificial Sequence: Synthetic oligonucleotide
  Sense strand starting at position 3246 of SEQ ID NO: 589024
cucaccaguccaggaauua

SEQ ID NO: 905981 - RNA, 19 nt, Artificial Sequence
  Description of Artificial Sequence: Synthetic oligonucleotide
  Antisense strand to SEQ ID NO: 905980
uaauuccuggacuggugag

SEQ ID NO: 905982 - RNA, 19 nt, Artificial Sequence
  Description of Artificial Sequence: Synthetic oligonucleotide
  Sense strand starting at position 3272 of SEQ ID NO: 589024
auggucacauuccuaauga

SEQ ID NO: 905983 - RNA, 19 nt, Artificial Sequence
  Description of Artificial Sequence: Synthetic oligonucleotide
  Antisense strand to SEQ ID NO: 905982
ucauuaggaaugugaccau

SEQ ID NO: 905984 - RNA, 19 nt, Artificial Sequence
  Description of Artificial Sequence: Synthetic oligonucleotide
  Sense strand starting at position 3372 of SEQ ID NO: 589024
gucacaagacuuuggcaga

SEQ ID NO: 905985 - RNA, 19 nt, Artificial Sequence
  Description of Artificial Sequence: Synthetic oligonucleotide
  Antisense strand to SEQ ID NO: 905984
ucugccaaagucuugugac

SEQ ID NO: 905986 - RNA, 19 nt, Artificial Sequence
  Description of Artificial Sequence: Synthetic oligonucleotide
  Sense strand starting at position 3443 of SEQ ID NO: 589024
ucaaauagcuuucuaggua

SEQ ID NO: 905987 - RNA, 19 nt, Artificial Sequence
  Description of Artificial Sequence: Synthetic oligonucleotide
  Antisense strand to SEQ ID NO: 905986
uaccuagaaagcuauuuga

SEQ ID NO: 905988 - RNA, 19 nt, Artificial Sequence
  Description of Artificial Sequence: Synthetic oligonucleotide
  Sense strand starting at position 3493 of SEQ ID NO: 589024
gaugccuaagggugaaaga

SEQ ID NO: 905989 - RNA, 19 nt, Artificial Sequence
  Description of Artificial Sequence: Synthetic oligonucleotide
  Antisense strand to SEQ ID NO: 905988
ucuuucacccuuaggcauc

SEQ ID NO: 905990 - RNA, 19 nt, Artificial Sequence
  Description of Artificial Sequence: Synthetic oligonucleotide
  Sense strand starting at position 3502 of SEQ ID NO: 589024
gggugaaagauuggcagaa

SEQ ID NO: 905991 - RNA, 19 nt, Artificial Sequence
  Description of Artificial Sequence: Synthetic oligonucleotide
  Antisense strand to SEQ ID NO: 905990
uucugccaaucuuucaccc

SEQ ID NO: 905992 - RNA, 19 nt, Artificial Sequence
  Description of Artificial Sequence: Synthetic oligonucleotide
  Sense strand starting at position 3717 of SEQ ID NO: 589024
gagucugaagcaggugaaa

SEQ ID NO: 905993 - RNA, 19 nt, Artificial Sequence
  Description of Artificial Sequence: Synthetic oligonucleotide
  Antisense strand to SEQ ID NO: 905992
uuucaccugcuucagacuc

SEQ ID NO: 905994 - RNA, 19 nt, Artificial Sequence
  Description of Artificial Sequence: Synthetic oligonucleotide
  Sense strand starting at position 3719 of SEQ ID NO: 589024
gucugaagcaggugaaagu

SEQ ID NO: 905995 - RNA, 19 nt, Artificial Sequence
  Description of Artificial Sequence: Synthetic oligonucleotide
  Antisense strand to SEQ ID NO: 905994
acuuucaccugcuucagac

SEQ ID NO: 905996 - RNA, 19 nt, Artificial Sequence
  Description of Artificial Sequence: Synthetic oligonucleotide
  Sense strand starting at position 3732 of SEQ ID NO: 589024
gaaaguaagugucucgauu

SEQ ID NO: 905997 - RNA, 19 nt, Artificial Sequence
  Description of Artificial Sequence: Synthetic oligonucleotide
  Antisense strand to SEQ ID NO: 905996
aaucgagacacuuacuuuc

SEQ ID NO: 905998 - RNA, 19 nt, Artificial Sequence
  Description of Artificial Sequence: Synthetic oligonucleotide
  Sense strand starting at position 3842 of SEQ ID NO: 589024
ggaaguaucuugccuacac

SEQ ID NO: 905999 - RNA, 19 nt, Artificial Sequence
  Description of Artificial Sequence: Synthetic oligonucleotide
  Antisense strand to SEQ ID NO: 905998
guguaggcaagauacuucc

SEQ ID NO: 906000 - RNA, 19 nt, Artificial Sequence
  Description of Artificial Sequence: Synthetic oligonucleotide
  Sense strand starting at position 3958 of SEQ ID NO: 589024
uggucuuugugucugagga

SEQ ID NO: 906001 - RNA, 19 nt, Artificial Sequence
  Description of Artificial Sequence: Synthetic oligonucleotide
  Antisense strand to SEQ ID NO: 906000
uccucagacacaaagacca

SEQ ID NO: 906002 - RNA, 19 nt, Artificial Sequence
  Description of Artificial Sequence: Synthetic oligonucleotide
  Sense strand starting at position 3959 of SEQ ID NO: 589024
ggucuuugugucugaggau

SEQ ID NO: 906003 - RNA, 19 nt, Artificial Sequence
  Description of Artificial Sequence: Synthetic oligonucleotide
  Antisense strand to SEQ ID NO: 906002
auccucagacacaaagacc

SEQ ID NO: 906004 - RNA, 19 nt, Artificial Sequence
  Description of Artificial Sequence: Synthetic oligonucleotide
  Sense strand starting at position 18 of SEQ ID NO: 589025
gaaggcauuugagagaaca

SEQ ID NO: 906005 - RNA, 19 nt, Artificial Sequence
  Description of Artificial Sequence: Synthetic oligonucleotide
  Antisense strand to SEQ ID NO: 906004
uguucucucaaaugccuuc

SEQ ID NO: 906006 - RNA, 19 nt, Artificial Sequence
  Description of Artificial Sequence: Synthetic oligonucleotide
  Sense strand starting at position 28 of SEQ ID NO: 589025
gagagaacagcccguaaga

SEQ ID NO: 906007 - RNA, 19 nt, Artificial Sequence
  Description of Artificial Sequence: Synthetic oligonucleotide
  Antisense strand to SEQ ID NO: 906006
ucuuacgggcuguucucuc

SEQ ID NO: 906008 - RNA, 19 nt, Artificial Sequence
  Description of Artificial Sequence: Synthetic oligonucleotide
  Sense strand starting at position 53 of SEQ ID NO: 589025
ggagucuccuacuuuccau

SEQ ID NO: 906009 - RNA, 19 nt, Artificial Sequence
  Description of Artificial Sequence: Synthetic oligonucleotide
  Antisense strand to SEQ ID NO: 906008
auggaaaguaggagacucc

SEQ ID NO: 906010 - RNA, 19 nt, Artificial Sequence
  Description of Artificial Sequence: Synthetic oligonucleotide
  Sense strand starting at position 470 of SEQ ID NO: 589025
ccgacugaguccucucaga

SEQ ID NO: 906011 - RNA, 19 nt, Artificial Sequence
  Description of Artificial Sequence: Synthetic oligonucleotide
  Antisense strand to SEQ ID NO: 906010
ucugagaggacucagucgg

SEQ ID NO: 906012 - RNA, 19 nt, Artificial Sequence
  Description of Artificial Sequence: Synthetic oligonucleotide
  Sense strand starting at position 658 of SEQ ID NO: 589025
ugagcuauuguguagaaug

SEQ ID NO: 906013 - RNA, 19 nt, Artificial Sequence
  Description of Artificial Sequence: Synthetic oligonucleotide
  Antisense strand to SEQ ID NO: 906012
cauucuacacaauagcuca

SEQ ID NO: 906014 - RNA, 19 nt, Artificial Sequence
  Description of Artificial Sequence: Synthetic oligonucleotide
  Sense strand starting at position 660 of SEQ ID NO: 589025
agcuauuguguagaaugaa

SEQ ID NO: 906015 - RNA, 19 nt, Artificial Sequence
  Description of Artificial Sequence: Synthetic oligonucleotide
  Antisense strand to SEQ ID NO: 906014
uucauucuacacaauagcu

SEQ ID NO: 906016 - RNA, 19 nt, Artificial Sequence
  Description of Artificial Sequence: Synthetic oligonucleotide
  Sense strand starting at position 718 of SEQ ID NO: 589025
gaggaaacgucaccgggaa

SEQ ID NO: 906017 - RNA, 19 nt, Artificial Sequence
  Description of Artificial Sequence: Synthetic oligonucleotide
  Antisense strand to SEQ ID NO: 906016
uucccggugacguuuccuc

SEQ ID NO: 906018 - RNA, 19 nt, Artificial Sequence
  Description of Artificial Sequence: Synthetic oligonucleotide
  Sense strand starting at position 2369 of SEQ ID NO: 589025
cccuacagucauuacugua

SEQ ID NO: 906019 - RNA, 19 nt, Artificial Sequence
  Description of Artificial Sequence: Synthetic oligonucleotide
  Antisense strand to SEQ ID NO: 906018
uacaguaaugacuguaggg

SEQ ID NO: 906020 - RNA, 19 nt, Artificial Sequence
  Description of Artificial Sequence: Synthetic oligonucleotide
  Sense strand starting at position 2705 of SEQ ID NO: 589025
cuaaaugugucuuuaagug

SEQ ID NO: 906021 - RNA, 19 nt, Artificial Sequence
  Description of Artificial Sequence: Synthetic oligonucleotide
  Antisense strand to SEQ ID NO: 906020
cacuuaaagacacauuuag

SEQ ID NO: 906022 - RNA, 19 nt, Artificial Sequence
  Description of Artificial Sequence: Synthetic oligonucleotide
  Sense strand starting at position 2710 of SEQ ID NO: 589025
ugugucuuuaagugagaga

SEQ ID NO: 906023 - RNA, 19 nt, Artificial Sequence
  Description of Artificial Sequence: Synthetic oligonucleotide
  Antisense strand to SEQ ID NO: 906022
ucucucacuuaaagacaca

SEQ ID NO: 906024 - RNA, 19 nt, Artificial Sequence
  Description of Artificial Sequence: Synthetic oligonucleotide
  Sense strand starting at position 2711 of SEQ ID NO: 589025
gugucuuuaagugagagag

SEQ ID NO: 906025 - RNA, 19 nt, Artificial Sequence
  Description of Artificial Sequence: Synthetic oligonucleotide
  Antisense strand to SEQ ID NO: 906024
cucucucacuuaaagacac

SEQ ID NO: 906026 - RNA, 19 nt, Artificial Sequence
  Description of Artificial Sequence: Synthetic oligonucleotide
  Sense strand starting at position 2725 of SEQ ID NO: 589025
gagaguguguauguuugaa

SEQ ID NO: 906027 - RNA, 19 nt, Artificial Sequence
  Description of Artificial Sequence: Synthetic oligonucleotide
  Antisense strand to SEQ ID NO: 906026
uucaaacauacacacucuc

SEQ ID NO: 906028 - RNA, 19 nt, Artificial Sequence
  Description of Artificial Sequence: Synthetic oligonucleotide
  Sense strand starting at position 2727 of SEQ ID NO: 589025
gaguguguauguuugaaag

SEQ ID NO: 906029 - RNA, 19 nt, Artificial Sequence
  Description of Artificial Sequence: Synthetic oligonucleotide
  Antisense strand to SEQ ID NO: 906028
cuuucaaacauacacacuc

SEQ ID NO: 906030 - RNA, 19 nt, Artificial Sequence
  Description of Artificial Sequence: Synthetic oligonucleotide
  Sense strand starting at position 2733 of SEQ ID NO: 589025
guauguuugaaagagagug

SEQ ID NO: 906031 - RNA, 19 nt, Artificial Sequence
  Description of Artificial Sequence: Synthetic oligonucleotide
  Antisense strand to SEQ ID NO: 906030
cacucucuuucaaacauac

SEQ ID NO: 906032 - RNA, 19 nt, Artificial Sequence
  Description of Artificial Sequence: Synthetic oligonucleotide
  Sense strand starting at position 2764 of SEQ ID NO: 589025
gcugguccucuguaauaga

SEQ ID NO: 906033 - RNA, 19 nt, Artificial Sequence
  Description of Artificial Sequence: Synthetic oligonucleotide
  Antisense strand to SEQ ID NO: 906032
ucuauuacagaggaccagc

SEQ ID NO: 906034 - RNA, 19 nt, Artificial Sequence
  Description of Artificial Sequence: Synthetic oligonucleotide
  Sense strand starting at position 2840 of SEQ ID NO: 589025
ugcauuugcucaucaacga

SEQ ID NO: 906035 - RNA, 19 nt, Artificial Sequence
  Description of Artificial Sequence: Synthetic oligonucleotide
  Antisense strand to SEQ ID NO: 906034
ucguugaugagcaaaugca

SEQ ID NO: 906036 - RNA, 19 nt, Artificial Sequence
  Description of Artificial Sequence: Synthetic oligonucleotide
  Sense strand starting at position 2848 of SEQ ID NO: 589025
cucaucaacgauuauaguu

SEQ ID NO: 906037 - RNA, 19 nt, Artificial Sequence
  Description of Artificial Sequence: Synthetic oligonucleotide
  Antisense strand to SEQ ID NO: 906036
aacuauaaucguugaugag

SEQ ID NO: 906038 - RNA, 19 nt, Artificial Sequence
  Description of Artificial Sequence: Synthetic oligonucleotide
  Sense strand starting at position 2853 of SEQ ID NO: 589025
caacgauuauaguuaauug

SEQ ID NO: 906039 - RNA, 19 nt, Artificial Sequence
  Description of Artificial Sequence: Synthetic oligonucleotide
  Antisense strand to SEQ ID NO: 906038
caauuaacuauaaucguug

SEQ ID NO: 906040 - RNA, 19 nt, Artificial Sequence
  Description of Artificial Sequence: Synthetic oligonucleotide
  Sense strand starting at position 3060 of SEQ ID NO: 589025
gacaguaccugagucuaua

SEQ ID NO: 906041 - RNA, 19 nt, Artificial Sequence
  Description of Artificial Sequence: Synthetic oligonucleotide
  Antisense strand to SEQ ID NO: 906040
uauagacucagguacuguc

SEQ ID NO: 906042 - RNA, 19 nt, Artificial Sequence
  Description of Artificial Sequence: Synthetic oligonucleotide
  Sense strand starting at position 3063 of SEQ ID NO: 589025
aguaccugagucuauaauu

SEQ ID NO: 906043 - RNA, 19 nt, Artificial Sequence
  Description of Artificial Sequence: Synthetic oligonucleotide
  Antisense strand to SEQ ID NO: 906042
aauuauagacucagguacu

SEQ ID NO: 906044 - RNA, 19 nt, Artificial Sequence
  Description of Artificial Sequence: Synthetic oligonucleotide
  Sense strand starting at position 3139 of SEQ ID NO: 589025
ugcuguggucuguugagca

SEQ ID NO: 906045 - RNA, 19 nt, Artificial Sequence
  Description of Artificial Sequence: Synthetic oligonucleotide
  Antisense strand to SEQ ID NO: 906044
ugcucaacagaccacagca

SEQ ID NO: 906046 - RNA, 19 nt, Artificial Sequence
  Description of Artificial Sequence: Synthetic oligonucleotide
  Sense strand starting at position 3144 of SEQ ID NO: 589025
uggucuguugagcaucuaa

SEQ ID NO: 906047 - RNA, 19 nt, Artificial Sequence
  Description of Artificial Sequence: Synthetic oligonucleotide
  Antisense strand to SEQ ID NO: 906046
uuagaugcucaacagacca

SEQ ID NO: 906048 - RNA, 19 nt, Artificial Sequence
  Description of Artificial Sequence: Synthetic oligonucleotide
  Sense strand starting at position 3286 of SEQ ID NO: 589025
uauucuguuggugaucuga

SEQ ID NO: 906049 - RNA, 19 nt, Artificial Sequence
  Description of Artificial Sequence: Synthetic oligonucleotide
  Antisense strand to SEQ ID NO: 906048
ucagaucaccaacagaaua

SEQ ID NO: 906050 - RNA, 19 nt, Artificial Sequence
  Description of Artificial Sequence: Synthetic oligonucleotide
  Sense strand starting at position 3341 of SEQ ID NO: 589025
ccugguucuccuggaaauu

SEQ ID NO: 906051 - RNA, 19 nt, Artificial Sequence
  Description of Artificial Sequence: Synthetic oligonucleotide
  Antisense strand to SEQ ID NO: 906050
aauuuccaggagaaccagg

SEQ ID NO: 906052 - RNA, 19 nt, Artificial Sequence
  Description of Artificial Sequence: Synthetic oligonucleotide
  Sense strand starting at position 3457 of SEQ ID NO: 589025
ggccaaagauauccugauu

SEQ ID NO: 906053 - RNA, 19 nt, Artificial Sequence
  Description of Artificial Sequence: Synthetic oligonucleotide
  Antisense strand to SEQ ID NO: 906052
aaucaggauaucuuuggcc

SEQ ID NO: 906054 - RNA, 19 nt, Artificial Sequence
  Description of Artificial Sequence: Synthetic oligonucleotide
  Sense strand starting at position 3462 of SEQ ID NO: 589025
aagauauccugauugugac

SEQ ID NO: 906055 - RNA, 19 nt, Artificial Sequence
  Description of Artificial Sequence: Synthetic oligonucleotide
  Antisense strand to SEQ ID NO: 906054
gucacaaucaggauaucuu

SEQ ID NO: 906056 - RNA, 19 nt, Artificial Sequence
  Description of Artificial Sequence: Synthetic oligonucleotide
  Sense strand starting at position 3463 of SEQ ID NO: 589025
agauauccugauugugacu

SEQ ID NO: 906057 - RNA, 19 nt, Artificial Sequence
  Description of Artificial Sequence: Synthetic oligonucleotide
  Antisense strand to SEQ ID NO: 906056
agucacaaucaggauaucu

SEQ ID NO: 906058 - RNA, 19 nt, Artificial Sequence
  Description of Artificial Sequence: Synthetic oligonucleotide
  Sense strand starting at position 3468 of SEQ ID NO: 589025
uccugauugugacugcuaa

SEQ ID NO: 906059 - RNA, 19 nt, Artificial Sequence
  Description of Artificial Sequence: Synthetic oligonucleotide
  Antisense strand to SEQ ID NO: 906058
uuagcagucacaaucagga

SEQ ID NO: 906060 - RNA, 19 nt, Artificial Sequence
  Description of Artificial Sequence: Synthetic oligonucleotide
  Sense strand starting at position 3469 of SEQ ID NO: 589025
ccugauugugacugcuaag

SEQ ID NO: 906061 - RNA, 19 nt, Artificial Sequence
  Description of Artificial Sequence: Synthetic oligonucleotide
  Antisense strand to SEQ ID NO: 906060
cuuagcagucacaaucagg

SEQ ID NO: 906062 - RNA, 19 nt, Artificial Sequence
  Description of Artificial Sequence: Synthetic oligonucleotide
  Sense strand starting at position 3476 of SEQ ID NO: 589025
gugacugcuaagcaugaaa

SEQ ID NO: 906063 - RNA, 19 nt, Artificial Sequence
  Description of Artificial Sequence: Synthetic oligonucleotide
  Antisense strand to SEQ ID NO: 906062
uuucaugcuuagcagucac

SEQ ID NO: 906064 - RNA, 19 nt, Artificial Sequence
  Description of Artificial Sequence: Synthetic oligonucleotide
  Sense strand starting at position 3494 of SEQ ID NO: 589025
agggcuuaacucuacguau

SEQ ID NO: 906065 - RNA, 19 nt, Artificial Sequence
  Description of Artificial Sequence: Synthetic oligonucleotide
  Antisense strand to SEQ ID NO: 906064
auacguagaguuaagcccu

SEQ ID NO: 906066 - RNA, 19 nt, Artificial Sequence
  Description of Artificial Sequence: Synthetic oligonucleotide
  Sense strand starting at position 3598 of SEQ ID NO: 589025
acagguugcaugugaaaca

SEQ ID NO: 906067 - RNA, 19 nt, Artificial Sequence
  Description of Artificial Sequence: Synthetic oligonucleotide
  Antisense strand to SEQ ID NO: 906066
uguuucacaugcaaccugu

SEQ ID NO: 906068 - RNA, 19 nt, Artificial Sequence
  Description of Artificial Sequence: Synthetic oligonucleotide
  Sense strand starting at position 3620 of SEQ ID NO: 589025
gaaauuuguuuguaugaca

SEQ ID NO: 906069 - RNA, 19 nt, Artificial Sequence
  Description of Artificial Sequence: Synthetic oligonucleotide
  Antisense strand to SEQ ID NO: 906068
ugucauacaaacaaauuuc

SEQ ID NO: 906070 - RNA, 19 nt, Artificial Sequence
  Description of Artificial Sequence: Synthetic oligonucleotide
  Sense strand starting at position 3632 of SEQ ID NO: 589025
uaugacauuuaguagugaa

SEQ ID NO: 906071 - RNA, 19 nt, Artificial Sequence
  Description of Artificial Sequence: Synthetic oligonucleotide
  Antisense strand to SEQ ID NO: 906070
uucacuacuaaaugucaua

SEQ ID NO: 906072 - RNA, 19 nt, Artificial Sequence
  Description of Artificial Sequence: Synthetic oligonucleotide
  Sense strand starting at position 3639 of SEQ ID NO: 589025
uuuaguagugaagaugcau

SEQ ID NO: 906073 - RNA, 19 nt, Artificial Sequence
  Description of Artificial Sequence: Synthetic oligonucleotide
  Antisense strand to SEQ ID NO: 906072
augcaucuucacuacuaaa

SEQ ID NO: 906074 - RNA, 19 nt, Artificial Sequence
  Description of Artificial Sequence: Synthetic oligonucleotide
  Sense strand starting at position 3671 of SEQ ID NO: 589025
accuaauggcauugagaug

SEQ ID NO: 906075 - RNA, 19 nt, Artificial Sequence
  Description of Artificial Sequence: Synthetic oligonucleotide
  Antisense strand to SEQ ID NO: 906074
caucucaaugccauuaggu

SEQ ID NO: 906076 - RNA, 19 nt, Artificial Sequence
  Description of Artificial Sequence: Synthetic oligonucleotide
  Sense strand starting at position 3672 of SEQ ID NO: 589025
ccuaauggcauugagaugu

SEQ ID NO: 906077 - RNA, 19 nt, Artificial Sequence
  Description of Artificial Sequence: Synthetic oligonucleotide
  Antisense strand to SEQ ID NO: 906076
acaucucaaugccauuagg

SEQ ID NO: 906078 - RNA, 19 nt, Artificial Sequence
  Description of Artificial Sequence: Synthetic oligonucleotide
  Sense strand starting at position 3676 of SEQ ID NO: 589025
auggcauugagaugugaua

SEQ ID NO: 906079 - RNA, 19 nt, Artificial Sequence
  Description of Artificial Sequence: Synthetic oligonucleotide
  Antisense strand to SEQ ID NO: 906078
uaucacaucucaaugccau

SEQ ID NO: 906080 - RNA, 19 nt, Artificial Sequence
  Description of Artificial Sequence: Synthetic oligonucleotide
  Sense strand starting at position 3829 of SEQ ID NO: 589025
acagucauaugacuuguuu

SEQ ID NO: 906081 - RNA, 19 nt, Artificial Sequence
  Description of Artificial Sequence: Synthetic oligonucleotide
  Antisense strand to SEQ ID NO: 906080
aaacaagucauaugacugu

SEQ ID NO: 906082 - RNA, 19 nt, Artificial Sequence
  Description of Artificial Sequence: Synthetic oligonucleotide
  Sense strand starting at position 3868 of SEQ ID NO: 589025
acagguauacuacaagcua

SEQ ID NO: 906083 - RNA, 19 nt, Artificial Sequence
  Description of Artificial Sequence: Synthetic oligonucleotide
  Antisense strand to SEQ ID NO: 906082
uagcuuguaguauaccugu

SEQ ID NO: 906084 - RNA, 19 nt, Artificial Sequence
  Description of Artificial Sequence: Synthetic oligonucleotide
  Sense strand starting at position 92 of SEQ ID NO: 589026
gagaauucgggaggcuuga

SEQ ID NO: 906085 - RNA, 19 nt, Artificial Sequence
  Description of Artificial Sequence: Synthetic oligonucleotide
  Antisense strand to SEQ ID NO: 906084
ucaagccucccgaauucuc

SEQ ID NO: 906086 - RNA, 19 nt, Artificial Sequence
  Description of Artificial Sequence: Synthetic oligonucleotide
  Sense strand starting at position 541 of SEQ ID NO: 589026
cgagaagagucaagguaag

SEQ ID NO: 906087 - RNA, 19 nt, Artificial Sequence
  Description of Artificial Sequence: Synthetic oligonucleotide
  Antisense strand to SEQ ID NO: 906086
cuuaccuugacucuucucg

SEQ ID NO: 906088 - RNA, 19 nt, Artificial Sequence
  Description of Artificial Sequence: Synthetic oligonucleotide
  Sense strand starting at position 654 of SEQ ID NO: 589026
cucacuuuggccugggaaa

SEQ ID NO: 906089 - RNA, 19 nt, Artificial Sequence
  Description of Artificial Sequence: Synthetic oligonucleotide
  Antisense strand to SEQ ID NO: 906088
uuucccaggccaaagugag

SEQ ID NO: 906090 - RNA, 19 nt, Artificial Sequence
  Description of Artificial Sequence: Synthetic oligonucleotide
  Sense strand starting at position 655 of SEQ ID NO: 589026
ucacuuuggccugggaaau

SEQ ID NO: 906091 - RNA, 19 nt, Artificial Sequence
  Description of Artificial Sequence: Synthetic oligonucleotide
  Antisense strand to SEQ ID NO: 906090
auuucccaggccaaaguga

SEQ ID NO: 906092 - RNA, 19 nt, Artificial Sequence
  Description of Artificial Sequence: Synthetic oligonucleotide
  Sense strand starting at position 656 of SEQ ID NO: 589026
cacuuuggccugggaaauu

SEQ ID NO: 906093 - RNA, 19 nt, Artificial Sequence
  Description of Artificial Sequence: Synthetic oligonucleotide
  Antisense strand to SEQ ID NO: 906092
aauuucccaggccaaagug

SEQ ID NO: 906094 - RNA, 19 nt, Artificial Sequence
  Description of Artificial Sequence: Synthetic oligonucleotide
  Sense strand starting at position 694 of SEQ ID NO: 589026
auuucuagcggguguuuaa

SEQ ID NO: 906095 - RNA, 19 nt, Artificial Sequence
  Description of Artificial Sequence: Synthetic oligonucleotide
  Antisense strand to SEQ ID NO: 906094
uuaaacacccgcuagaaau

SEQ ID NO: 906096 - RNA, 19 nt, Artificial Sequence
  Description of Artificial Sequence: Synthetic oligonucleotide
  Sense strand starting at position 985 of SEQ ID NO: 589026
acaagcaacuguuugaguu

SEQ ID NO: 906097 - RNA, 19 nt, Artificial Sequence
  Description of Artificial Sequence: Synthetic oligonucleotide
  Antisense strand to SEQ ID NO: 906096
aacucaaacaguugcuugu

SEQ ID NO: 906098 - RNA, 19 nt, Artificial Sequence
  Description of Artificial Sequence: Synthetic oligonucleotide
  Sense strand starting at position 2366 of SEQ ID NO: 589026
gggugucuuggugccugua

SEQ ID NO: 906099 - RNA, 19 nt, Artificial Sequence
  Description of Artificial Sequence: Synthetic oligonucleotide
  Antisense strand to SEQ ID NO: 906098
uacaggcaccaagacaccc

SEQ ID NO: 906100 - RNA, 19 nt, Artificial Sequence
  Description of Artificial Sequence: Synthetic oligonucleotide
  Sense strand starting at position 2367 of SEQ ID NO: 589026
ggugucuuggugccuguaa

SEQ ID NO: 906101 - RNA, 19 nt, Artificial Sequence
  Description of Artificial Sequence: Synthetic oligonucleotide
  Antisense strand to SEQ ID NO: 906100
uuacaggcaccaagacacc

SEQ ID NO: 906102 - RNA, 19 nt, Artificial Sequence
  Description of Artificial Sequence: Synthetic oligonucleotide
  Sense strand starting at position 2412 of SEQ ID NO: 589026
uggcucucaggaggaguua

SEQ ID NO: 906103 - RNA, 19 nt, Artificial Sequence
  Description of Artificial Sequence: Synthetic oligonucleotide
  Antisense strand to SEQ ID NO: 906102
uaacuccuccugagagcca

SEQ ID NO: 906104 - RNA, 19 nt, Artificial Sequence
  Description of Artificial Sequence: Synthetic oligonucleotide
  Sense strand starting at position 2413 of SEQ ID NO: 589026
ggcucucaggaggaguuaa

SEQ ID NO: 906105 - RNA, 19 nt, Artificial Sequence
  Description of Artificial Sequence: Synthetic oligonucleotide
  Antisense strand to SEQ ID NO: 906104
uuaacuccuccugagagcc

SEQ ID NO: 906106 - RNA, 19 nt, Artificial Sequence
  Description of Artificial Sequence: Synthetic oligonucleotide
  Sense strand starting at position 2507 of SEQ ID NO: 589026
gucauuuauacggagcugu

SEQ ID NO: 906107 - RNA, 19 nt, Artificial Sequence
  Description of Artificial Sequence: Synthetic oligonucleotide
  Antisense strand to SEQ ID NO: 906106
acagcuccguauaaaugac

SEQ ID NO: 906108 - RNA, 19 nt, Artificial Sequence
  Description of Artificial Sequence: Synthetic oligonucleotide
  Sense strand starting at position 2556 of SEQ ID NO: 589026
gcagauaagaguuggaguc

SEQ ID NO: 906109 - RNA, 19 nt, Artificial Sequence
  Description of Artificial Sequence: Synthetic oligonucleotide
  Antisense strand to SEQ ID NO: 906108
gacuccaacucuuaucugc

SEQ ID NO: 906110 - RNA, 19 nt, Artificial Sequence
  Description of Artificial Sequence: Synthetic oligonucleotide
  Sense strand starting at position 2557 of SEQ ID NO: 589026
cagauaagaguuggaguca

SEQ ID NO: 906111 - RNA, 19 nt, Artificial Sequence
  Description of Artificial Sequence: Synthetic oligonucleotide
  Antisense strand to SEQ ID NO: 906110
ugacuccaacucuuaucug

SEQ ID NO: 906112 - RNA, 19 nt, Artificial Sequence
  Description of Artificial Sequence: Synthetic oligonucleotide
  Sense strand starting at position 2730 of SEQ ID NO: 589026
aggucacagagaugcuaaa

SEQ ID NO: 906113 - RNA, 19 nt, Artificial Sequence
  Description of Artificial Sequence: Synthetic oligonucleotide
  Antisense strand to SEQ ID NO: 906112
uuuagcaucucugugaccu

SEQ ID NO: 906114 - RNA, 19 nt, Artificial Sequence
  Description of Artificial Sequence: Synthetic oligonucleotide
  Sense strand starting at position 2739 of SEQ ID NO: 589026
agaugcuaaaugugagguu

SEQ ID NO: 906115 - RNA, 19 nt, Artificial Sequence
  Description of Artificial Sequence: Synthetic oligonucleotide
  Antisense strand to SEQ ID NO: 906114
aaccucacauuuagcaucu

SEQ ID NO: 906116 - RNA, 19 nt, Artificial Sequence
  Description of Artificial Sequence: Synthetic oligonucleotide
  Sense strand starting at position 2754 of SEQ ID NO: 589026
gguuuagagaacuguaauu

SEQ ID NO: 906117 - RNA, 19 nt, Artificial Sequence
  Description of Artificial Sequence: Synthetic oligonucleotide
  Antisense strand to SEQ ID NO: 906116
aauuacaguucucuaaacc

SEQ ID NO: 906118 - RNA, 19 nt, Artificial Sequence
  Description of Artificial Sequence: Synthetic oligonucleotide
  Sense strand starting at position 2813 of SEQ ID NO: 589026
cucuuuacacguuaaauga

SEQ ID NO: 906119 - RNA, 19 nt, Artificial Sequence
  Description of Artificial Sequence: Synthetic oligonucleotide
  Antisense strand to SEQ ID NO: 906118
ucauuuaacguguaaagag

SEQ ID NO: 906120 - RNA, 19 nt, Artificial Sequence
  Description of Artificial Sequence: Synthetic oligonucleotide
  Sense strand starting at position 2919 of SEQ ID NO: 589026
ugccuuugcaaguagaaug

SEQ ID NO: 906121 - RNA, 19 nt, Artificial Sequence
  Description of Artificial Sequence: Synthetic oligonucleotide
  Antisense strand to SEQ ID NO: 906120
cauucuacuugcaaaggca

SEQ ID NO: 906122 - RNA, 19 nt, Artificial Sequence
  Description of Artificial Sequence: Synthetic oligonucleotide
  Sense strand starting at position 2958 of SEQ ID NO: 589026
uuuaccugaguuuaugaau

SEQ ID NO: 906123 - RNA, 19 nt, Artificial Sequence
  Description of Artificial Sequence: Synthetic oligonucleotide
  Antisense strand to SEQ ID NO: 906122
auucauaaacucagguaaa

SEQ ID NO: 906124 - RNA, 19 nt, Artificial Sequence
  Description of Artificial Sequence: Synthetic oligonucleotide
  Sense strand starting at position 3050 of SEQ ID NO: 589026
ugaaguguuagggaugugu

SEQ ID NO: 906125 - RNA, 19 nt, Artificial Sequence
  Description of Artificial Sequence: Synthetic oligonucleotide
  Antisense strand to SEQ ID NO: 906124
acacaucccuaacacuuca

SEQ ID NO: 906126 - RNA, 19 nt, Artificial Sequence
  Description of Artificial Sequence: Synthetic oligonucleotide
  Sense strand starting at position 3081 of SEQ ID NO: 589026
aaccaauguucuguggaag

SEQ ID NO: 906127 - RNA, 19 nt, Artificial Sequence
  Description of Artificial Sequence: Synthetic oligonucleotide
  Antisense strand to SEQ ID NO: 906126
cuuccacagaacauugguu

SEQ ID NO: 906128 - RNA, 19 nt, Artificial Sequence
  Description of Artificial Sequence: Synthetic oligonucleotide
  Sense strand starting at position 3082 of SEQ ID NO: 589026
accaauguucuguggaaga

SEQ ID NO: 906129 - RNA, 19 nt, Artificial Sequence
  Description of Artificial Sequence: Synthetic oligonucleotide
  Antisense strand to SEQ ID NO: 906128
ucuuccacagaacauuggu

SEQ ID NO: 906130 - RNA, 19 nt, Artificial Sequence
  Description of Artificial Sequence: Synthetic oligonucleotide
  Sense strand starting at position 3172 of SEQ ID NO: 589026
agaauaccugcacggagaa

SEQ ID NO: 906131 - RNA, 19 nt, Artificial Sequence
  Description of Artificial Sequence: Synthetic oligonucleotide
  Antisense strand to SEQ ID NO: 906130
uucuccgugcagguauucu

SEQ ID NO: 906132 - RNA, 19 nt, Artificial Sequence
  Description of Artificial Sequence: Synthetic oligonucleotide
  Sense strand starting at position 3173 of SEQ ID NO: 589026
gaauaccugcacggagaaa

SEQ ID NO: 906133 - RNA, 19 nt, Artificial Sequence
  Description of Artificial Sequence: Synthetic oligonucleotide
  Antisense strand to SEQ ID NO: 906132
uuucuccgugcagguauuc

SEQ ID NO: 906134 - RNA, 19 nt, Artificial Sequence
  Description of Artificial Sequence: Synthetic oligonucleotide
  Sense strand starting at position 3301 of SEQ ID NO: 589026
guuauaucuagcgcugcaa

SEQ ID NO: 906135 - RNA, 19 nt, Artificial Sequence
  Description of Artificial Sequence: Synthetic oligonucleotide
  Antisense strand to SEQ ID NO: 906134
uugcagcgcuagauauaac

SEQ ID NO: 906136 - RNA, 19 nt, Artificial Sequence
  Description of Artificial Sequence: Synthetic oligonucleotide
  Sense strand starting at position 3449 of SEQ ID NO: 589026
aaguuagagguauaagcau

SEQ ID NO: 906137 - RNA, 19 nt, Artificial Sequence
  Description of Artificial Sequence: Synthetic oligonucleotide
  Antisense strand to SEQ ID NO: 906136
augcuuauaccucuaacuu

SEQ ID NO: 906138 - RNA, 19 nt, Artificial Sequence
  Description of Artificial Sequence: Synthetic oligonucleotide
  Sense strand starting at position 3455 of SEQ ID NO: 589026
gagguauaagcauaaagca

SEQ ID NO: 906139 - RNA, 19 nt, Artificial Sequence
  Description of Artificial Sequence: Synthetic oligonucleotide
  Antisense strand to SEQ ID NO: 906138
ugcuuuaugcuuauaccuc

SEQ ID NO: 906140 - RNA, 19 nt, Artificial Sequence
  Description of Artificial Sequence: Synthetic oligonucleotide
  Sense strand starting at position 3492 of SEQ ID NO: 589026
gaggaagaguuagaaauaa

SEQ ID NO: 906141 - RNA, 19 nt, Artificial Sequence
  Description of Artificial Sequence: Synthetic oligonucleotide
  Antisense strand to SEQ ID NO: 906140
uuauuucuaacucuuccuc

SEQ ID NO: 906142 - RNA, 19 nt, Artificial Sequence
  Description of Artificial Sequence: Synthetic oligonucleotide
  Sense strand starting at position 3504 of SEQ ID NO: 589026
gaaauaaguggaugcauau

SEQ ID NO: 906143 - RNA, 19 nt, Artificial Sequence
  Description of Artificial Sequence: Synthetic oligonucleotide
  Antisense strand to SEQ ID NO: 906142
auaugcauccacuuauuuc

SEQ ID NO: 906144 - RNA, 19 nt, Artificial Sequence
  Description of Artificial Sequence: Synthetic oligonucleotide
  Sense strand starting at position 3524 of SEQ ID NO: 589026
guaaccgaauucuuaucua

SEQ ID NO: 906145 - RNA, 19 nt, Artificial Sequence
  Description of Artificial Sequence: Synthetic oligonucleotide
  Antisense strand to SEQ ID NO: 906144
uagauaagaauucgguuac

SEQ ID NO: 906146 - RNA, 19 nt, Artificial Sequence
  Description of Artificial Sequence: Synthetic oligonucleotide
  Sense strand starting at position 3527 of SEQ ID NO: 589026
accgaauucuuaucuagug

SEQ ID NO: 906147 - RNA, 19 nt, Artificial Sequence
  Description of Artificial Sequence: Synthetic oligonucleotide
  Antisense strand to SEQ ID NO: 906146
cacuagauaagaauucggu

SEQ ID NO: 906148 - RNA, 19 nt, Artificial Sequence
  Description of Artificial Sequence: Synthetic oligonucleotide
  Sense strand starting at position 3543 of SEQ ID NO: 589026
guguuagauguauaugaac

SEQ ID NO: 906149 - RNA, 19 nt, Artificial Sequence
  Description of Artificial Sequence: Synthetic oligonucleotide
  Antisense strand to SEQ ID NO: 906148
guucauauacaucuaacac

SEQ ID NO: 906150 - RNA, 19 nt, Artificial Sequence
  Description of Artificial Sequence: Synthetic oligonucleotide
  Sense strand starting at position 3549 of SEQ ID NO: 589026
gauguauaugaacaugcuu

SEQ ID NO: 906151 - RNA, 19 nt, Artificial Sequence
  Description of Artificial Sequence: Synthetic oligonucleotide
  Antisense strand to SEQ ID NO: 906150
aagcauguucauauacauc

SEQ ID NO: 906152 - RNA, 19 nt, Artificial Sequence
  Description of Artificial Sequence: Synthetic oligonucleotide
  Sense strand starting at position 3554 of SEQ ID NO: 589026
auaugaacaugcuuuguaa

SEQ ID NO: 906153 - RNA, 19 nt, Artificial Sequence
  Description of Artificial Sequence: Synthetic oligonucleotide
  Antisense strand to SEQ ID NO: 906152
uuacaaagcauguucauau

SEQ ID NO: 906154 - RNA, 19 nt, Artificial Sequence
  Description of Artificial Sequence: Synthetic oligonucleotide
  Sense strand starting at position 3556 of SEQ ID NO: 589026
augaacaugcuuuguaaau

SEQ ID NO: 906155 - RNA, 19 nt, Artificial Sequence
  Description of Artificial Sequence: Synthetic oligonucleotide
  Antisense strand to SEQ ID NO: 906154
auuuacaaagcauguucau

SEQ ID NO: 906156 - RNA, 19 nt, Artificial Sequence
  Description of Artificial Sequence: Synthetic oligonucleotide
  Sense strand starting at position 3667 of SEQ ID NO: 589026
agguaugcucauuaaacca

SEQ ID NO: 906157 - RNA, 19 nt, Artificial Sequence
  Description of Artificial Sequence: Synthetic oligonucleotide
  Antisense strand to SEQ ID NO: 906156
ugguuuaaugagcauaccu

SEQ ID NO: 906158 - RNA, 19 nt, Artificial Sequence
  Description of Artificial Sequence: Synthetic oligonucleotide
  Sense strand starting at position 3773 of SEQ ID NO: 589026
auguuauucuuucucuaga

SEQ ID NO: 906159 - RNA, 19 nt, Artificial Sequence
  Description of Artificial Sequence: Synthetic oligonucleotide
  Antisense strand to SEQ ID NO: 906158
ucuagagaaagaauaacau

SEQ ID NO: 906160 - RNA, 19 nt, Artificial Sequence
  Description of Artificial Sequence: Synthetic oligonucleotide
  Sense strand starting at position 3774 of SEQ ID NO: 589026
uguuauucuuucucuagau

SEQ ID NO: 906161 - RNA, 19 nt, Artificial Sequence
  Description of Artificial Sequence: Synthetic oligonucleotide
  Antisense strand to SEQ ID NO: 906160
aucuagagaaagaauaaca

SEQ ID NO: 906162 - RNA, 19 nt, Artificial Sequence
  Description of Artificial Sequence: Synthetic oligonucleotide
  Sense strand starting at position 3775 of SEQ ID NO: 589026
guuauucuuucucuagauc

SEQ ID NO: 906163 - RNA, 19 nt, Artificial Sequence
  Description of Artificial Sequence: Synthetic oligonucleotide
  Antisense strand to SEQ ID NO: 906162
gaucuagagaaagaauaac

SEQ ID NO: 906164 - RNA, 19 nt, Artificial Sequence
  Description of Artificial Sequence: Synthetic oligonucleotide
  Sense strand starting at position 1231 of SEQ ID NO: 589027
aacccaaagcggugucaga

SEQ ID NO: 906165 - RNA, 19 nt, Artificial Sequence
  Description of Artificial Sequence: Synthetic oligonucleotide
  Antisense strand to SEQ ID NO: 906164
ucugacaccgcuuuggguu

SEQ ID NO: 906166 - RNA, 19 nt, Artificial Sequence
  Description of Artificial Sequence: Synthetic oligonucleotide
  Sense strand starting at position 32 of SEQ ID NO: 589028
gaauuuggguuauaucuac

SEQ ID NO: 906167 - RNA, 19 nt, Artificial Sequence
  Description of Artificial Sequence: Synthetic oligonucleotide
  Antisense strand to SEQ ID NO: 906166
guagauauaacccaaauuc

SEQ ID NO: 906168 - RNA, 19 nt, Artificial Sequence
  Description of Artificial Sequence: Synthetic oligonucleotide
  Sense strand starting at position 40 of SEQ ID NO: 589028
guuauaucuacguuguugu

SEQ ID NO: 906169 - RNA, 19 nt, Artificial Sequence
  Description of Artificial Sequence: Synthetic oligonucleotide
  Antisense strand to SEQ ID NO: 906168
acaacaacguagauauaac

SEQ ID NO: 906170 - RNA, 19 nt, Artificial Sequence
  Description of Artificial Sequence: Synthetic oligonucleotide
  Sense strand starting at position 126 of SEQ ID NO: 589028
cauguaauauacuugagag

SEQ ID NO: 906171 - RNA, 19 nt, Artificial Sequence
  Description of Artificial Sequence: Synthetic oligonucleotide
  Antisense strand to SEQ ID NO: 906170
cucucaaguauauuacaug

SEQ ID NO: 906172 - RNA, 19 nt, Artificial Sequence
  Description of Artificial Sequence: Synthetic oligonucleotide
  Sense strand starting at position 183 of SEQ ID NO: 589028
gaccuuagccuaggagaau

SEQ ID NO: 906173 - RNA, 19 nt, Artificial Sequence
  Description of Artificial Sequence: Synthetic oligonucleotide
  Antisense strand to SEQ ID NO: 906172
auucuccuaggcuaagguc

SEQ ID NO: 906174 - RNA, 19 nt, Artificial Sequence
  Description of Artificial Sequence: Synthetic oligonucleotide
  Sense strand starting at position 238 of SEQ ID NO: 589028
auggaauacuaagaugaag

SEQ ID NO: 906175 - RNA, 19 nt, Artificial Sequence
  Description of Artificial Sequence: Synthetic oligonucleotide
  Antisense strand to SEQ ID NO: 906174
cuucaucuuaguauuccau

SEQ ID NO: 906176 - RNA, 19 nt, Artificial Sequence
  Description of Artificial Sequence: Synthetic oligonucleotide
  Sense strand starting at position 809 of SEQ ID NO: 589028
uuccaaaggccuugggaua

SEQ ID NO: 906177 - RNA, 19 nt, Artificial Sequence
  Description of Artificial Sequence: Synthetic oligonucleotide
  Antisense strand to SEQ ID NO: 906176
uaucccaaggccuuuggaa

SEQ ID NO: 906178 - RNA, 19 nt, Artificial Sequence
  Description of Artificial Sequence: Synthetic oligonucleotide
  Sense strand starting at position 810 of SEQ ID NO: 589028
uccaaaggccuugggauau

SEQ ID NO: 906179 - RNA, 19 nt, Artificial Sequence
  Description of Artificial Sequence: Synthetic oligonucleotide
  Antisense strand to SEQ ID NO: 906178
auaucccaaggccuuugga

SEQ ID NO: 906180 - RNA, 19 nt, Artificial Sequence
  Description of Artificial Sequence: Synthetic oligonucleotide
  Sense strand starting at position 887 of SEQ ID NO: 589028
agugcaauauuccuugaua

SEQ ID NO: 906181 - RNA, 19 nt, Artificial Sequence
  Description of Artificial Sequence: Synthetic oligonucleotide
  Antisense strand to SEQ ID NO: 906180
uaucaaggaauauugcacu

SEQ ID NO: 906182 - RNA, 19 nt, Artificial Sequence
  Description of Artificial Sequence: Synthetic oligonucleotide
  Sense strand starting at position 888 of SEQ ID NO: 589028
gugcaauauuccuugauau

SEQ ID NO: 906183 - RNA, 19 nt, Artificial Sequence
  Description of Artificial Sequence: Synthetic oligonucleotide
  Antisense strand to SEQ ID NO: 906182
auaucaaggaauauugcac

SEQ ID NO: 906184 - RNA, 19 nt, Artificial Sequence
  Description of Artificial Sequence: Synthetic oligonucleotide
  Sense strand starting at position 926 of SEQ ID NO: 589028
uguucuauuccaugaagaa

SEQ ID NO: 906185 - RNA, 19 nt, Artificial Sequence
  Description of Artificial Sequence: Synthetic oligonucleotide
  Antisense strand to SEQ ID NO: 906184
uucuucauggaauagaaca

SEQ ID NO: 906186 - RNA, 19 nt, Artificial Sequence
  Description of Artificial Sequence: Synthetic oligonucleotide
  Sense strand starting at position 1086 of SEQ ID NO: 589028
ugucuuacacucugggaga

SEQ ID NO: 906187 - RNA, 19 nt, Artificial Sequence
  Description of Artificial Sequence: Synthetic oligonucleotide
  Antisense strand to SEQ ID NO: 906186
ucucccagaguguaagaca

SEQ ID NO: 906188 - RNA, 19 nt, Artificial Sequence
  Description of Artificial Sequence: Synthetic oligonucleotide
  Sense strand starting at position 1230 of SEQ ID NO: 589028
gagggucuugccuagaguc

SEQ ID NO: 906189 - RNA, 19 nt, Artificial Sequence
  Description of Artificial Sequence: Synthetic oligonucleotide
  Antisense strand to SEQ ID NO: 906188
gacucuaggcaagacccuc

SEQ ID NO: 906190 - RNA, 19 nt, Artificial Sequence
  Description of Artificial Sequence: Synthetic oligonucleotide
  Sense strand starting at position 2082 of SEQ ID NO: 589028
ggcgcuacucucuucguga

SEQ ID NO: 906191 - RNA, 19 nt, Artificial Sequence
  Description of Artificial Sequence: Synthetic oligonucleotide
  Antisense strand to SEQ ID NO: 906190
ucacgaagagaguagcgcc

SEQ ID NO: 906192 - RNA, 19 nt, Artificial Sequence
  Description of Artificial Sequence: Synthetic oligonucleotide
  Sense strand starting at position 2171 of SEQ ID NO: 589028
acggguaccuuuguaauag

SEQ ID NO: 906193 - RNA, 19 nt, Artificial Sequence
  Description of Artificial Sequence: Synthetic oligonucleotide
  Antisense strand to SEQ ID NO: 906192
cuauuacaaagguacccgu

SEQ ID NO: 906194 - RNA, 19 nt, Artificial Sequence
  Description of Artificial Sequence: Synthetic oligonucleotide
  Sense strand starting at position 2181 of SEQ ID NO: 589028
uuguaauagcuauggagaa

SEQ ID NO: 906195 - RNA, 19 nt, Artificial Sequence
  Description of Artificial Sequence: Synthetic oligonucleotide
  Antisense strand to SEQ ID NO: 906194
uucuccauagcuauuacaa

SEQ ID NO: 906196 - RNA, 19 nt, Artificial Sequence
  Description of Artificial Sequence: Synthetic oligonucleotide
  Sense strand starting at position 2241 of SEQ ID NO: 589028
gacauacguguugccguau

SEQ ID NO: 906197 - RNA, 19 nt, Artificial Sequence
  Description of Artificial Sequence: Synthetic oligonucleotide
  Antisense strand to SEQ ID NO: 906196
auacggcaacacguauguc

SEQ ID NO: 906198 - RNA, 19 nt, Artificial Sequence
  Description of Artificial Sequence: Synthetic oligonucleotide
  Sense strand starting at position 2252 of SEQ ID NO: 589028
ugccguauuucuuuggagu

SEQ ID NO: 906199 - RNA, 19 nt, Artificial Sequence
  Description of Artificial Sequence: Synthetic oligonucleotide
  Antisense strand to SEQ ID NO: 906198
acuccaaagaaauacggca

SEQ ID NO: 906200 - RNA, 19 nt, Artificial Sequence
  Description of Artificial Sequence: Synthetic oligonucleotide
  Sense strand starting at position 2253 of SEQ ID NO: 589028
gccguauuucuuuggaguu

SEQ ID NO: 906201 - RNA, 19 nt, Artificial Sequence
  Description of Artificial Sequence: Synthetic oligonucleotide
  Antisense strand to SEQ ID NO: 906200
aacuccaaagaaauacggc

SEQ ID NO: 906202 - RNA, 19 nt, Artificial Sequence
  Description of Artificial Sequence: Synthetic oligonucleotide
  Sense strand starting at position 2287 of SEQ ID NO: 589028
agaaauuccuccuuuggac

SEQ ID NO: 906203 - RNA, 19 nt, Artificial Sequence
  Description of Artificial Sequence: Synthetic oligonucleotide
  Antisense strand to SEQ ID NO: 906202
guccaaaggaggaauuucu

SEQ ID NO: 906204 - RNA, 19 nt, Artificial Sequence
  Description of Artificial Sequence: Synthetic oligonucleotide
  Sense strand starting at position 2394 of SEQ ID NO: 589028
cucaguaccuucuugagau

SEQ ID NO: 906205 - RNA, 19 nt, Artificial Sequence
  Description of Artificial Sequence: Synthetic oligonucleotide
  Antisense strand to SEQ ID NO: 906204
aucucaagaagguacugag

SEQ ID NO: 906206 - RNA, 19 nt, Artificial Sequence
  Description of Artificial Sequence: Synthetic oligonucleotide
  Sense strand starting at position 2418 of SEQ ID NO: 589028
ugggaagacaguuguagaa

SEQ ID NO: 906207 - RNA, 19 nt, Artificial Sequence
  Description of Artificial Sequence: Synthetic oligonucleotide
  Antisense strand to SEQ ID NO: 906206
uucuacaacugucuuccca

SEQ ID NO: 906208 - RNA, 19 nt, Artificial Sequence
  Description of Artificial Sequence: Synthetic oligonucleotide
  Sense strand starting at position 2998 of SEQ ID NO: 589028
agagaaguuugccuccaca

SEQ ID NO: 906209 - RNA, 19 nt, Artificial Sequence
  Description of Artificial Sequence: Synthetic oligonucleotide
  Antisense strand to SEQ ID NO: 906208
uguggaggcaaacuucucu

SEQ ID NO: 906210 - RNA, 19 nt, Artificial Sequence
  Description of Artificial Sequence: Synthetic oligonucleotide
  Sense strand starting at position 3066 of SEQ ID NO: 589028
ggcaucccugaugaaguau

SEQ ID NO: 906211 - RNA, 19 nt, Artificial Sequence
  Description of Artificial Sequence: Synthetic oligonucleotide
  Antisense strand to SEQ ID NO: 906210
auacuucaucagggaugcc

SEQ ID NO: 906212 - RNA, 19 nt, Artificial Sequence
  Description of Artificial Sequence: Synthetic oligonucleotide
  Sense strand starting at position 3099 of SEQ ID NO: 589028
gaugcucacucuguaauga

SEQ ID NO: 906213 - RNA, 19 nt, Artificial Sequence
  Description of Artificial Sequence: Synthetic oligonucleotide
  Antisense strand to SEQ ID NO: 906212
ucauuacagagugagcauc

SEQ ID NO: 906214 - RNA, 19 nt, Artificial Sequence
  Description of Artificial Sequence: Synthetic oligonucleotide
  Sense strand starting at position 3100 of SEQ ID NO: 589028
augcucacucuguaaugau

SEQ ID NO: 906215 - RNA, 19 nt, Artificial Sequence
  Description of Artificial Sequence: Synthetic oligonucleotide
  Antisense strand to SEQ ID NO: 906214
aucauuacagagugagcau

SEQ ID NO: 906216 - RNA, 19 nt, Artificial Sequence
  Description of Artificial Sequence: Synthetic oligonucleotide
  Sense strand starting at position 3108 of SEQ ID NO: 589028
ucuguaaugaugggcugau

SEQ ID NO: 906217 - RNA, 19 nt, Artificial Sequence
  Description of Artificial Sequence: Synthetic oligonucleotide
  Antisense strand to SEQ ID NO: 906216
aucagcccaucauuacaga

SEQ ID NO: 906218 - RNA, 19 nt, Artificial Sequence
  Description of Artificial Sequence: Synthetic oligonucleotide
  Sense strand starting at position 3109 of SEQ ID NO: 589028
cuguaaugaugggcugauu

SEQ ID NO: 906219 - RNA, 19 nt, Artificial Sequence
  Description of Artificial Sequence: Synthetic oligonucleotide
  Antisense strand to SEQ ID NO: 906218
aaucagcccaucauuacag

SEQ ID NO: 906220 - RNA, 19 nt, Artificial Sequence
  Description of Artificial Sequence: Synthetic oligonucleotide
  Sense strand starting at position 3118 of SEQ ID NO: 589028
ugggcugauuacuuucuaa

SEQ ID NO: 906221 - RNA, 19 nt, Artificial Sequence
  Description of Artificial Sequence: Synthetic oligonucleotide
  Antisense strand to SEQ ID NO: 906220
uuagaaaguaaucagccca

SEQ ID NO: 906222 - RNA, 19 nt, Artificial Sequence
  Description of Artificial Sequence: Synthetic oligonucleotide
  Sense strand starting at position 3142 of SEQ ID NO: 589028
ugaccuauuguugggagau

SEQ ID NO: 906223 - RNA, 19 nt, Artificial Sequence
  Description of Artificial Sequence: Synthetic oligonucleotide
  Antisense strand to SEQ ID NO: 906222
aucucccaacaauagguca

SEQ ID NO: 906224 - RNA, 19 nt, Artificial Sequence
  Description of Artificial Sequence: Synthetic oligonucleotide
  Sense strand starting at position 3144 of SEQ ID NO: 589028
accuauuguugggagauuu

SEQ ID NO: 906225 - RNA, 19 nt, Artificial Sequence
  Description of Artificial Sequence: Synthetic oligonucleotide
  Antisense strand to SEQ ID NO: 906224
aaaucucccaacaauaggu

SEQ ID NO: 906226 - RNA, 19 nt, Artificial Sequence
  Description of Artificial Sequence: Synthetic oligonucleotide
  Sense strand starting at position 3173 of SEQ ID NO: 589028
ggagaaaguaucuacccgu

SEQ ID NO: 906227 - RNA, 19 nt, Artificial Sequence
  Description of Artificial Sequence: Synthetic oligonucleotide
  Antisense strand to SEQ ID NO: 906226
acggguagauacuuucucc

SEQ ID NO: 906228 - RNA, 19 nt, Artificial Sequence
  Description of Artificial Sequence: Synthetic oligonucleotide
  Sense strand starting at position 3176 of SEQ ID NO: 589028
gaaaguaucuacccguaug

SEQ ID NO: 906229 - RNA, 19 nt, Artificial Sequence
  Description of Artificial Sequence: Synthetic oligonucleotide
  Antisense strand to SEQ ID NO: 906228
cauacggguagauacuuuc

SEQ ID NO: 906230 - RNA, 19 nt, Artificial Sequence
  Description of Artificial Sequence: Synthetic oligonucleotide
  Sense strand starting at position 3285 of SEQ ID NO: 589028
aggauagacucacugcuuu

SEQ ID NO: 906231 - RNA, 19 nt, Artificial Sequence
  Description of Artificial Sequence: Synthetic oligonucleotide
  Antisense strand to SEQ ID NO: 906230
aaagcagugagucuauccu

SEQ ID NO: 906232 - RNA, 19 nt, Artificial Sequence
  Description of Artificial Sequence: Synthetic oligonucleotide
  Sense strand starting at position 3332 of SEQ ID NO: 589028
cagcuacagaggugaguua

SEQ ID NO: 906233 - RNA, 19 nt, Artificial Sequence
  Description of Artificial Sequence: Synthetic oligonucleotide
  Antisense strand to SEQ ID NO: 906232
uaacucaccucuguagcug

SEQ ID NO: 906234 - RNA, 19 nt, Artificial Sequence
  Description of Artificial Sequence: Synthetic oligonucleotide
  Sense strand starting at position 3339 of SEQ ID NO: 589028
agaggugaguuacuagauc

SEQ ID NO: 906235 - RNA, 19 nt, Artificial Sequence
  Description of Artificial Sequence: Synthetic oligonucleotide
  Antisense strand to SEQ ID NO: 906234
gaucuaguaacucaccucu

SEQ ID NO: 906236 - RNA, 19 nt, Artificial Sequence
  Description of Artificial Sequence: Synthetic oligonucleotide
  Sense strand starting at position 3768 of SEQ ID NO: 589028
ccaacaucagggugugaua

SEQ ID NO: 906237 - RNA, 19 nt, Artificial Sequence
  Description of Artificial Sequence: Synthetic oligonucleotide
  Antisense strand to SEQ ID NO: 906236
uaucacacccugauguugg

SEQ ID NO: 906238 - RNA, 19 nt, Artificial Sequence
  Description of Artificial Sequence: Synthetic oligonucleotide
  Sense strand starting at position 3770 of SEQ ID NO: 589028
aacaucagggugugauaga

SEQ ID NO: 906239 - RNA, 19 nt, Artificial Sequence
  Description of Artificial Sequence: Synthetic oligonucleotide
  Antisense strand to SEQ ID NO: 906238
ucuaucacacccugauguu

SEQ ID NO: 906240 - RNA, 19 nt, Artificial Sequence
  Description of Artificial Sequence: Synthetic oligonucleotide
  Sense strand starting at position 3870 of SEQ ID NO: 589028
gagugacaucgugggacuu

SEQ ID NO: 906241 - RNA, 19 nt, Artificial Sequence
  Description of Artificial Sequence: Synthetic oligonucleotide
  Antisense strand to SEQ ID NO: 906240
aagucccacgaugucacuc

SEQ ID NO: 906242 - RNA, 19 nt, Artificial Sequence
  Description of Artificial Sequence: Synthetic oligonucleotide
  Sense strand starting at position 3881 of SEQ ID NO: 589028
ugggacuucugaguuuaag

SEQ ID NO: 906243 - RNA, 19 nt, Artificial Sequence
  Description of Artificial Sequence: Synthetic oligonucleotide
  Antisense strand to SEQ ID NO: 906242
cuuaaacucagaaguccca

SEQ ID NO: 906244 - RNA, 19 nt, Artificial Sequence
  Description of Artificial Sequence: Synthetic oligonucleotide
  Sense strand starting at position 3884 of SEQ ID NO: 589028
gacuucugaguuuaagcuu

SEQ ID NO: 906245 - RNA, 19 nt, Artificial Sequence
  Description of Artificial Sequence: Synthetic oligonucleotide
  Antisense strand to SEQ ID NO: 906244
aagcuuaaacucagaaguc

SEQ ID NO: 906246 - RNA, 19 nt, Artificial Sequence
  Description of Artificial Sequence: Synthetic oligonucleotide
  Sense strand starting at position 141 of SEQ ID NO: 589029
gggagagauguccgucuuc

SEQ ID NO: 906247 - RNA, 19 nt, Artificial Sequence
  Description of Artificial Sequence: Synthetic oligonucleotide
  Antisense strand to SEQ ID NO: 906246
gaagacggacaucucuccc

SEQ ID NO: 906248 - RNA, 19 nt, Artificial Sequence
  Description of Artificial Sequence: Synthetic oligonucleotide
  Sense strand starting at position 152 of SEQ ID NO: 589029
ccgucuucuucucugauga

SEQ ID NO: 906249 - RNA, 19 nt, Artificial Sequence
  Description of Artificial Sequence: Synthetic oligonucleotide
  Antisense strand to SEQ ID NO: 906248
ucaucagagaagaagacgg

SEQ ID NO: 906250 - RNA, 19 nt, Artificial Sequence
  Description of Artificial Sequence: Synthetic oligonucleotide
  Sense strand starting at position 286 of SEQ ID NO: 589029
uuucgugugcguuugauua

SEQ ID NO: 906251 - RNA, 19 nt, Artificial Sequence
  Description of Artificial Sequence: Synthetic oligonucleotide
  Antisense strand to SEQ ID NO: 906250
uaaucaaacgcacacgaaa

SEQ ID NO: 906252 - RNA, 19 nt, Artificial Sequence
  Description of Artificial Sequence: Synthetic oligonucleotide
  Sense strand starting at position 288 of SEQ ID NO: 589029
ucgugugcguuugauuaaa

SEQ ID NO: 906253 - RNA, 19 nt, Artificial Sequence
  Description of Artificial Sequence: Synthetic oligonucleotide
  Antisense strand to SEQ ID NO: 906252
uuuaaucaaacgcacacga

SEQ ID NO: 906254 - RNA, 19 nt, Artificial Sequence
  Description of Artificial Sequence: Synthetic oligonucleotide
  Sense strand starting at position 290 of SEQ ID NO: 589029
gugugcguuugauuaaaca

SEQ ID NO: 906255 - RNA, 19 nt, Artificial Sequence
  Description of Artificial Sequence: Synthetic oligonucleotide
  Antisense strand to SEQ ID NO: 906254
uguuuaaucaaacgcacac

SEQ ID NO: 906256 - RNA, 19 nt, Artificial Sequence
  Description of Artificial Sequence: Synthetic oligonucleotide
  Sense strand starting at position 1440 of SEQ ID NO: 589029
gugggauccuuggaggugu

SEQ ID NO: 906257 - RNA, 19 nt, Artificial Sequence
  Description of Artificial Sequence: Synthetic oligonucleotide
  Antisense strand to SEQ ID NO: 906256
acaccuccaaggaucccac

SEQ ID NO: 906258 - RNA, 19 nt, Artificial Sequence
  Description of Artificial Sequence: Synthetic oligonucleotide
  Sense strand starting at position 1493 of SEQ ID NO: 589029
ccgaaaguauccucugggu

SEQ ID NO: 906259 - RNA, 19 nt, Artificial Sequence
  Description of Artificial Sequence: Synthetic oligonucleotide
  Antisense strand to SEQ ID NO: 906258
acccagaggauacuuucgg

SEQ ID NO: 906260 - RNA, 19 nt, Artificial Sequence
  Description of Artificial Sequence: Synthetic oligonucleotide
  Sense strand starting at position 1495 of SEQ ID NO: 589029
gaaaguauccucuggguca

SEQ ID NO: 906261 - RNA, 19 nt, Artificial Sequence
  Description of Artificial Sequence: Synthetic oligonucleotide
  Antisense strand to SEQ ID NO: 906260
ugacccagaggauacuuuc

SEQ ID NO: 906262 - RNA, 19 nt, Artificial Sequence
  Description of Artificial Sequence: Synthetic oligonucleotide
  Sense strand starting at position 1497 of SEQ ID NO: 589029
aaguauccucugggucagu

SEQ ID NO: 906263 - RNA, 19 nt, Artificial Sequence
  Description of Artificial Sequence: Synthetic oligonucleotide
  Antisense strand to SEQ ID NO: 906262
acugacccagaggauacuu

SEQ ID NO: 906264 - RNA, 19 nt, Artificial Sequence
  Description of Artificial Sequence: Synthetic oligonucleotide
  Sense strand starting at position 1507 of SEQ ID NO: 589029
ugggucaguuucuguggaa

SEQ ID NO: 906265 - RNA, 19 nt, Artificial Sequence
  Description of Artificial Sequence: Synthetic oligonucleotide
  Antisense strand to SEQ ID NO: 906264
uuccacagaaacugaccca

SEQ ID NO: 906266 - RNA, 19 nt, Artificial Sequence
  Description of Artificial Sequence: Synthetic oligonucleotide
  Sense strand starting at position 1508 of SEQ ID NO: 589029
gggucaguuucuguggaau

SEQ ID NO: 906267 - RNA, 19 nt, Artificial Sequence
  Description of Artificial Sequence: Synthetic oligonucleotide
  Antisense strand to SEQ ID NO: 906266
auuccacagaaacugaccc

SEQ ID NO: 906268 - RNA, 19 nt, Artificial Sequence
  Description of Artificial Sequence: Synthetic oligonucleotide
  Sense strand starting at position 1510 of SEQ ID NO: 589029
gucaguuucuguggaauaa

SEQ ID NO: 906269 - RNA, 19 nt, Artificial Sequence
  Description of Artificial Sequence: Synthetic oligonucleotide
  Antisense strand to SEQ ID NO: 906268
uuauuccacagaaacugac

SEQ ID NO: 906270 - RNA, 19 nt, Artificial Sequence
  Description of Artificial Sequence: Synthetic oligonucleotide
  Sense strand starting at position 1511 of SEQ ID NO: 589029
ucaguuucuguggaauaaa

SEQ ID NO: 906271 - RNA, 19 nt, Artificial Sequence
  Description of Artificial Sequence: Synthetic oligonucleotide
  Antisense strand to SEQ ID NO: 906270
uuuauuccacagaaacuga

SEQ ID NO: 906272 - RNA, 19 nt, Artificial Sequence
  Description of Artificial Sequence: Synthetic oligonucleotide
  Sense strand starting at position 2025 of SEQ ID NO: 589029
uaacgauucuucucggcca

SEQ ID NO: 906273 - RNA, 19 nt, Artificial Sequence
  Description of Artificial Sequence: Synthetic oligonucleotide
  Antisense strand to SEQ ID NO: 906272
uggccgagaagaaucguua

SEQ ID NO: 906274 - RNA, 19 nt, Artificial Sequence
  Description of Artificial Sequence: Synthetic oligonucleotide
  Sense strand starting at position 2027 of SEQ ID NO: 589029
acgauucuucucggccaga

SEQ ID NO: 906275 - RNA, 19 nt, Artificial Sequence
  Description of Artificial Sequence: Synthetic oligonucleotide
  Antisense strand to SEQ ID NO: 906274
ucuggccgagaagaaucgu

SEQ ID NO: 906276 - RNA, 19 nt, Artificial Sequence
  Description of Artificial Sequence: Synthetic oligonucleotide
  Sense strand starting at position 2028 of SEQ ID NO: 589029
cgauucuucucggccagag

SEQ ID NO: 906277 - RNA, 19 nt, Artificial Sequence
  Description of Artificial Sequence: Synthetic oligonucleotide
  Antisense strand to SEQ ID NO: 906276
cucuggccgagaagaaucg

SEQ ID NO: 906278 - RNA, 19 nt, Artificial Sequence
  Description of Artificial Sequence: Synthetic oligonucleotide
  Sense strand starting at position 2261 of SEQ ID NO: 589029
gcagcugauucuuccagca

SEQ ID NO: 906279 - RNA, 19 nt, Artificial Sequence
  Description of Artificial Sequence: Synthetic oligonucleotide
  Antisense strand to SEQ ID NO: 906278
ugcuggaagaaucagcugc

SEQ ID NO: 906280 - RNA, 19 nt, Artificial Sequence
  Description of Artificial Sequence: Synthetic oligonucleotide
  Sense strand starting at position 2263 of SEQ ID NO: 589029
agcugauucuuccagcaga

SEQ ID NO: 906281 - RNA, 19 nt, Artificial Sequence
  Description of Artificial Sequence: Synthetic oligonucleotide
  Antisense strand to SEQ ID NO: 906280
ucugcuggaagaaucagcu

SEQ ID NO: 906282 - RNA, 19 nt, Artificial Sequence
  Description of Artificial Sequence: Synthetic oligonucleotide
  Sense strand starting at position 2343 of SEQ ID NO: 589029
cucagucucugucucaaua

SEQ ID NO: 906283 - RNA, 19 nt, Artificial Sequence
  Description of Artificial Sequence: Synthetic oligonucleotide
  Antisense strand to SEQ ID NO: 906282
uauugagacagagacugag

SEQ ID NO: 906284 - RNA, 19 nt, Artificial Sequence
  Description of Artificial Sequence: Synthetic oligonucleotide
  Sense strand starting at position 2353 of SEQ ID NO: 589029
gucucaauagaaugaugau

SEQ ID NO: 906285 - RNA, 19 nt, Artificial Sequence
  Description of Artificial Sequence: Synthetic oligonucleotide
  Antisense strand to SEQ ID NO: 906284
aucaucauucuauugagac

SEQ ID NO: 906286 - RNA, 19 nt, Artificial Sequence
  Description of Artificial Sequence: Synthetic oligonucleotide
  Sense strand starting at position 2356 of SEQ ID NO: 589029
ucaauagaaugaugaugaa

SEQ ID NO: 906287 - RNA, 19 nt, Artificial Sequence
  Description of Artificial Sequence: Synthetic oligonucleotide
  Antisense strand to SEQ ID NO: 906286
uucaucaucauucuauuga

SEQ ID NO: 906288 - RNA, 19 nt, Artificial Sequence
  Description of Artificial Sequence: Synthetic oligonucleotide
  Sense strand starting at position 2387 of SEQ ID NO: 589029
ggagauccuaaaugugguu

SEQ ID NO: 906289 - RNA, 19 nt, Artificial Sequence
  Description of Artificial Sequence: Synthetic oligonucleotide
  Antisense strand to SEQ ID NO: 906288
aaccacauuuaggaucucc

SEQ ID NO: 906290 - RNA, 19 nt, Artificial Sequence
  Description of Artificial Sequence: Synthetic oligonucleotide
  Sense strand starting at position 2390 of SEQ ID NO: 589029
gauccuaaaugugguuaaa

SEQ ID NO: 906291 - RNA, 19 nt, Artificial Sequence
  Description of Artificial Sequence: Synthetic oligonucleotide
  Antisense strand to SEQ ID NO: 906290
uuuaaccacauuuaggauc

SEQ ID NO: 906292 - RNA, 19 nt, Artificial Sequence
  Description of Artificial Sequence: Synthetic oligonucleotide
  Sense strand starting at position 2512 of SEQ ID NO: 589029
cccagaacgucucuuucuu

SEQ ID NO: 906293 - RNA, 19 nt, Artificial Sequence
  Description of Artificial Sequence: Synthetic oligonucleotide
  Antisense strand to SEQ ID NO: 906292
aagaaagagacguucuggg

SEQ ID NO: 906294 - RNA, 19 nt, Artificial Sequence
  Description of Artificial Sequence: Synthetic oligonucleotide
  Sense strand starting at position 2518 of SEQ ID NO: 589029
acgucucuuucuuauuaag

SEQ ID NO: 906295 - RNA, 19 nt, Artificial Sequence
  Description of Artificial Sequence: Synthetic oligonucleotide
  Antisense strand to SEQ ID NO: 906294
cuuaauaagaaagagacgu

SEQ ID NO: 906296 - RNA, 19 nt, Artificial Sequence
  Description of Artificial Sequence: Synthetic oligonucleotide
  Sense strand starting at position 2520 of SEQ ID NO: 589029
gucucuuucuuauuaaguu

SEQ ID NO: 906297 - RNA, 19 nt, Artificial Sequence
  Description of Artificial Sequence: Synthetic oligonucleotide
  Antisense strand to SEQ ID NO: 906296
aacuuaauaagaaagagac

SEQ ID NO: 906298 - RNA, 19 nt, Artificial Sequence
  Description of Artificial Sequence: Synthetic oligonucleotide
  Sense strand starting at position 2534 of SEQ ID NO: 589029
aaguucucacccugaggaa

SEQ ID NO: 906299 - RNA, 19 nt, Artificial Sequence
  Description of Artificial Sequence: Synthetic oligonucleotide
  Antisense strand to SEQ ID NO: 906298
uuccucagggugagaacuu

SEQ ID NO: 906300 - RNA, 19 nt, Artificial Sequence
  Description of Artificial Sequence: Synthetic oligonucleotide
  Sense strand starting at position 2618 of SEQ ID NO: 589029
acuggagauucugaccuga

SEQ ID NO: 906301 - RNA, 19 nt, Artificial Sequence
  Description of Artificial Sequence: Synthetic oligonucleotide
  Antisense strand to SEQ ID NO: 906300
ucaggucagaaucuccagu

SEQ ID NO: 906302 - RNA, 19 nt, Artificial Sequence
  Description of Artificial Sequence: Synthetic oligonucleotide
  Sense strand starting at position 2852 of SEQ ID NO: 589029
gcaggcugaguguaaagau

SEQ ID NO: 906303 - RNA, 19 nt, Artificial Sequence
  Description of Artificial Sequence: Synthetic oligonucleotide
  Antisense strand to SEQ ID NO: 906302
aucuuuacacucagccugc

SEQ ID NO: 906304 - RNA, 19 nt, Artificial Sequence
  Description of Artificial Sequence: Synthetic oligonucleotide
  Sense strand starting at position 2861 of SEQ ID NO: 589029
guguaaagaucccuugagu

SEQ ID NO: 906305 - RNA, 19 nt, Artificial Sequence
  Description of Artificial Sequence: Synthetic oligonucleotide
  Antisense strand to SEQ ID NO: 906304
acucaagggaucuuuacac

SEQ ID NO: 906306 - RNA, 19 nt, Artificial Sequence
  Description of Artificial Sequence: Synthetic oligonucleotide
  Sense strand starting at position 2920 of SEQ ID NO: 589029
acacuacagccugagugau

SEQ ID NO: 906307 - RNA, 19 nt, Artificial Sequence
  Description of Artificial Sequence: Synthetic oligonucleotide
  Antisense strand to SEQ ID NO: 906306
aucacucaggcuguagugu

SEQ ID NO: 906308 - RNA, 19 nt, Artificial Sequence
  Description of Artificial Sequence: Synthetic oligonucleotide
  Sense strand starting at position 3181 of SEQ ID NO: 589029
ugcagagagcccugauuga

SEQ ID NO: 906309 - RNA, 19 nt, Artificial Sequence
  Description of Artificial Sequence: Synthetic oligonucleotide
  Antisense strand to SEQ ID NO: 906308
ucaaucagggcucucugca

SEQ ID NO: 906310 - RNA, 19 nt, Artificial Sequence
  Description of Artificial Sequence: Synthetic oligonucleotide
  Sense strand starting at position 3208 of SEQ ID NO: 589029
gugcuuuagccuggacaag

SEQ ID NO: 906311 - RNA, 19 nt, Artificial Sequence
  Description of Artificial Sequence: Synthetic oligonucleotide
  Antisense strand to SEQ ID NO: 906310
cuuguccaggcuaaagcac

SEQ ID NO: 906312 - RNA, 19 nt, Artificial Sequence
  Description of Artificial Sequence: Synthetic oligonucleotide
  Sense strand starting at position 3209 of SEQ ID NO: 589029
ugcuuuagccuggacaaga

SEQ ID NO: 906313 - RNA, 19 nt, Artificial Sequence
  Description of Artificial Sequence: Synthetic oligonucleotide
  Antisense strand to SEQ ID NO: 906312
ucuuguccaggcuaaagca

SEQ ID NO: 906314 - RNA, 19 nt, Artificial Sequence
  Description of Artificial Sequence: Synthetic oligonucleotide
  Sense strand starting at position 3671 of SEQ ID NO: 589029
gcacuaucuuggcucacaa

SEQ ID NO: 906315 - RNA, 19 nt, Artificial Sequence
  Description of Artificial Sequence: Synthetic oligonucleotide
  Antisense strand to SEQ ID NO: 906314
uugugagccaagauagugc

SEQ ID NO: 906316 - RNA, 19 nt, Artificial Sequence
  Description of Artificial Sequence: Synthetic oligonucleotide
  Sense strand starting at position 3817 of SEQ ID NO: 589029
uggccaugcugcuuugaaa

SEQ ID NO: 906317 - RNA, 19 nt, Artificial Sequence
  Description of Artificial Sequence: Synthetic oligonucleotide
  Antisense strand to SEQ ID NO: 906316
uuucaaagcagcauggcca

SEQ ID NO: 906318 - RNA, 19 nt, Artificial Sequence
  Description of Artificial Sequence: Synthetic oligonucleotide
  Sense strand starting at position 3924 of SEQ ID NO: 589029
ggaguagugguaugaucau

SEQ ID NO: 906319 - RNA, 19 nt, Artificial Sequence
  Description of Artificial Sequence: Synthetic oligonucleotide
  Antisense strand to SEQ ID NO: 906318
augaucauaccacuacucc

SEQ ID NO: 906320 - RNA, 19 nt, Artificial Sequence
  Description of Artificial Sequence: Synthetic oligonucleotide
  Sense strand starting at position 108 of SEQ ID NO: 589030
gccuguaauugccugauau

SEQ ID NO: 906321 - RNA, 19 nt, Artificial Sequence
  Description of Artificial Sequence: Synthetic oligonucleotide
  Antisense strand to SEQ ID NO: 906320
auaucaggcaauuacaggc

SEQ ID NO: 906322 - RNA, 19 nt, Artificial Sequence
  Description of Artificial Sequence: Synthetic oligonucleotide
  Sense strand starting at position 109 of SEQ ID NO: 589030
ccuguaauugccugauauu

SEQ ID NO: 906323 - RNA, 19 nt, Artificial Sequence
  Description of Artificial Sequence: Synthetic oligonucleotide
  Antisense strand to SEQ ID NO: 906322
aauaucaggcaauuacagg

SEQ ID NO: 906324 - RNA, 19 nt, Artificial Sequence
  Description of Artificial Sequence: Synthetic oligonucleotide
  Sense strand starting at position 165 of SEQ ID NO: 589030
ucuauugaguccuuacugu

SEQ ID NO: 906325 - RNA, 19 nt, Artificial Sequence
  Description of Artificial Sequence: Synthetic oligonucleotide
  Antisense strand to SEQ ID NO: 906324
acaguaaggacucaauaga

SEQ ID NO: 906326 - RNA, 19 nt, Artificial Sequence
  Description of Artificial Sequence: Synthetic oligonucleotide
  Sense strand starting at position 171 of SEQ ID NO: 589030
gaguccuuacugugugcua

SEQ ID NO: 906327 - RNA, 19 nt, Artificial Sequence
  Description of Artificial Sequence: Synthetic oligonucleotide
  Antisense strand to SEQ ID NO: 906326
uagcacacaguaaggacuc

SEQ ID NO: 906328 - RNA, 19 nt, Artificial Sequence
  Description of Artificial Sequence: Synthetic oligonucleotide
  Sense strand starting at position 294 of SEQ ID NO: 589030
aguacaucaugcuaaguga

SEQ ID NO: 906329 - RNA, 19 nt, Artificial Sequence
  Description of Artificial Sequence: Synthetic oligonucleotide
  Antisense strand to SEQ ID NO: 906328
ucacuuagcaugauguacu

SEQ ID NO: 906330 - RNA, 19 nt, Artificial Sequence
  Description of Artificial Sequence: Synthetic oligonucleotide
  Sense strand starting at position 370 of SEQ ID NO: 589030
aggucagauucaucgagac

SEQ ID NO: 906331 - RNA, 19 nt, Artificial Sequence
  Description of Artificial Sequence: Synthetic oligonucleotide
  Antisense strand to SEQ ID NO: 906330
gucucgaugaaucugaccu

SEQ ID NO: 906332 - RNA, 19 nt, Artificial Sequence
  Description of Artificial Sequence: Synthetic oligonucleotide
  Sense strand starting at position 457 of SEQ ID NO: 589030
gguucaguucugcaagagg

SEQ ID NO: 906333 - RNA, 19 nt, Artificial Sequence
  Description of Artificial Sequence: Synthetic oligonucleotide
  Antisense strand to SEQ ID NO: 906332
ccucuugcagaacugaacc

SEQ ID NO: 906334 - RNA, 19 nt, Artificial Sequence
  Description of Artificial Sequence: Synthetic oligonucleotide
  Sense strand starting at position 485 of SEQ ID NO: 589030
ggagauuggugucacgaca

SEQ ID NO: 906335 - RNA, 19 nt, Artificial Sequence
  Description of Artificial Sequence: Synthetic oligonucleotide
  Antisense strand to SEQ ID NO: 906334
ugucgugacaccaaucucc

SEQ ID NO: 906336 - RNA, 19 nt, Artificial Sequence
  Description of Artificial Sequence: Synthetic oligonucleotide
  Sense strand starting at position 514 of SEQ ID NO: 589030
acuggauucucugaacugu

SEQ ID NO: 906337 - RNA, 19 nt, Artificial Sequence
  Description of Artificial Sequence: Synthetic oligonucleotide
  Antisense strand to SEQ ID NO: 906336
acaguucagagaauccagu

SEQ ID NO: 906338 - RNA, 19 nt, Artificial Sequence
  Description of Artificial Sequence: Synthetic oligonucleotide
  Sense strand starting at position 697 of SEQ ID NO: 589030
ugugguagcaggugucuau

SEQ ID NO: 906339 - RNA, 19 nt, Artificial Sequence
  Description of Artificial Sequence: Synthetic oligonucleotide
  Antisense strand to SEQ ID NO: 906338
auagacaccugcuaccaca

SEQ ID NO: 906340 - RNA, 19 nt, Artificial Sequence
  Description of Artificial Sequence: Synthetic oligonucleotide
  Sense strand starting at position 701 of SEQ ID NO: 589030
guagcaggugucuauaauu

SEQ ID NO: 906341 - RNA, 19 nt, Artificial Sequence
  Description of Artificial Sequence: Synthetic oligonucleotide
  Antisense strand to SEQ ID NO: 906340
aauuauagacaccugcuac

SEQ ID NO: 906342 - RNA, 19 nt, Artificial Sequence
  Description of Artificial Sequence: Synthetic oligonucleotide
  Sense strand starting at position 843 of SEQ ID NO: 589030
caguaaguauuacuguguu

SEQ ID NO: 906343 - RNA, 19 nt, Artificial Sequence
  Description of Artificial Sequence: Synthetic oligonucleotide
  Antisense strand to SEQ ID NO: 906342
aacacaguaauacuuacug

SEQ ID NO: 906344 - RNA, 19 nt, Artificial Sequence
  Description of Artificial Sequence: Synthetic oligonucleotide
  Sense strand starting at position 849 of SEQ ID NO: 589030
guauuacuguguuacauua

SEQ ID NO: 906345 - RNA, 19 nt, Artificial Sequence
  Description of Artificial Sequence: Synthetic oligonucleotide
  Antisense strand to SEQ ID NO: 906344
uaauguaacacaguaauac

SEQ ID NO: 906346 - RNA, 19 nt, Artificial Sequence
  Description of Artificial Sequence: Synthetic oligonucleotide
  Sense strand starting at position 918 of SEQ ID NO: 589030
ugaguccaggccuguuaga

SEQ ID NO: 906347 - RNA, 19 nt, Artificial Sequence
  Description of Artificial Sequence: Synthetic oligonucleotide
  Antisense strand to SEQ ID NO: 906346
ucuaacaggccuggacuca

SEQ ID NO: 906348 - RNA, 19 nt, Artificial Sequence
  Description of Artificial Sequence: Synthetic oligonucleotide
  Sense strand starting at position 953 of SEQ ID NO: 589030
ccagauaucucgucccauc

SEQ ID NO: 906349 - RNA, 19 nt, Artificial Sequence
  Description of Artificial Sequence: Synthetic oligonucleotide
  Antisense strand to SEQ ID NO: 906348
gaugggacgagauaucugg

SEQ ID NO: 906350 - RNA, 19 nt, Artificial Sequence
  Description of Artificial Sequence: Synthetic oligonucleotide
  Sense strand starting at position 1407 of SEQ ID NO: 589030
gcaagagccuucucuggaa

SEQ ID NO: 906351 - RNA, 19 nt, Artificial Sequence
  Description of Artificial Sequence: Synthetic oligonucleotide
  Antisense strand to SEQ ID NO: 906350
uuccagagaaggcucuugc

SEQ ID NO: 906352 - RNA, 19 nt, Artificial Sequence
  Description of Artificial Sequence: Synthetic oligonucleotide
  Sense strand starting at position 1670 of SEQ ID NO: 589030
uucgauccuucuuggguua

SEQ ID NO: 906353 - RNA, 19 nt, Artificial Sequence
  Description of Artificial Sequence: Synthetic oligonucleotide
  Antisense strand to SEQ ID NO: 906352
uaacccaagaaggaucgaa

SEQ ID NO: 906354 - RNA, 19 nt, Artificial Sequence
  Description of Artificial Sequence: Synthetic oligonucleotide
  Sense strand starting at position 1673 of SEQ ID NO: 589030
gauccuucuuggguuagca

SEQ ID NO: 906355 - RNA, 19 nt, Artificial Sequence
  Description of Artificial Sequence: Synthetic oligonucleotide
  Antisense strand to SEQ ID NO: 906354
ugcuaacccaagaaggauc

SEQ ID NO: 906356 - RNA, 19 nt, Artificial Sequence
  Description of Artificial Sequence: Synthetic oligonucleotide
  Sense strand starting at position 1675 of SEQ ID NO: 589030
uccuucuuggguuagcaaa

SEQ ID NO: 906357 - RNA, 19 nt, Artificial Sequence
  Description of Artificial Sequence: Synthetic oligonucleotide
  Antisense strand to SEQ ID NO: 906356
uuugcuaacccaagaagga

SEQ ID NO: 906358 - RNA, 19 nt, Artificial Sequence
  Description of Artificial Sequence: Synthetic oligonucleotide
  Sense strand starting at position 2538 of SEQ ID NO: 589030
guguaaaguacauggcauu

SEQ ID NO: 906359 - RNA, 19 nt, Artificial Sequence
  Description of Artificial Sequence: Synthetic oligonucleotide
  Antisense strand to SEQ ID NO: 906358
aaugccauguacuuuacac

SEQ ID NO: 906360 - RNA, 19 nt, Artificial Sequence
  Description of Artificial Sequence: Synthetic oligonucleotide
  Sense strand starting at position 2567 of SEQ ID NO: 589030
ucacguugcuguuaacauu

SEQ ID NO: 906361 - RNA, 19 nt, Artificial Sequence
  Description of Artificial Sequence: Synthetic oligonucleotide
  Antisense strand to SEQ ID NO: 906360
aauguuaacagcaacguga

SEQ ID NO: 906362 - RNA, 19 nt, Artificial Sequence
  Description of Artificial Sequence: Synthetic oligonucleotide
  Sense strand starting at position 2658 of SEQ ID NO: 589030
ccaggauccuuaccggaua

SEQ ID NO: 906363 - RNA, 19 nt, Artificial Sequence
  Description of Artificial Sequence: Synthetic oligonucleotide
  Antisense strand to SEQ ID NO: 906362
uauccgguaaggauccugg

SEQ ID NO: 906364 - RNA, 19 nt, Artificial Sequence
  Description of Artificial Sequence: Synthetic oligonucleotide
  Sense strand starting at position 2886 of SEQ ID NO: 589030
uccgcaacuccugguacau

SEQ ID NO: 906365 - RNA, 19 nt, Artificial Sequence
  Description of Artificial Sequence: Synthetic oligonucleotide
  Antisense strand to SEQ ID NO: 906364
auguaccaggaguugcgga

SEQ ID NO: 906366 - RNA, 19 nt, Artificial Sequence
  Description of Artificial Sequence: Synthetic oligonucleotide
  Sense strand starting at position 2896 of SEQ ID NO: 589030
cugguacaucugggaaacu

SEQ ID NO: 906367 - RNA, 19 nt, Artificial Sequence
  Description of Artificial Sequence: Synthetic oligonucleotide
  Antisense strand to SEQ ID NO: 906366
aguuucccagauguaccag

SEQ ID NO: 906368 - RNA, 19 nt, Artificial Sequence
  Description of Artificial Sequence: Synthetic oligonucleotide
  Sense strand starting at position 3158 of SEQ ID NO: 589030
agaaacuucucaggagauc

SEQ ID NO: 906369 - RNA, 19 nt, Artificial Sequence
  Description of Artificial Sequence: Synthetic oligonucleotide
  Antisense strand to SEQ ID NO: 906368
gaucuccugagaaguuucu

SEQ ID NO: 906370 - RNA, 19 nt, Artificial Sequence
  Description of Artificial Sequence: Synthetic oligonucleotide
  Sense strand starting at position 3645 of SEQ ID NO: 589030
ggaucaucuccgcggauga

SEQ ID NO: 906371 - RNA, 19 nt, Artificial Sequence
  Description of Artificial Sequence: Synthetic oligonucleotide
  Antisense strand to SEQ ID NO: 906370
ucauccgcggagaugaucc

SEQ ID NO: 906372 - RNA, 19 nt, Artificial Sequence
  Description of Artificial Sequence: Synthetic oligonucleotide
  Sense strand starting at position 3646 of SEQ ID NO: 589030
gaucaucuccgcggaugaa

SEQ ID NO: 906373 - RNA, 19 nt, Artificial Sequence
  Description of Artificial Sequence: Synthetic oligonucleotide
  Antisense strand to SEQ ID NO: 906372
uucauccgcggagaugauc

SEQ ID NO: 906374 - RNA, 19 nt, Artificial Sequence
  Description of Artificial Sequence: Synthetic oligonucleotide
  Sense strand starting at position 3657 of SEQ ID NO: 589030
cggaugaagugguggagaa

SEQ ID NO: 906375 - RNA, 19 nt, Artificial Sequence
  Description of Artificial Sequence: Synthetic oligonucleotide
  Antisense strand to SEQ ID NO: 906374
uucuccaccacuucauccg

SEQ ID NO: 906376 - RNA, 19 nt, Artificial Sequence
  Description of Artificial Sequence: Synthetic oligonucleotide
  Sense strand starting at position 3661 of SEQ ID NO: 589030
ugaagugguggagaaguuu

SEQ ID NO: 906377 - RNA, 19 nt, Artificial Sequence
  Description of Artificial Sequence: Synthetic oligonucleotide
  Antisense strand to SEQ ID NO: 906376
aaacuucuccaccacuuca

SEQ ID NO: 906378 - RNA, 19 nt, Artificial Sequence
  Description of Artificial Sequence: Synthetic oligonucleotide
  Sense strand starting at position 3669 of SEQ ID NO: 589030
uggagaaguuucugccagu

SEQ ID NO: 906379 - RNA, 19 nt, Artificial Sequence
  Description of Artificial Sequence: Synthetic oligonucleotide
  Antisense strand to SEQ ID NO: 906378
acuggcagaaacuucucca

SEQ ID NO: 906380 - RNA, 19 nt, Artificial Sequence
  Description of Artificial Sequence: Synthetic oligonucleotide
  Sense strand starting at position 3670 of SEQ ID NO: 589030
ggagaaguuucugccaguu

SEQ ID NO: 906381 - RNA, 19 nt, Artificial Sequence
  Description of Artificial Sequence: Synthetic oligonucleotide
  Antisense strand to SEQ ID NO: 906380
aacuggcagaaacuucucc

SEQ ID NO: 906382 - RNA, 19 nt, Artificial Sequence
  Description of Artificial Sequence: Synthetic oligonucleotide
  Sense strand starting at position 3730 of SEQ ID NO: 589030
ccgccuucucuccuguauu

SEQ ID NO: 906383 - RNA, 19 nt, Artificial Sequence
  Description of Artificial Sequence: Synthetic oligonucleotide
  Antisense strand to SEQ ID NO: 906382
aauacaggagagaaggcgg

SEQ ID NO: 906384 - RNA, 19 nt, Artificial Sequence
  Description of Artificial Sequence: Synthetic oligonucleotide
  Sense strand starting at position 3731 of SEQ ID NO: 589030
cgccuucucuccuguauuu

SEQ ID NO: 906385 - RNA, 19 nt, Artificial Sequence
  Description of Artificial Sequence: Synthetic oligonucleotide
  Antisense strand to SEQ ID NO: 906384
aaauacaggagagaaggcg

SEQ ID NO: 906386 - RNA, 19 nt, Artificial Sequence
  Description of Artificial Sequence: Synthetic oligonucleotide
  Sense strand starting at position 3775 of SEQ ID NO: 589030
cuaccaagauguccaggau

SEQ ID NO: 906387 - RNA, 19 nt, Artificial Sequence
  Description of Artificial Sequence: Synthetic oligonucleotide
  Antisense strand to SEQ ID NO: 906386
auccuggacaucuugguag

SEQ ID NO: 906388 - RNA, 19 nt, Artificial Sequence
  Description of Artificial Sequence: Synthetic oligonucleotide
  Sense strand starting at position 192 of SEQ ID NO: 589031
gguggucggucccuguaau

SEQ ID NO: 906389 - RNA, 19 nt, Artificial Sequence
  Description of Artificial Sequence: Synthetic oligonucleotide
  Antisense strand to SEQ ID NO: 906388
auuacagggaccgaccacc

SEQ ID NO: 906390 - RNA, 19 nt, Artificial Sequence
  Description of Artificial Sequence: Synthetic oligonucleotide
  Sense strand starting at position 193 of SEQ ID NO: 589031
guggucggucccuguaauc

SEQ ID NO: 906391 - RNA, 19 nt, Artificial Sequence
  Description of Artificial Sequence: Synthetic oligonucleotide
  Antisense strand to SEQ ID NO: 906390
gauuacagggaccgaccac

SEQ ID NO: 906392 - RNA, 19 nt, Artificial Sequence
  Description of Artificial Sequence: Synthetic oligonucleotide
  Sense strand starting at position 509 of SEQ ID NO: 589031
uccaguuuagccgggauua

SEQ ID NO: 906393 - RNA, 19 nt, Artificial Sequence
  Description of Artificial Sequence: Synthetic oligonucleotide
  Antisense strand to SEQ ID NO: 906392
uaaucccggcuaaacugga

SEQ ID NO: 906394 - RNA, 19 nt, Artificial Sequence
  Description of Artificial Sequence: Synthetic oligonucleotide
  Sense strand starting at position 510 of SEQ ID NO: 589031
ccaguuuagccgggauuac

SEQ ID NO: 906395 - RNA, 19 nt, Artificial Sequence
  Description of Artificial Sequence: Synthetic oligonucleotide
  Antisense strand to SEQ ID NO: 906394
guaaucccggcuaaacugg

SEQ ID NO: 906396 - RNA, 19 nt, Artificial Sequence
  Description of Artificial Sequence: Synthetic oligonucleotide
  Sense strand starting at position 511 of SEQ ID NO: 589031
caguuuagccgggauuaca

SEQ ID NO: 906397 - RNA, 19 nt, Artificial Sequence
  Description of Artificial Sequence: Synthetic oligonucleotide
  Antisense strand to SEQ ID NO: 906396
uguaaucccggcuaaacug

SEQ ID NO: 906398 - RNA, 19 nt, Artificial Sequence
  Description of Artificial Sequence: Synthetic oligonucleotide
  Sense strand starting at position 715 of SEQ ID NO: 589031
aggugucucuguggaacaa

SEQ ID NO: 906399 - RNA, 19 nt, Artificial Sequence
  Description of Artificial Sequence: Synthetic oligonucleotide
  Antisense strand to SEQ ID NO: 906398
uuguuccacagagacaccu

SEQ ID NO: 906400 - RNA, 19 nt, Artificial Sequence
  Description of Artificial Sequence: Synthetic oligonucleotide
  Sense strand starting at position 716 of SEQ ID NO: 589031
ggugucucuguggaacaau

SEQ ID NO: 906401 - RNA, 19 nt, Artificial Sequence
  Description of Artificial Sequence: Synthetic oligonucleotide
  Antisense strand to SEQ ID NO: 906400
auuguuccacagagacacc

SEQ ID NO: 906402 - RNA, 19 nt, Artificial Sequence
  Description of Artificial Sequence: Synthetic oligonucleotide
  Sense strand starting at position 759 of SEQ ID NO: 589031
gagacuugaucuugaggaa

SEQ ID NO: 906403 - RNA, 19 nt, Artificial Sequence
  Description of Artificial Sequence: Synthetic oligonucleotide
  Antisense strand to SEQ ID NO: 906402
uuccucaagaucaagucuc

SEQ ID NO: 906404 - RNA, 19 nt, Artificial Sequence
  Description of Artificial Sequence: Synthetic oligonucleotide
  Sense strand starting at position 762 of SEQ ID NO: 589031
acuugaucuugaggaaagc

SEQ ID NO: 906405 - RNA, 19 nt, Artificial Sequence
  Description of Artificial Sequence: Synthetic oligonucleotide
  Antisense strand to SEQ ID NO: 906404
gcuuuccucaagaucaagu

SEQ ID NO: 906406 - RNA, 19 nt, Artificial Sequence
  Description of Artificial Sequence: Synthetic oligonucleotide
  Sense strand starting at position 974 of SEQ ID NO: 589031
ccaggaaucugccugugac

SEQ ID NO: 906407 - RNA, 19 nt, Artificial Sequence
  Description of Artificial Sequence: Synthetic oligonucleotide
  Antisense strand to SEQ ID NO: 906406
gucacaggcagauuccugg

SEQ ID NO: 906408 - RNA, 19 nt, Artificial Sequence
  Description of Artificial Sequence: Synthetic oligonucleotide
  Sense strand starting at position 975 of SEQ ID NO: 589031
caggaaucugccugugaca

SEQ ID NO: 906409 - RNA, 19 nt, Artificial Sequence
  Description of Artificial Sequence: Synthetic oligonucleotide
  Antisense strand to SEQ ID NO: 906408
ugucacaggcagauuccug

SEQ ID NO: 906410 - RNA, 19 nt, Artificial Sequence
  Description of Artificial Sequence: Synthetic oligonucleotide
  Sense strand starting at position 977 of SEQ ID NO: 589031
ggaaucugccugugacaug

SEQ ID NO: 906411 - RNA, 19 nt, Artificial Sequence
  Description of Artificial Sequence: Synthetic oligonucleotide
  Antisense strand to SEQ ID NO: 906410
caugucacaggcagauucc

SEQ ID NO: 906412 - RNA, 19 nt, Artificial Sequence
  Description of Artificial Sequence: Synthetic oligonucleotide
  Sense strand starting at position 1004 of SEQ ID NO: 589031
aaagcauacugugugcaaa

SEQ ID NO: 906413 - RNA, 19 nt, Artificial Sequence
  Description of Artificial Sequence: Synthetic oligonucleotide
  Antisense strand to SEQ ID NO: 906412
uuugcacacaguaugcuuu

SEQ ID NO: 906414 - RNA, 19 nt, Artificial Sequence
  Description of Artificial Sequence: Synthetic oligonucleotide
  Sense strand starting at position 1006 of SEQ ID NO: 589031
agcauacugugugcaaaga

SEQ ID NO: 906415 - RNA, 19 nt, Artificial Sequence
  Description of Artificial Sequence: Synthetic oligonucleotide
  Antisense strand to SEQ ID NO: 906414
ucuuugcacacaguaugcu

SEQ ID NO: 906416 - RNA, 19 nt, Artificial Sequence
  Description of Artificial Sequence: Synthetic oligonucleotide
  Sense strand starting at position 1015 of SEQ ID NO: 589031
ugugcaaagacaggaauua

SEQ ID NO: 906417 - RNA, 19 nt, Artificial Sequence
  Description of Artificial Sequence: Synthetic oligonucleotide
  Antisense strand to SEQ ID NO: 906416
uaauuccugucuuugcaca

SEQ ID NO: 906418 - RNA, 19 nt, Artificial Sequence
  Description of Artificial Sequence: Synthetic oligonucleotide
  Sense strand starting at position 1026 of SEQ ID NO: 589031
aggaauuaaucugcaucuu

SEQ ID NO: 906419 - RNA, 19 nt, Artificial Sequence
  Description of Artificial Sequence: Synthetic oligonucleotide
  Antisense strand to SEQ ID NO: 906418
aagaugcagauuaauuccu

SEQ ID NO: 906420 - RNA, 19 nt, Artificial Sequence
  Description of Artificial Sequence: Synthetic oligonucleotide
  Sense strand starting at position 1027 of SEQ ID NO: 589031
ggaauuaaucugcaucuua

SEQ ID NO: 906421 - RNA, 19 nt, Artificial Sequence
  Description of Artificial Sequence: Synthetic oligonucleotide
  Antisense strand to SEQ ID NO: 906420
uaagaugcagauuaauucc

SEQ ID NO: 906422 - RNA, 19 nt, Artificial Sequence
  Description of Artificial Sequence: Synthetic oligonucleotide
  Sense strand starting at position 1086 of SEQ ID NO: 589031
ggcucucccuaucugagau

SEQ ID NO: 906423 - RNA, 19 nt, Artificial Sequence
  Description of Artificial Sequence: Synthetic oligonucleotide
  Antisense strand to SEQ ID NO: 906422
aucucagauagggagagcc

SEQ ID NO: 906424 - RNA, 19 nt, Artificial Sequence
  Description of Artificial Sequence: Synthetic oligonucleotide
  Sense strand starting at position 1181 of SEQ ID NO: 589031
agauuaaacuagcauuuga

SEQ ID NO: 906425 - RNA, 19 nt, Artificial Sequence
  Description of Artificial Sequence: Synthetic oligonucleotide
  Antisense strand to SEQ ID NO: 906424
ucaaaugcuaguuuaaucu

SEQ ID NO: 906426 - RNA, 19 nt, Artificial Sequence
  Description of Artificial Sequence: Synthetic oligonucleotide
  Sense strand starting at position 1249 of SEQ ID NO: 589031
cagggagugucguuagcga

SEQ ID NO: 906427 - RNA, 19 nt, Artificial Sequence
  Description of Artificial Sequence: Synthetic oligonucleotide
  Antisense strand to SEQ ID NO: 906426
ucgcuaacgacacucccug

SEQ ID NO: 906428 - RNA, 19 nt, Artificial Sequence
  Description of Artificial Sequence: Synthetic oligonucleotide
  Sense strand starting at position 1250 of SEQ ID NO: 589031
agggagugucguuagcgau

SEQ ID NO: 906429 - RNA, 19 nt, Artificial Sequence
  Description of Artificial Sequence: Synthetic oligonucleotide
  Antisense strand to SEQ ID NO: 906428
aucgcuaacgacacucccu

SEQ ID NO: 906430 - RNA, 19 nt, Artificial Sequence
  Description of Artificial Sequence: Synthetic oligonucleotide
  Sense strand starting at position 1251 of SEQ ID NO: 589031
gggagugucguuagcgaug

SEQ ID NO: 906431 - RNA, 19 nt, Artificial Sequence
  Description of Artificial Sequence: Synthetic oligonucleotide
  Antisense strand to SEQ ID NO: 906430
caucgcuaacgacacuccc

SEQ ID NO: 906432 - RNA, 19 nt, Artificial Sequence
  Description of Artificial Sequence: Synthetic oligonucleotide
  Sense strand starting at position 1252 of SEQ ID NO: 589031
ggagugucguuagcgaugu

SEQ ID NO: 906433 - RNA, 19 nt, Artificial Sequence
  Description of Artificial Sequence: Synthetic oligonucleotide
  Antisense strand to SEQ ID NO: 906432
acaucgcuaacgacacucc

SEQ ID NO: 906434 - RNA, 19 nt, Artificial Sequence
  Description of Artificial Sequence: Synthetic oligonucleotide
  Sense strand starting at position 1254 of SEQ ID NO: 589031
agugucguuagcgauguaa

SEQ ID NO: 906435 - RNA, 19 nt, Artificial Sequence
  Description of Artificial Sequence: Synthetic oligonucleotide
  Antisense strand to SEQ ID NO: 906434
uuacaucgcuaacgacacu

SEQ ID NO: 906436 - RNA, 19 nt, Artificial Sequence
  Description of Artificial Sequence: Synthetic oligonucleotide
  Sense strand starting at position 1256 of SEQ ID NO: 589031
ugucguuagcgauguaaca

SEQ ID NO: 906437 - RNA, 19 nt, Artificial Sequence
  Description of Artificial Sequence: Synthetic oligonucleotide
  Antisense strand to SEQ ID NO: 906436
uguuacaucgcuaacgaca

SEQ ID NO: 906438 - RNA, 19 nt, Artificial Sequence
  Description of Artificial Sequence: Synthetic oligonucleotide
  Sense strand starting at position 1284 of SEQ ID NO: 589031
cuguuugguccgggaacgu

SEQ ID NO: 906439 - RNA, 19 nt, Artificial Sequence
  Description of Artificial Sequence: Synthetic oligonucleotide
  Antisense strand to SEQ ID NO: 906438
acguucccggaccaaacag

SEQ ID NO: 906440 - RNA, 19 nt, Artificial Sequence
  Description of Artificial Sequence: Synthetic oligonucleotide
  Sense strand starting at position 1285 of SEQ ID NO: 589031
uguuugguccgggaacgua

SEQ ID NO: 906441 - RNA, 19 nt, Artificial Sequence
  Description of Artificial Sequence: Synthetic oligonucleotide
  Antisense strand to SEQ ID NO: 906440
uacguucccggaccaaaca

SEQ ID NO: 906442 - RNA, 19 nt, Artificial Sequence
  Description of Artificial Sequence: Synthetic oligonucleotide
  Sense strand starting at position 2181 of SEQ ID NO: 589031
cccgaauuugacuggugca

SEQ ID NO: 906443 - RNA, 19 nt, Artificial Sequence
  Description of Artificial Sequence: Synthetic oligonucleotide
  Antisense strand to SEQ ID NO: 906442
ugcaccagucaaauucggg

SEQ ID NO: 906444 - RNA, 19 nt, Artificial Sequence
  Description of Artificial Sequence: Synthetic oligonucleotide
  Sense strand starting at position 2343 of SEQ ID NO: 589031
gcguugucuccggagucga

SEQ ID NO: 906445 - RNA, 19 nt, Artificial Sequence
  Description of Artificial Sequence: Synthetic oligonucleotide
  Antisense strand to SEQ ID NO: 906444
ucgacuccggagacaacgc

SEQ ID NO: 906446 - RNA, 19 nt, Artificial Sequence
  Description of Artificial Sequence: Synthetic oligonucleotide
  Sense strand starting at position 2344 of SEQ ID NO: 589031
cguugucuccggagucgau

SEQ ID NO: 906447 - RNA, 19 nt, Artificial Sequence
  Description of Artificial Sequence: Synthetic oligonucleotide
  Antisense strand to SEQ ID NO: 906446
aucgacuccggagacaacg

SEQ ID NO: 906448 - RNA, 19 nt, Artificial Sequence
  Description of Artificial Sequence: Synthetic oligonucleotide
  Sense strand starting at position 2345 of SEQ ID NO: 589031
guugucuccggagucgauu

SEQ ID NO: 906449 - RNA, 19 nt, Artificial Sequence
  Description of Artificial Sequence: Synthetic oligonucleotide
  Antisense strand to SEQ ID NO: 906448
aaucgacuccggagacaac

SEQ ID NO: 906450 - RNA, 19 nt, Artificial Sequence
  Description of Artificial Sequence: Synthetic oligonucleotide
  Sense strand starting at position 2932 of SEQ ID NO: 589031
uaggccuguggguagaaua

SEQ ID NO: 906451 - RNA, 19 nt, Artificial Sequence
  Description of Artificial Sequence: Synthetic oligonucleotide
  Antisense strand to SEQ ID NO: 906450
uauucuacccacaggccua

SEQ ID NO: 906452 - RNA, 19 nt, Artificial Sequence
  Description of Artificial Sequence: Synthetic oligonucleotide
  Sense strand starting at position 3060 of SEQ ID NO: 589031
ggugagcgguugucagaga

SEQ ID NO: 906453 - RNA, 19 nt, Artificial Sequence
  Description of Artificial Sequence: Synthetic oligonucleotide
  Antisense strand to SEQ ID NO: 906452
ucucugacaaccgcucacc

SEQ ID NO: 906454 - RNA, 19 nt, Artificial Sequence
  Description of Artificial Sequence: Synthetic oligonucleotide
  Sense strand starting at position 3067 of SEQ ID NO: 589031
gguugucagagagguggaa

SEQ ID NO: 906455 - RNA, 19 nt, Artificial Sequence
  Description of Artificial Sequence: Synthetic oligonucleotide
  Antisense strand to SEQ ID NO: 906454
uuccaccucucugacaacc

SEQ ID NO: 906456 - RNA, 19 nt, Artificial Sequence
  Description of Artificial Sequence: Synthetic oligonucleotide
  Sense strand starting at position 3172 of SEQ ID NO: 589031
uauggauuugugugcccaa

SEQ ID NO: 906457 - RNA, 19 nt, Artificial Sequence
  Description of Artificial Sequence: Synthetic oligonucleotide
  Antisense strand to SEQ ID NO: 906456
uugggcacacaaauccaua

SEQ ID NO: 906458 - RNA, 19 nt, Artificial Sequence
  Description of Artificial Sequence: Synthetic oligonucleotide
  Sense strand starting at position 3231 of SEQ ID NO: 589031
uggugacagucacagguua

SEQ ID NO: 906459 - RNA, 19 nt, Artificial Sequence
  Description of Artificial Sequence: Synthetic oligonucleotide
  Antisense strand to SEQ ID NO: 906458
uaaccugugacugucacca

SEQ ID NO: 906460 - RNA, 19 nt, Artificial Sequence
  Description of Artificial Sequence: Synthetic oligonucleotide
  Sense strand starting at position 3523 of SEQ ID NO: 589031
acugcucaauucggcuaaa

SEQ ID NO: 906461 - RNA, 19 nt, Artificial Sequence
  Description of Artificial Sequence: Synthetic oligonucleotide
  Antisense strand to SEQ ID NO: 906460
uuuagccgaauugagcagu

SEQ ID NO: 906462 - RNA, 19 nt, Artificial Sequence
  Description of Artificial Sequence: Synthetic oligonucleotide
  Sense strand starting at position 3526 of SEQ ID NO: 589031
gcucaauucggcuaaagug

SEQ ID NO: 906463 - RNA, 19 nt, Artificial Sequence
  Description of Artificial Sequence: Synthetic oligonucleotide
  Antisense strand to SEQ ID NO: 906462
cacuuuagccgaauugagc

SEQ ID NO: 906464 - RNA, 19 nt, Artificial Sequence
  Description of Artificial Sequence: Synthetic oligonucleotide
  Sense strand starting at position 3535 of SEQ ID NO: 589031
ggcuaaagugcuuaccaga

SEQ ID NO: 906465 - RNA, 19 nt, Artificial Sequence
  Description of Artificial Sequence: Synthetic oligonucleotide
  Antisense strand to SEQ ID NO: 906464
ucugguaagcacuuuagcc

SEQ ID NO: 906466 - RNA, 19 nt, Artificial Sequence
  Description of Artificial Sequence: Synthetic oligonucleotide
  Sense strand starting at position 3706 of SEQ ID NO: 589031
cuuccacuuccaggugaau

SEQ ID NO: 906467 - RNA, 19 nt, Artificial Sequence
  Description of Artificial Sequence: Synthetic oligonucleotide
  Antisense strand to SEQ ID NO: 906466
auucaccuggaaguggaag

SEQ ID NO: 906468 - RNA, 19 nt, Artificial Sequence
  Description of Artificial Sequence: Synthetic oligonucleotide
  Sense strand starting at position 24 of SEQ ID NO: 589032
gacacuccuccauggaagu

SEQ ID NO: 906469 - RNA, 19 nt, Artificial Sequence
  Description of Artificial Sequence: Synthetic oligonucleotide
  Antisense strand to SEQ ID NO: 906468
acuuccauggaggaguguc

SEQ ID NO: 906470 - RNA, 19 nt, Artificial Sequence
  Description of Artificial Sequence: Synthetic oligonucleotide
  Sense strand starting at position 319 of SEQ ID NO: 589032
ggacacaauugucuaguca

SEQ ID NO: 906471 - RNA, 19 nt, Artificial Sequence
  Description of Artificial Sequence: Synthetic oligonucleotide
  Antisense strand to SEQ ID NO: 906470
ugacuagacaauugugucc

SEQ ID NO: 906472 - RNA, 19 nt, Artificial Sequence
  Description of Artificial Sequence: Synthetic oligonucleotide
  Sense strand starting at position 323 of SEQ ID NO: 589032
acaauugucuagucaucca

SEQ ID NO: 906473 - RNA, 19 nt, Artificial Sequence
  Description of Artificial Sequence: Synthetic oligonucleotide
  Antisense strand to SEQ ID NO: 906472
uggaugacuagacaauugu

SEQ ID NO: 906474 - RNA, 19 nt, Artificial Sequence
  Description of Artificial Sequence: Synthetic oligonucleotide
  Sense strand starting at position 328 of SEQ ID NO: 589032
ugucuagucauccagaguc

SEQ ID NO: 906475 - RNA, 19 nt, Artificial Sequence
  Description of Artificial Sequence: Synthetic oligonucleotide
  Antisense strand to SEQ ID NO: 906474
gacucuggaugacuagaca

SEQ ID NO: 906476 - RNA, 19 nt, Artificial Sequence
  Description of Artificial Sequence: Synthetic oligonucleotide
  Sense strand starting at position 330 of SEQ ID NO: 589032
ucuagucauccagagucca

SEQ ID NO: 906477 - RNA, 19 nt, Artificial Sequence
  Description of Artificial Sequence: Synthetic oligonucleotide
  Antisense strand to SEQ ID NO: 906476
uggacucuggaugacuaga

SEQ ID NO: 906478 - RNA, 19 nt, Artificial Sequence
  Description of Artificial Sequence: Synthetic oligonucleotide
  Sense strand starting at position 377 of SEQ ID NO: 589032
aggugaucagcaugaacca

SEQ ID NO: 906479 - RNA, 19 nt, Artificial Sequence
  Description of Artificial Sequence: Synthetic oligonucleotide
  Antisense strand to SEQ ID NO: 906478
ugguucaugcugaucaccu

SEQ ID NO: 906480 - RNA, 19 nt, Artificial Sequence
  Description of Artificial Sequence: Synthetic oligonucleotide
  Sense strand starting at position 967 of SEQ ID NO: 589032
cucagugcuacguacauga

SEQ ID NO: 906481 - RNA, 19 nt, Artificial Sequence
  Description of Artificial Sequence: Synthetic oligonucleotide
  Antisense strand to SEQ ID NO: 906480
ucauguacguagcacugag

SEQ ID NO: 906482 - RNA, 19 nt, Artificial Sequence
  Description of Artificial Sequence: Synthetic oligonucleotide
  Sense strand starting at position 1140 of SEQ ID NO: 589032
ccgugaccaguuuggauuu

SEQ ID NO: 906483 - RNA, 19 nt, Artificial Sequence
  Description of Artificial Sequence: Synthetic oligonucleotide
  Antisense strand to SEQ ID NO: 906482
aaauccaaacuggucacgg

SEQ ID NO: 906484 - RNA, 19 nt, Artificial Sequence
  Description of Artificial Sequence: Synthetic oligonucleotide
  Sense strand starting at position 1180 of SEQ ID NO: 589032
agcucagaucuuuagagcu

SEQ ID NO: 906485 - RNA, 19 nt, Artificial Sequence
  Description of Artificial Sequence: Synthetic oligonucleotide
  Antisense strand to SEQ ID NO: 906484
agcucuaaagaucugagcu

SEQ ID NO: 906486 - RNA, 19 nt, Artificial Sequence
  Description of Artificial Sequence: Synthetic oligonucleotide
  Sense strand starting at position 1682 of SEQ ID NO: 589032
acaagcauucgccagauau

SEQ ID NO: 906487 - RNA, 19 nt, Artificial Sequence
  Description of Artificial Sequence: Synthetic oligonucleotide
  Antisense strand to SEQ ID NO: 906486
auaucuggcgaaugcuugu

SEQ ID NO: 906488 - RNA, 19 nt, Artificial Sequence
  Description of Artificial Sequence: Synthetic oligonucleotide
  Sense strand starting at position 1694 of SEQ ID NO: 589032
cagauaugcggucaguaaa

SEQ ID NO: 906489 - RNA, 19 nt, Artificial Sequence
  Description of Artificial Sequence: Synthetic oligonucleotide
  Antisense strand to SEQ ID NO: 906488
uuuacugaccgcauaucug

SEQ ID NO: 906490 - RNA, 19 nt, Artificial Sequence
  Description of Artificial Sequence: Synthetic oligonucleotide
  Sense strand starting at position 1697 of SEQ ID NO: 589032
auaugcggucaguaaauaa

SEQ ID NO: 906491 - RNA, 19 nt, Artificial Sequence
  Description of Artificial Sequence: Synthetic oligonucleotide
  Antisense strand to SEQ ID NO: 906490
uuauuuacugaccgcauau

SEQ ID NO: 906492 - RNA, 19 nt, Artificial Sequence
  Description of Artificial Sequence: Synthetic oligonucleotide
  Sense strand starting at position 1741 of SEQ ID NO: 589032
uagggaagacuaggcuuau

SEQ ID NO: 906493 - RNA, 19 nt, Artificial Sequence
  Description of Artificial Sequence: Synthetic oligonucleotide
  Antisense strand to SEQ ID NO: 906492
auaagccuagucuucccua

SEQ ID NO: 906494 - RNA, 19 nt, Artificial Sequence
  Description of Artificial Sequence: Synthetic oligonucleotide
  Sense strand starting at position 1753 of SEQ ID NO: 589032
ggcuuaugagcuugagaug

SEQ ID NO: 906495 - RNA, 19 nt, Artificial Sequence
  Description of Artificial Sequence: Synthetic oligonucleotide
  Antisense strand to SEQ ID NO: 906494
caucucaagcucauaagcc

SEQ ID NO: 906496 - RNA, 19 nt, Artificial Sequence
  Description of Artificial Sequence: Synthetic oligonucleotide
  Sense strand starting at position 1754 of SEQ ID NO: 589032
gcuuaugagcuugagaugu

SEQ ID NO: 906497 - RNA, 19 nt, Artificial Sequence
  Description of Artificial Sequence: Synthetic oligonucleotide
  Antisense strand to SEQ ID NO: 906496
acaucucaagcucauaagc

SEQ ID NO: 906498 - RNA, 19 nt, Artificial Sequence
  Description of Artificial Sequence: Synthetic oligonucleotide
  Sense strand starting at position 1767 of SEQ ID NO: 589032
agauguuuccgagacucuc

SEQ ID NO: 906499 - RNA, 19 nt, Artificial Sequence
  Description of Artificial Sequence: Synthetic oligonucleotide
  Antisense strand to SEQ ID NO: 906498
gagagucucggaaacaucu

SEQ ID NO: 906500 - RNA, 19 nt, Artificial Sequence
  Description of Artificial Sequence: Synthetic oligonucleotide
  Sense strand starting at position 1777 of SEQ ID NO: 589032
gagacucucuaagcguauu

SEQ ID NO: 906501 - RNA, 19 nt, Artificial Sequence
  Description of Artificial Sequence: Synthetic oligonucleotide
  Antisense strand to SEQ ID NO: 906500
aauacgcuuagagagucuc

SEQ ID NO: 906502 - RNA, 19 nt, Artificial Sequence
  Description of Artificial Sequence: Synthetic oligonucleotide
  Sense strand starting at position 2071 of SEQ ID NO: 589032
cauauugagcccuguagca

SEQ ID NO: 906503 - RNA, 19 nt, Artificial Sequence
  Description of Artificial Sequence: Synthetic oligonucleotide
  Antisense strand to SEQ ID NO: 906502
ugcuacagggcucaauaug

SEQ ID NO: 906504 - RNA, 19 nt, Artificial Sequence
  Description of Artificial Sequence: Synthetic oligonucleotide
  Sense strand starting at position 2073 of SEQ ID NO: 589032
uauugagcccuguagcaaa

SEQ ID NO: 906505 - RNA, 19 nt, Artificial Sequence
  Description of Artificial Sequence: Synthetic oligonucleotide
  Antisense strand to SEQ ID NO: 906504
uuugcuacagggcucaaua

SEQ ID NO: 906506 - RNA, 19 nt, Artificial Sequence
  Description of Artificial Sequence: Synthetic oligonucleotide
  Sense strand starting at position 2208 of SEQ ID NO: 589032
cccucaagcgugcuucuua

SEQ ID NO: 906507 - RNA, 19 nt, Artificial Sequence
  Description of Artificial Sequence: Synthetic oligonucleotide
  Antisense strand to SEQ ID NO: 906506
uaagaagcacgcuugaggg

SEQ ID NO: 906508 - RNA, 19 nt, Artificial Sequence
  Description of Artificial Sequence: Synthetic oligonucleotide
  Sense strand starting at position 2233 of SEQ ID NO: 589032
uauccagaagucuguaaga

SEQ ID NO: 906509 - RNA, 19 nt, Artificial Sequence
  Description of Artificial Sequence: Synthetic oligonucleotide
  Antisense strand to SEQ ID NO: 906508
ucuuacagacuucuggaua

SEQ ID NO: 906510 - RNA, 19 nt, Artificial Sequence
  Description of Artificial Sequence: Synthetic oligonucleotide
  Sense strand starting at position 2326 of SEQ ID NO: 589032
gguuuccugacagaaagcu

SEQ ID NO: 906511 - RNA, 19 nt, Artificial Sequence
  Description of Artificial Sequence: Synthetic oligonucleotide
  Antisense strand to SEQ ID NO: 906510
agcuuucugucaggaaacc

SEQ ID NO: 906512 - RNA, 19 nt, Artificial Sequence
  Description of Artificial Sequence: Synthetic oligonucleotide
  Sense strand starting at position 2367 of SEQ ID NO: 589032
ugagcuucaggguguagaa

SEQ ID NO: 906513 - RNA, 19 nt, Artificial Sequence
  Description of Artificial Sequence: Synthetic oligonucleotide
  Antisense strand to SEQ ID NO: 906512
uucuacacccugaagcuca

SEQ ID NO: 906514 - RNA, 19 nt, Artificial Sequence
  Description of Artificial Sequence: Synthetic oligonucleotide
  Sense strand starting at position 2369 of SEQ ID NO: 589032
agcuucaggguguagaaau

SEQ ID NO: 906515 - RNA, 19 nt, Artificial Sequence
  Description of Artificial Sequence: Synthetic oligonucleotide
  Antisense strand to SEQ ID NO: 906514
auuucuacacccugaagcu

SEQ ID NO: 906516 - RNA, 19 nt, Artificial Sequence
  Description of Artificial Sequence: Synthetic oligonucleotide
  Sense strand starting at position 2380 of SEQ ID NO: 589032
guagaaauuugggaucaca

SEQ ID NO: 906517 - RNA, 19 nt, Artificial Sequence
  Description of Artificial Sequence: Synthetic oligonucleotide
  Antisense strand to SEQ ID NO: 906516
ugugaucccaaauuucuac

SEQ ID NO: 906518 - RNA, 19 nt, Artificial Sequence
  Description of Artificial Sequence: Synthetic oligonucleotide
  Sense strand starting at position 2763 of SEQ ID NO: 589032
aucccaaaucuguacagua

SEQ ID NO: 906519 - RNA, 19 nt, Artificial Sequence
  Description of Artificial Sequence: Synthetic oligonucleotide
  Antisense strand to SEQ ID NO: 906518
uacuguacagauuugggau

SEQ ID NO: 906520 - RNA, 19 nt, Artificial Sequence
  Description of Artificial Sequence: Synthetic oligonucleotide
  Sense strand starting at position 2786 of SEQ ID NO: 589032
gcuaguuuccucuaccaug

SEQ ID NO: 906521 - RNA, 19 nt, Artificial Sequence
  Description of Artificial Sequence: Synthetic oligonucleotide
  Antisense strand to SEQ ID NO: 906520
caugguagaggaaacuagc

SEQ ID NO: 906522 - RNA, 19 nt, Artificial Sequence
  Description of Artificial Sequence: Synthetic oligonucleotide
  Sense strand starting at position 2791 of SEQ ID NO: 589032
uuuccucuaccaugggaau

SEQ ID NO: 906523 - RNA, 19 nt, Artificial Sequence
  Description of Artificial Sequence: Synthetic oligonucleotide
  Antisense strand to SEQ ID NO: 906522
auucccaugguagaggaaa

SEQ ID NO: 906524 - RNA, 19 nt, Artificial Sequence
  Description of Artificial Sequence: Synthetic oligonucleotide
  Sense strand starting at position 2792 of SEQ ID NO: 589032
uuccucuaccaugggaaua

SEQ ID NO: 906525 - RNA, 19 nt, Artificial Sequence
  Description of Artificial Sequence: Synthetic oligonucleotide
  Antisense strand to SEQ ID NO: 906524
uauucccaugguagaggaa

SEQ ID NO: 906526 - RNA, 19 nt, Artificial Sequence
  Description of Artificial Sequence: Synthetic oligonucleotide
  Sense strand starting at position 2845 of SEQ ID NO: 589032
acagguuacuuggaaagga

SEQ ID NO: 906527 - RNA, 19 nt, Artificial Sequence
  Description of Artificial Sequence: Synthetic oligonucleotide
  Antisense strand to SEQ ID NO: 906526
uccuuuccaaguaaccugu

SEQ ID NO: 906528 - RNA, 19 nt, Artificial Sequence
  Description of Artificial Sequence: Synthetic oligonucleotide
  Sense strand starting at position 2892 of SEQ ID NO: 589032
cugagacaugcuugcaaau

SEQ ID NO: 906529 - RNA, 19 nt, Artificial Sequence
  Description of Artificial Sequence: Synthetic oligonucleotide
  Antisense strand to SEQ ID NO: 906528
auuugcaagcaugucucag

SEQ ID NO: 906530 - RNA, 19 nt, Artificial Sequence
  Description of Artificial Sequence: Synthetic oligonucleotide
  Sense strand starting at position 2921 of SEQ ID NO: 589032
aucggaaucccagaagcua

SEQ ID NO: 906531 - RNA, 19 nt, Artificial Sequence
  Description of Artificial Sequence: Synthetic oligonucleotide
  Antisense strand to SEQ ID NO: 906530
uagcuucugggauuccgau

SEQ ID NO: 906532 - RNA, 19 nt, Artificial Sequence
  Description of Artificial Sequence: Synthetic oligonucleotide
  Sense strand starting at position 2971 of SEQ ID NO: 589032
uguaaauucuagcuuggag

SEQ ID NO: 906533 - RNA, 19 nt, Artificial Sequence
  Description of Artificial Sequence: Synthetic oligonucleotide
  Antisense strand to SEQ ID NO: 906532
cuccaagcuagaauuuaca

SEQ ID NO: 906534 - RNA, 19 nt, Artificial Sequence
  Description of Artificial Sequence: Synthetic oligonucleotide
  Sense strand starting at position 2986 of SEQ ID NO: 589032
ggagcuuggaacugaaauc

SEQ ID NO: 906535 - RNA, 19 nt, Artificial Sequence
  Description of Artificial Sequence: Synthetic oligonucleotide
  Antisense strand to SEQ ID NO: 906534
gauuucaguuccaagcucc

SEQ ID NO: 906536 - RNA, 19 nt, Artificial Sequence
  Description of Artificial Sequence: Synthetic oligonucleotide
  Sense strand starting at position 3020 of SEQ ID NO: 589032
guaacacuaacgcgaaaug

SEQ ID NO: 906537 - RNA, 19 nt, Artificial Sequence
  Description of Artificial Sequence: Synthetic oligonucleotide
  Antisense strand to SEQ ID NO: 906536
cauuucgcguuaguguuac

SEQ ID NO: 906538 - RNA, 19 nt, Artificial Sequence
  Description of Artificial Sequence: Synthetic oligonucleotide
  Sense strand starting at position 3030 of SEQ ID NO: 589032
cgcgaaauggaaggcauua

SEQ ID NO: 906539 - RNA, 19 nt, Artificial Sequence
  Description of Artificial Sequence: Synthetic oligonucleotide
  Antisense strand to SEQ ID NO: 906538
uaaugccuuccauuucgcg

SEQ ID NO: 906540 - RNA, 19 nt, Artificial Sequence
  Description of Artificial Sequence: Synthetic oligonucleotide
  Sense strand starting at position 3150 of SEQ ID NO: 589032
aaagauucccugcgcaaag

SEQ ID NO: 906541 - RNA, 19 nt, Artificial Sequence
  Description of Artificial Sequence: Synthetic oligonucleotide
  Antisense strand to SEQ ID NO: 906540
cuuugcgcagggaaucuuu

SEQ ID NO: 906542 - RNA, 19 nt, Artificial Sequence
  Description of Artificial Sequence: Synthetic oligonucleotide
  Sense strand starting at position 3151 of SEQ ID NO: 589032
aagauucccugcgcaaaga

SEQ ID NO: 906543 - RNA, 19 nt, Artificial Sequence
  Description of Artificial Sequence: Synthetic oligonucleotide
  Antisense strand to SEQ ID NO: 906542
ucuuugcgcagggaaucuu

SEQ ID NO: 906544 - RNA, 19 nt, Artificial Sequence
  Description of Artificial Sequence: Synthetic oligonucleotide
  Sense strand starting at position 3152 of SEQ ID NO: 589032
agauucccugcgcaaagau

SEQ ID NO: 906545 - RNA, 19 nt, Artificial Sequence
  Description of Artificial Sequence: Synthetic oligonucleotide
  Antisense strand to SEQ ID NO: 906544
aucuuugcgcagggaaucu

SEQ ID NO: 906546 - RNA, 19 nt, Artificial Sequence
  Description of Artificial Sequence: Synthetic oligonucleotide
  Sense strand starting at position 3301 of SEQ ID NO: 589032
uugucauuagugcaaccua

SEQ ID NO: 906547 - RNA, 19 nt, Artificial Sequence
  Description of Artificial Sequence: Synthetic oligonucleotide
  Antisense strand to SEQ ID NO: 906546
uagguugcacuaaugacaa

SEQ ID NO: 906548 - RNA, 19 nt, Artificial Sequence
  Description of Artificial Sequence: Synthetic oligonucleotide
  Sense strand starting at position 144 of SEQ ID NO: 589033
ggagcucuuugucuuggga

SEQ ID NO: 906549 - RNA, 19 nt, Artificial Sequence
  Description of Artificial Sequence: Synthetic oligonucleotide
  Antisense strand to SEQ ID NO: 906548
ucccaagacaaagagcucc

SEQ ID NO: 906550 - RNA, 19 nt, Artificial Sequence
  Description of Artificial Sequence: Synthetic oligonucleotide
  Sense strand starting at position 146 of SEQ ID NO: 589033
agcucuuugucuugggaga

SEQ ID NO: 906551 - RNA, 19 nt, Artificial Sequence
  Description of Artificial Sequence: Synthetic oligonucleotide
  Antisense strand to SEQ ID NO: 906550
ucucccaagacaaagagcu

SEQ ID NO: 906552 - RNA, 19 nt, Artificial Sequence
  Description of Artificial Sequence: Synthetic oligonucleotide
  Sense strand starting at position 147 of SEQ ID NO: 589033
gcucuuugucuugggagaa

SEQ ID NO: 906553 - RNA, 19 nt, Artificial Sequence
  Description of Artificial Sequence: Synthetic oligonucleotide
  Antisense strand to SEQ ID NO: 906552
uucucccaagacaaagagc

SEQ ID NO: 906554 - RNA, 19 nt, Artificial Sequence
  Description of Artificial Sequence: Synthetic oligonucleotide
  Sense strand starting at position 148 of SEQ ID NO: 589033
cucuuugucuugggagaaa

SEQ ID NO: 906555 - RNA, 19 nt, Artificial Sequence
  Description of Artificial Sequence: Synthetic oligonucleotide
  Antisense strand to SEQ ID NO: 906554
uuucucccaagacaaagag

SEQ ID NO: 906556 - RNA, 19 nt, Artificial Sequence
  Description of Artificial Sequence: Synthetic oligonucleotide
  Sense strand starting at position 519 of SEQ ID NO: 589033
agcuaagguggcuguuuau

SEQ ID NO: 906557 - RNA, 19 nt, Artificial Sequence
  Description of Artificial Sequence: Synthetic oligonucleotide
  Antisense strand to SEQ ID NO: 906556
auaaacagccaccuuagcu

SEQ ID NO: 906558 - RNA, 19 nt, Artificial Sequence
  Description of Artificial Sequence: Synthetic oligonucleotide
  Sense strand starting at position 522 of SEQ ID NO: 589033
uaagguggcuguuuauaua

SEQ ID NO: 906559 - RNA, 19 nt, Artificial Sequence
  Description of Artificial Sequence: Synthetic oligonucleotide
  Antisense strand to SEQ ID NO: 906558
uauauaaacagccaccuua

SEQ ID NO: 906560 - RNA, 19 nt, Artificial Sequence
  Description of Artificial Sequence: Synthetic oligonucleotide
  Sense strand starting at position 567 of SEQ ID NO: 589033
cggugauggcaggauuaug

SEQ ID NO: 906561 - RNA, 19 nt, Artificial Sequence
  Description of Artificial Sequence: Synthetic oligonucleotide
  Antisense strand to SEQ ID NO: 906560
cauaauccugccaucaccg

SEQ ID NO: 906562 - RNA, 19 nt, Artificial Sequence
  Description of Artificial Sequence: Synthetic oligonucleotide
  Sense strand starting at position 628 of SEQ ID NO: 589033
acacgcauucugcaugacu

SEQ ID NO: 906563 - RNA, 19 nt, Artificial Sequence
  Description of Artificial Sequence: Synthetic oligonucleotide
  Antisense strand to SEQ ID NO: 906562
agucaugcagaaugcgugu

SEQ ID NO: 906564 - RNA, 19 nt, Artificial Sequence
  Description of Artificial Sequence: Synthetic oligonucleotide
  Sense strand starting at position 790 of SEQ ID NO: 589033
agaagaagucucugcaggu

SEQ ID NO: 906565 - RNA, 19 nt, Artificial Sequence
  Description of Artificial Sequence: Synthetic oligonucleotide
  Antisense strand to SEQ ID NO: 906564
accugcagagacuucuucu

SEQ ID NO: 906566 - RNA, 19 nt, Artificial Sequence
  Description of Artificial Sequence: Synthetic oligonucleotide
  Sense strand starting at position 791 of SEQ ID NO: 589033
gaagaagucucugcaggua

SEQ ID NO: 906567 - RNA, 19 nt, Artificial Sequence
  Description of Artificial Sequence: Synthetic oligonucleotide
  Antisense strand to SEQ ID NO: 906566
uaccugcagagacuucuuc

SEQ ID NO: 906568 - RNA, 19 nt, Artificial Sequence
  Description of Artificial Sequence: Synthetic oligonucleotide
  Sense strand starting at position 841 of SEQ ID NO: 589033
acaggaaaguacuaauuua

SEQ ID NO: 906569 - RNA, 19 nt, Artificial Sequence
  Description of Artificial Sequence: Synthetic oligonucleotide
  Antisense strand to SEQ ID NO: 906568
uaaauuaguacuuuccugu

SEQ ID NO: 906570 - RNA, 19 nt, Artificial Sequence
  Description of Artificial Sequence: Synthetic oligonucleotide
  Sense strand starting at position 944 of SEQ ID NO: 589033
ccagacucccugggucauu

SEQ ID NO: 906571 - RNA, 19 nt, Artificial Sequence
  Description of Artificial Sequence: Synthetic oligonucleotide
  Antisense strand to SEQ ID NO: 906570
aaugacccagggagucugg

SEQ ID NO: 906572 - RNA, 19 nt, Artificial Sequence
  Description of Artificial Sequence: Synthetic oligonucleotide
  Sense strand starting at position 945 of SEQ ID NO: 589033
cagacucccugggucauua

SEQ ID NO: 906573 - RNA, 19 nt, Artificial Sequence
  Description of Artificial Sequence: Synthetic oligonucleotide
  Antisense strand to SEQ ID NO: 906572
uaaugacccagggagucug

SEQ ID NO: 906574 - RNA, 19 nt, Artificial Sequence
  Description of Artificial Sequence: Synthetic oligonucleotide
  Sense strand starting at position 949 of SEQ ID NO: 589033
cucccugggucauuaaagu

SEQ ID NO: 906575 - RNA, 19 nt, Artificial Sequence
  Description of Artificial Sequence: Synthetic oligonucleotide
  Antisense strand to SEQ ID NO: 906574
acuuuaaugacccagggag

SEQ ID NO: 906576 - RNA, 19 nt, Artificial Sequence
  Description of Artificial Sequence: Synthetic oligonucleotide
  Sense strand starting at position 955 of SEQ ID NO: 589033
gggucauuaaaguagguca

SEQ ID NO: 906577 - RNA, 19 nt, Artificial Sequence
  Description of Artificial Sequence: Synthetic oligonucleotide
  Antisense strand to SEQ ID NO: 906576
ugaccuacuuuaaugaccc

SEQ ID NO: 906578 - RNA, 19 nt, Artificial Sequence
  Description of Artificial Sequence: Synthetic oligonucleotide
  Sense strand starting at position 2927 of SEQ ID NO: 589033
cgguucuuugcucgaggua

SEQ ID NO: 906579 - RNA, 19 nt, Artificial Sequence
  Description of Artificial Sequence: Synthetic oligonucleotide
  Antisense strand to SEQ ID NO: 906578
uaccucgagcaaagaaccg

SEQ ID NO: 906580 - RNA, 19 nt, Artificial Sequence
  Description of Artificial Sequence: Synthetic oligonucleotide
  Sense strand starting at position 2928 of SEQ ID NO: 589033
gguucuuugcucgagguag

SEQ ID NO: 906581 - RNA, 19 nt, Artificial Sequence
  Description of Artificial Sequence: Synthetic oligonucleotide
  Antisense strand to SEQ ID NO: 906580
cuaccucgagcaaagaacc

SEQ ID NO: 906582 - RNA, 19 nt, Artificial Sequence
  Description of Artificial Sequence: Synthetic oligonucleotide
  Sense strand starting at position 2948 of SEQ ID NO: 589033
gcuccuguccucugaaguu

SEQ ID NO: 906583 - RNA, 19 nt, Artificial Sequence
  Description of Artificial Sequence: Synthetic oligonucleotide
  Antisense strand to SEQ ID NO: 906582
aacuucagaggacaggagc

SEQ ID NO: 906584 - RNA, 19 nt, Artificial Sequence
  Description of Artificial Sequence: Synthetic oligonucleotide
  Sense strand starting at position 2957 of SEQ ID NO: 589033
cucugaaguucuuuggaac

SEQ ID NO: 906585 - RNA, 19 nt, Artificial Sequence
  Description of Artificial Sequence: Synthetic oligonucleotide
  Antisense strand to SEQ ID NO: 906584
guuccaaagaacuucagag

SEQ ID NO: 906586 - RNA, 19 nt, Artificial Sequence
  Description of Artificial Sequence: Synthetic oligonucleotide
  Sense strand starting at position 3006 of SEQ ID NO: 589033
ccguuucuuccugagagga

SEQ ID NO: 906587 - RNA, 19 nt, Artificial Sequence
  Description of Artificial Sequence: Synthetic oligonucleotide
  Antisense strand to SEQ ID NO: 906586
uccucucaggaagaaacgg

SEQ ID NO: 906588 - RNA, 19 nt, Artificial Sequence
  Description of Artificial Sequence: Synthetic oligonucleotide
  Sense strand starting at position 3237 of SEQ ID NO: 589033
ggaggcacuggugaucauu

SEQ ID NO: 906589 - RNA, 19 nt, Artificial Sequence
  Description of Artificial Sequence: Synthetic oligonucleotide
  Antisense strand to SEQ ID NO: 906588
aaugaucaccagugccucc

SEQ ID NO: 906590 - RNA, 19 nt, Artificial Sequence
  Description of Artificial Sequence: Synthetic oligonucleotide
  Sense strand starting at position 3239 of SEQ ID NO: 589033
aggcacuggugaucauuau

SEQ ID NO: 906591 - RNA, 19 nt, Artificial Sequence
  Description of Artificial Sequence: Synthetic oligonucleotide
  Antisense strand to SEQ ID NO: 906590
auaaugaucaccagugccu

SEQ ID NO: 906592 - RNA, 19 nt, Artificial Sequence
  Description of Artificial Sequence: Synthetic oligonucleotide
  Sense strand starting at position 3246 of SEQ ID NO: 589033
ggugaucauuaugcccauu

SEQ ID NO: 906593 - RNA, 19 nt, Artificial Sequence
  Description of Artificial Sequence: Synthetic oligonucleotide
  Antisense strand to SEQ ID NO: 906592
aaugggcauaaugaucacc

SEQ ID NO: 906594 - RNA, 19 nt, Artificial Sequence
  Description of Artificial Sequence: Synthetic oligonucleotide
  Sense strand starting at position 3348 of SEQ ID NO: 589033
gaaugccuuggaugggaua

SEQ ID NO: 906595 - RNA, 19 nt, Artificial Sequence
  Description of Artificial Sequence: Synthetic oligonucleotide
  Antisense strand to SEQ ID NO: 906594
uaucccauccaaggcauuc

SEQ ID NO: 906596 - RNA, 19 nt, Artificial Sequence
  Description of Artificial Sequence: Synthetic oligonucleotide
  Sense strand starting at position 3427 of SEQ ID NO: 589033
gccaccucucccgagaagu

SEQ ID NO: 906597 - RNA, 19 nt, Artificial Sequence
  Description of Artificial Sequence: Synthetic oligonucleotide
  Antisense strand to SEQ ID NO: 906596
acuucucgggagagguggc

SEQ ID NO: 906598 - RNA, 19 nt, Artificial Sequence
  Description of Artificial Sequence: Synthetic oligonucleotide
  Sense strand starting at position 3438 of SEQ ID NO: 589033
cgagaagucuuccaugauc

SEQ ID NO: 906599 - RNA, 19 nt, Artificial Sequence
  Description of Artificial Sequence: Synthetic oligonucleotide
  Antisense strand to SEQ ID NO: 906598
gaucauggaagacuucucg

SEQ ID NO: 906600 - RNA, 19 nt, Artificial Sequence
  Description of Artificial Sequence: Synthetic oligonucleotide
  Sense strand starting at position 3440 of SEQ ID NO: 589033
agaagucuuccaugaucuc

SEQ ID NO: 906601 - RNA, 19 nt, Artificial Sequence
  Description of Artificial Sequence: Synthetic oligonucleotide
  Antisense strand to SEQ ID NO: 906600
gagaucauggaagacuucu

SEQ ID NO: 906602 - RNA, 19 nt, Artificial Sequence
  Description of Artificial Sequence: Synthetic oligonucleotide
  Sense strand starting at position 3502 of SEQ ID NO: 589033
gggcgucucuggcccuaau

SEQ ID NO: 906603 - RNA, 19 nt, Artificial Sequence
  Description of Artificial Sequence: Synthetic oligonucleotide
  Antisense strand to SEQ ID NO: 906602
auuagggccagagacgccc

SEQ ID NO: 906604 - RNA, 19 nt, Artificial Sequence
  Description of Artificial Sequence: Synthetic oligonucleotide
  Sense strand starting at position 3524 of SEQ ID NO: 589033
gcaggugaccugugucagu

SEQ ID NO: 906605 - RNA, 19 nt, Artificial Sequence
  Description of Artificial Sequence: Synthetic oligonucleotide
  Antisense strand to SEQ ID NO: 906604
acugacacaggucaccugc

SEQ ID NO: 906606 - RNA, 19 nt, Artificial Sequence
  Description of Artificial Sequence: Synthetic oligonucleotide
  Sense strand starting at position 3529 of SEQ ID NO: 589033
ugaccugugucaguaacca

SEQ ID NO: 906607 - RNA, 19 nt, Artificial Sequence
  Description of Artificial Sequence: Synthetic oligonucleotide
  Antisense strand to SEQ ID NO: 906606
ugguuacugacacagguca

SEQ ID NO: 906608 - RNA, 19 nt, Artificial Sequence
  Description of Artificial Sequence: Synthetic oligonucleotide
  Sense strand starting at position 3573 of SEQ ID NO: 589033
caggcaaugcccugagcua

SEQ ID NO: 906609 - RNA, 19 nt, Artificial Sequence
  Description of Artificial Sequence: Synthetic oligonucleotide
  Antisense strand to SEQ ID NO: 906608
uagcucagggcauugccug

SEQ ID NO: 906610 - RNA, 19 nt, Artificial Sequence
  Description of Artificial Sequence: Synthetic oligonucleotide
  Sense strand starting at position 3574 of SEQ ID NO: 589033
aggcaaugcccugagcuaa

SEQ ID NO: 906611 - RNA, 19 nt, Artificial Sequence
  Description of Artificial Sequence: Synthetic oligonucleotide
  Antisense strand to SEQ ID NO: 906610
uuagcucagggcauugccu

SEQ ID NO: 906612 - RNA, 19 nt, Artificial Sequence
  Description of Artificial Sequence: Synthetic oligonucleotide
  Sense strand starting at position 3612 of SEQ ID NO: 589033
ccuccaugauccuagguga

SEQ ID NO: 906613 - RNA, 19 nt, Artificial Sequence
  Description of Artificial Sequence: Synthetic oligonucleotide
  Antisense strand to SEQ ID NO: 906612
ucaccuaggaucauggagg

SEQ ID NO: 906614 - RNA, 19 nt, Artificial Sequence
  Description of Artificial Sequence: Synthetic oligonucleotide
  Sense strand starting at position 3615 of SEQ ID NO: 589033
ccaugauccuaggugagga

SEQ ID NO: 906615 - RNA, 19 nt, Artificial Sequence
  Description of Artificial Sequence: Synthetic oligonucleotide
  Antisense strand to SEQ ID NO: 906614
uccucaccuaggaucaugg

SEQ ID NO: 906616 - RNA, 19 nt, Artificial Sequence
  Description of Artificial Sequence: Synthetic oligonucleotide
  Sense strand starting at position 3652 of SEQ ID NO: 589033
auaccagaguauucucauc

SEQ ID NO: 906617 - RNA, 19 nt, Artificial Sequence
  Description of Artificial Sequence: Synthetic oligonucleotide
  Antisense strand to SEQ ID NO: 906616
gaugagaauacucugguau

SEQ ID NO: 906618 - RNA, 19 nt, Artificial Sequence
  Description of Artificial Sequence: Synthetic oligonucleotide
  Sense strand starting at position 3654 of SEQ ID NO: 589033
accagaguauucucaucuc

SEQ ID NO: 906619 - RNA, 19 nt, Artificial Sequence
  Description of Artificial Sequence: Synthetic oligonucleotide
  Antisense strand to SEQ ID NO: 906618
gagaugagaauacucuggu

SEQ ID NO: 906620 - RNA, 19 nt, Artificial Sequence
  Description of Artificial Sequence: Synthetic oligonucleotide
  Sense strand starting at position 3657 of SEQ ID NO: 589033
agaguauucucaucucagu

SEQ ID NO: 906621 - RNA, 19 nt, Artificial Sequence
  Description of Artificial Sequence: Synthetic oligonucleotide
  Antisense strand to SEQ ID NO: 906620
acugagaugagaauacucu

SEQ ID NO: 906622 - RNA, 19 nt, Artificial Sequence
  Description of Artificial Sequence: Synthetic oligonucleotide
  Sense strand starting at position 3847 of SEQ ID NO: 589033
gccaacuguuacccagaga

SEQ ID NO: 906623 - RNA, 19 nt, Artificial Sequence
  Description of Artificial Sequence: Synthetic oligonucleotide
  Antisense strand to SEQ ID NO: 906622
ucucuggguaacaguuggc

SEQ ID NO: 906624 - RNA, 19 nt, Artificial Sequence
  Description of Artificial Sequence: Synthetic oligonucleotide
  Sense strand starting at position 3976 of SEQ ID NO: 589033
gccugaagucagcaaugcu

SEQ ID NO: 906625 - RNA, 19 nt, Artificial Sequence
  Description of Artificial Sequence: Synthetic oligonucleotide
  Antisense strand to SEQ ID NO: 906624
agcauugcugacuucaggc

SEQ ID NO: 906626 - RNA, 19 nt, Artificial Sequence
  Description of Artificial Sequence: Synthetic oligonucleotide
  Sense strand starting at position 3983 of SEQ ID NO: 589033
gucagcaaugcugggagua

SEQ ID NO: 906627 - RNA, 19 nt, Artificial Sequence
  Description of Artificial Sequence: Synthetic oligonucleotide
  Antisense strand to SEQ ID NO: 906626
uacucccagcauugcugac

SEQ ID NO: 906628 - RNA, 19 nt, Artificial Sequence
  Description of Artificial Sequence: Synthetic oligonucleotide
  Sense strand starting at position 12 of SEQ ID NO: 589034
guaaacauuccaugaguac

SEQ ID NO: 906629 - RNA, 19 nt, Artificial Sequence
  Description of Artificial Sequence: Synthetic oligonucleotide
  Antisense strand to SEQ ID NO: 906628
guacucauggaauguuuac

SEQ ID NO: 906630 - RNA, 19 nt, Artificial Sequence
  Description of Artificial Sequence: Synthetic oligonucleotide
  Sense strand starting at position 206 of SEQ ID NO: 589034
cgauuucucucugcugcua

SEQ ID NO: 906631 - RNA, 19 nt, Artificial Sequence
  Description of Artificial Sequence: Synthetic oligonucleotide
  Antisense strand to SEQ ID NO: 906630
uagcagcagagagaaaucg

SEQ ID NO: 906632 - RNA, 19 nt, Artificial Sequence
  Description of Artificial Sequence: Synthetic oligonucleotide
  Sense strand starting at position 328 of SEQ ID NO: 589034
uguauaguaccaugaaaua

SEQ ID NO: 906633 - RNA, 19 nt, Artificial Sequence
  Description of Artificial Sequence: Synthetic oligonucleotide
  Antisense strand to SEQ ID NO: 906632
uauuucaugguacuauaca

SEQ ID NO: 906634 - RNA, 19 nt, Artificial Sequence
  Description of Artificial Sequence: Synthetic oligonucleotide
  Sense strand starting at position 389 of SEQ ID NO: 589034
ugaaacaugguggguugua

SEQ ID NO: 906635 - RNA, 19 nt, Artificial Sequence
  Description of Artificial Sequence: Synthetic oligonucleotide
  Antisense strand to SEQ ID NO: 906634
uacaacccaccauguuuca

SEQ ID NO: 906636 - RNA, 19 nt, Artificial Sequence
  Description of Artificial Sequence: Synthetic oligonucleotide
  Sense strand starting at position 583 of SEQ ID NO: 589034
augaauuaaucagugcaaa

SEQ ID NO: 906637 - RNA, 19 nt, Artificial Sequence
  Description of Artificial Sequence: Synthetic oligonucleotide
  Antisense strand to SEQ ID NO: 906636
uuugcacugauuaauucau

SEQ ID NO: 906638 - RNA, 19 nt, Artificial Sequence
  Description of Artificial Sequence: Synthetic oligonucleotide
  Sense strand starting at position 584 of SEQ ID NO: 589034
ugaauuaaucagugcaaau

SEQ ID NO: 906639 - RNA, 19 nt, Artificial Sequence
  Description of Artificial Sequence: Synthetic oligonucleotide
  Antisense strand to SEQ ID NO: 906638
auuugcacugauuaauuca

SEQ ID NO: 906640 - RNA, 19 nt, Artificial Sequence
  Description of Artificial Sequence: Synthetic oligonucleotide
  Sense strand starting at position 709 of SEQ ID NO: 589034
ugcaguuucgguguuagua

SEQ ID NO: 906641 - RNA, 19 nt, Artificial Sequence
  Description of Artificial Sequence: Synthetic oligonucleotide
  Antisense strand to SEQ ID NO: 906640
uacuaacaccgaaacugca

SEQ ID NO: 906642 - RNA, 19 nt, Artificial Sequence
  Description of Artificial Sequence: Synthetic oligonucleotide
  Sense strand starting at position 710 of SEQ ID NO: 589034
gcaguuucgguguuaguau

SEQ ID NO: 906643 - RNA, 19 nt, Artificial Sequence
  Description of Artificial Sequence: Synthetic oligonucleotide
  Antisense strand to SEQ ID NO: 906642
auacuaacaccgaaacugc

SEQ ID NO: 906644 - RNA, 19 nt, Artificial Sequence
  Description of Artificial Sequence: Synthetic oligonucleotide
  Sense strand starting at position 712 of SEQ ID NO: 589034
aguuucgguguuaguauga

SEQ ID NO: 906645 - RNA, 19 nt, Artificial Sequence
  Description of Artificial Sequence: Synthetic oligonucleotide
  Antisense strand to SEQ ID NO: 906644
ucauacuaacaccgaaacu

SEQ ID NO: 906646 - RNA, 19 nt, Artificial Sequence
  Description of Artificial Sequence: Synthetic oligonucleotide
  Sense strand starting at position 772 of SEQ ID NO: 589034
acuacaucuggcugauaaa

SEQ ID NO: 906647 - RNA, 19 nt, Artificial Sequence
  Description of Artificial Sequence: Synthetic oligonucleotide
  Antisense strand to SEQ ID NO: 906646
uuuaucagccagauguagu

SEQ ID NO: 906648 - RNA, 19 nt, Artificial Sequence
  Description of Artificial Sequence: Synthetic oligonucleotide
  Sense strand starting at position 796 of SEQ ID NO: 589034
guaauacagcucuaaacug

SEQ ID NO: 906649 - RNA, 19 nt, Artificial Sequence
  Description of Artificial Sequence: Synthetic oligonucleotide
  Antisense strand to SEQ ID NO: 906648
caguuuagagcuguauuac

SEQ ID NO: 906650 - RNA, 19 nt, Artificial Sequence
  Description of Artificial Sequence: Synthetic oligonucleotide
  Sense strand starting at position 808 of SEQ ID NO: 589034
uaaacugugcucgacaaag

SEQ ID NO: 906651 - RNA, 19 nt, Artificial Sequence
  Description of Artificial Sequence: Synthetic oligonucleotide
  Antisense strand to SEQ ID NO: 906650
cuuugucgagcacaguuua

SEQ ID NO: 906652 - RNA, 19 nt, Artificial Sequence
  Description of Artificial Sequence: Synthetic oligonucleotide
  Sense strand starting at position 878 of SEQ ID NO: 589034
ugaagaacugccugucaac

SEQ ID NO: 906653 - RNA, 19 nt, Artificial Sequence
  Description of Artificial Sequence: Synthetic oligonucleotide
  Antisense strand to SEQ ID NO: 906652
guugacaggcaguucuuca

SEQ ID NO: 906654 - RNA, 19 nt, Artificial Sequence
  Description of Artificial Sequence: Synthetic oligonucleotide
  Sense strand starting at position 916 of SEQ ID NO: 589034
ccuguuaaagauuauuagu

SEQ ID NO: 906655 - RNA, 19 nt, Artificial Sequence
  Description of Artificial Sequence: Synthetic oligonucleotide
  Antisense strand to SEQ ID NO: 906654
acuaauaaucuuuaacagg

SEQ ID NO: 906656 - RNA, 19 nt, Artificial Sequence
  Description of Artificial Sequence: Synthetic oligonucleotide
  Sense strand starting at position 967 of SEQ ID NO: 589034
ucugcaaugagagaucagu

SEQ ID NO: 906657 - RNA, 19 nt, Artificial Sequence
  Description of Artificial Sequence: Synthetic oligonucleotide
  Antisense strand to SEQ ID NO: 906656
acugaucucucauugcaga

SEQ ID NO: 906658 - RNA, 19 nt, Artificial Sequence
  Description of Artificial Sequence: Synthetic oligonucleotide
  Sense strand starting at position 1035 of SEQ ID NO: 589034
caagaaaucgcagagguca

SEQ ID NO: 906659 - RNA, 19 nt, Artificial Sequence
  Description of Artificial Sequence: Synthetic oligonucleotide
  Antisense strand to SEQ ID NO: 906658
ugaccucugcgauuucuug

SEQ ID NO: 906660 - RNA, 19 nt, Artificial Sequence
  Description of Artificial Sequence: Synthetic oligonucleotide
  Sense strand starting at position 1047 of SEQ ID NO: 589034
gaggucacauguccaagaa

SEQ ID NO: 906661 - RNA, 19 nt, Artificial Sequence
  Description of Artificial Sequence: Synthetic oligonucleotide
  Antisense strand to SEQ ID NO: 906660
uucuuggacaugugaccuc

SEQ ID NO: 906662 - RNA, 19 nt, Artificial Sequence
  Description of Artificial Sequence: Synthetic oligonucleotide
  Sense strand starting at position 1124 of SEQ ID NO: 589034
cugauugcugaguaggaga

SEQ ID NO: 906663 - RNA, 19 nt, Artificial Sequence
  Description of Artificial Sequence: Synthetic oligonucleotide
  Antisense strand to SEQ ID NO: 906662
ucuccuacucagcaaucag

SEQ ID NO: 906664 - RNA, 19 nt, Artificial Sequence
  Description of Artificial Sequence: Synthetic oligonucleotide
  Sense strand starting at position 1126 of SEQ ID NO: 589034
gauugcugaguaggagauu

SEQ ID NO: 906665 - RNA, 19 nt, Artificial Sequence
  Description of Artificial Sequence: Synthetic oligonucleotide
  Antisense strand to SEQ ID NO: 906664
aaucuccuacucagcaauc

SEQ ID NO: 906666 - RNA, 19 nt, Artificial Sequence
  Description of Artificial Sequence: Synthetic oligonucleotide
  Sense strand starting at position 1137 of SEQ ID NO: 589034
aggagauucugauugcuga

SEQ ID NO: 906667 - RNA, 19 nt, Artificial Sequence
  Description of Artificial Sequence: Synthetic oligonucleotide
  Antisense strand to SEQ ID NO: 906666
ucagcaaucagaaucuccu

SEQ ID NO: 906668 - RNA, 19 nt, Artificial Sequence
  Description of Artificial Sequence: Synthetic oligonucleotide
  Sense strand starting at position 1138 of SEQ ID NO: 589034
ggagauucugauugcugaa

SEQ ID NO: 906669 - RNA, 19 nt, Artificial Sequence
  Description of Artificial Sequence: Synthetic oligonucleotide
  Antisense strand to SEQ ID NO: 906668
uucagcaaucagaaucucc

SEQ ID NO: 906670 - RNA, 19 nt, Artificial Sequence
  Description of Artificial Sequence: Synthetic oligonucleotide
  Sense strand starting at position 1180 of SEQ ID NO: 589034
gcguucuuccaguuccuau

SEQ ID NO: 906671 - RNA, 19 nt, Artificial Sequence
  Description of Artificial Sequence: Synthetic oligonucleotide
  Antisense strand to SEQ ID NO: 906670
auaggaacuggaagaacgc

SEQ ID NO: 906672 - RNA, 19 nt, Artificial Sequence
  Description of Artificial Sequence: Synthetic oligonucleotide
  Sense strand starting at position 1250 of SEQ ID NO: 589034
uggcaacucuaauuguuga

SEQ ID NO: 906673 - RNA, 19 nt, Artificial Sequence
  Description of Artificial Sequence: Synthetic oligonucleotide
  Antisense strand to SEQ ID NO: 906672
ucaacaauuagaguugcca

SEQ ID NO: 906674 - RNA, 19 nt, Artificial Sequence
  Description of Artificial Sequence: Synthetic oligonucleotide
  Sense strand starting at position 1255 of SEQ ID NO: 589034
acucuaauuguugaaagcu

SEQ ID NO: 906675 - RNA, 19 nt, Artificial Sequence
  Description of Artificial Sequence: Synthetic oligonucleotide
  Antisense strand to SEQ ID NO: 906674
agcuuucaacaauuagagu

SEQ ID NO: 906676 - RNA, 19 nt, Artificial Sequence
  Description of Artificial Sequence: Synthetic oligonucleotide
  Sense strand starting at position 1308 of SEQ ID NO: 589034
caacuaguucuagguauag

SEQ ID NO: 906677 - RNA, 19 nt, Artificial Sequence
  Description of Artificial Sequence: Synthetic oligonucleotide
  Antisense strand to SEQ ID NO: 906676
cuauaccuagaacuaguug

SEQ ID NO: 906678 - RNA, 19 nt, Artificial Sequence
  Description of Artificial Sequence: Synthetic oligonucleotide
  Sense strand starting at position 1985 of SEQ ID NO: 589034
gcggccuuucugagugaga

SEQ ID NO: 906679 - RNA, 19 nt, Artificial Sequence
  Description of Artificial Sequence: Synthetic oligonucleotide
  Antisense strand to SEQ ID NO: 906678
ucucacucagaaaggccgc

SEQ ID NO: 906680 - RNA, 19 nt, Artificial Sequence
  Description of Artificial Sequence: Synthetic oligonucleotide
  Sense strand starting at position 2100 of SEQ ID NO: 589034
ucuugucauccgggagaag

SEQ ID NO: 906681 - RNA, 19 nt, Artificial Sequence
  Description of Artificial Sequence: Synthetic oligonucleotide
  Antisense strand to SEQ ID NO: 906680
cuucucccggaugacaaga

SEQ ID NO: 906682 - RNA, 19 nt, Artificial Sequence
  Description of Artificial Sequence: Synthetic oligonucleotide
  Sense strand starting at position 2118 of SEQ ID NO: 589034
ggguccgugcugagaucau

SEQ ID NO: 906683 - RNA, 19 nt, Artificial Sequence
  Description of Artificial Sequence: Synthetic oligonucleotide
  Antisense strand to SEQ ID NO: 906682
augaucucagcacggaccc

SEQ ID NO: 906684 - RNA, 19 nt, Artificial Sequence
  Description of Artificial Sequence: Synthetic oligonucleotide
  Sense strand starting at position 2127 of SEQ ID NO: 589034
cugagaucauaucucacga

SEQ ID NO: 906685 - RNA, 19 nt, Artificial Sequence
  Description of Artificial Sequence: Synthetic oligonucleotide
  Antisense strand to SEQ ID NO: 906684
ucgugagauaugaucucag

SEQ ID NO: 906686 - RNA, 19 nt, Artificial Sequence
  Description of Artificial Sequence: Synthetic oligonucleotide
  Sense strand starting at position 2321 of SEQ ID NO: 589034
gagucuuugggaggauuag

SEQ ID NO: 906687 - RNA, 19 nt, Artificial Sequence
  Description of Artificial Sequence: Synthetic oligonucleotide
  Antisense strand to SEQ ID NO: 906686
cuaauccucccaaagacuc

SEQ ID NO: 906688 - RNA, 19 nt, Artificial Sequence
  Description of Artificial Sequence: Synthetic oligonucleotide
  Sense strand starting at position 2335 of SEQ ID NO: 589034
auuagauugccaggacaau

SEQ ID NO: 906689 - RNA, 19 nt, Artificial Sequence
  Description of Artificial Sequence: Synthetic oligonucleotide
  Antisense strand to SEQ ID NO: 906688
auuguccuggcaaucuaau

SEQ ID NO: 906690 - RNA, 19 nt, Artificial Sequence
  Description of Artificial Sequence: Synthetic oligonucleotide
  Sense strand starting at position 2383 of SEQ ID NO: 589034
gguaacagugaguaguagu

SEQ ID NO: 906691 - RNA, 19 nt, Artificial Sequence
  Description of Artificial Sequence: Synthetic oligonucleotide
  Antisense strand to SEQ ID NO: 906690
acuacuacucacuguuacc

SEQ ID NO: 906692 - RNA, 19 nt, Artificial Sequence
  Description of Artificial Sequence: Synthetic oligonucleotide
  Sense strand starting at position 2399 of SEQ ID NO: 589034
aguagugccagucauagag

SEQ ID NO: 906693 - RNA, 19 nt, Artificial Sequence
  Description of Artificial Sequence: Synthetic oligonucleotide
  Antisense strand to SEQ ID NO: 906692
cucuaugacuggcacuacu

SEQ ID NO: 906694 - RNA, 19 nt, Artificial Sequence
  Description of Artificial Sequence: Synthetic oligonucleotide
  Sense strand starting at position 2421 of SEQ ID NO: 589034
aacagaugauaguccugau

SEQ ID NO: 906695 - RNA, 19 nt, Artificial Sequence
  Description of Artificial Sequence: Synthetic oligonucleotide
  Antisense strand to SEQ ID NO: 906694
aucaggacuaucaucuguu

SEQ ID NO: 906696 - RNA, 19 nt, Artificial Sequence
  Description of Artificial Sequence: Synthetic oligonucleotide
  Sense strand starting at position 2556 of SEQ ID NO: 589034
ggcugauaugcauaagguu

SEQ ID NO: 906697 - RNA, 19 nt, Artificial Sequence
  Description of Artificial Sequence: Synthetic oligonucleotide
  Antisense strand to SEQ ID NO: 906696
aaccuuaugcauaucagcc

SEQ ID NO: 906698 - RNA, 19 nt, Artificial Sequence
  Description of Artificial Sequence: Synthetic oligonucleotide
  Sense strand starting at position 2880 of SEQ ID NO: 589034
uguucuaauuuaucgguca

SEQ ID NO: 906699 - RNA, 19 nt, Artificial Sequence
  Description of Artificial Sequence: Synthetic oligonucleotide
  Antisense strand to SEQ ID NO: 906698
ugaccgauaaauuagaaca

SEQ ID NO: 906700 - RNA, 19 nt, Artificial Sequence
  Description of Artificial Sequence: Synthetic oligonucleotide
  Sense strand starting at position 2942 of SEQ ID NO: 589034
cugaaaucuuagguugaau

SEQ ID NO: 906701 - RNA, 19 nt, Artificial Sequence
  Description of Artificial Sequence: Synthetic oligonucleotide
  Antisense strand to SEQ ID NO: 906700
auucaaccuaagauuucag

SEQ ID NO: 906702 - RNA, 19 nt, Artificial Sequence
  Description of Artificial Sequence: Synthetic oligonucleotide
  Sense strand starting at position 2944 of SEQ ID NO: 589034
gaaaucuuagguugaauug

SEQ ID NO: 906703 - RNA, 19 nt, Artificial Sequence
  Description of Artificial Sequence: Synthetic oligonucleotide
  Antisense strand to SEQ ID NO: 906702
caauucaaccuaagauuuc

SEQ ID NO: 906704 - RNA, 19 nt, Artificial Sequence
  Description of Artificial Sequence: Synthetic oligonucleotide
  Sense strand starting at position 3024 of SEQ ID NO: 589034
aucaaucuugcccagguga

SEQ ID NO: 906705 - RNA, 19 nt, Artificial Sequence
  Description of Artificial Sequence: Synthetic oligonucleotide
  Antisense strand to SEQ ID NO: 906704
ucaccugggcaagauugau

SEQ ID NO: 906706 - RNA, 19 nt, Artificial Sequence
  Description of Artificial Sequence: Synthetic oligonucleotide
  Sense strand starting at position 3026 of SEQ ID NO: 589034
caaucuugcccaggugaaa

SEQ ID NO: 906707 - RNA, 19 nt, Artificial Sequence
  Description of Artificial Sequence: Synthetic oligonucleotide
  Antisense strand to SEQ ID NO: 906706
uuucaccugggcaagauug

SEQ ID NO: 906708 - RNA, 19 nt, Artificial Sequence
  Description of Artificial Sequence: Synthetic oligonucleotide
  Sense strand starting at position 118 of SEQ ID NO: 589035
ucugguauguacccuauaa

SEQ ID NO: 906709 - RNA, 19 nt, Artificial Sequence
  Description of Artificial Sequence: Synthetic oligonucleotide
  Antisense strand to SEQ ID NO: 906708
uuauaggguacauaccaga

SEQ ID NO: 906710 - RNA, 19 nt, Artificial Sequence
  Description of Artificial Sequence: Synthetic oligonucleotide
  Sense strand starting at position 122 of SEQ ID NO: 589035
guauguacccuauaagcau

SEQ ID NO: 906711 - RNA, 19 nt, Artificial Sequence
  Description of Artificial Sequence: Synthetic oligonucleotide
  Antisense strand to SEQ ID NO: 906710
augcuuauaggguacauac

SEQ ID NO: 906712 - RNA, 19 nt, Artificial Sequence
  Description of Artificial Sequence: Synthetic oligonucleotide
  Sense strand starting at position 137 of SEQ ID NO: 589035
gcauguguuagguauacaa

SEQ ID NO: 906713 - RNA, 19 nt, Artificial Sequence
  Description of Artificial Sequence: Synthetic oligonucleotide
  Antisense strand to SEQ ID NO: 906712
uuguauaccuaacacaugc

SEQ ID NO: 906714 - RNA, 19 nt, Artificial Sequence
  Description of Artificial Sequence: Synthetic oligonucleotide
  Sense strand starting at position 139 of SEQ ID NO: 589035
auguguuagguauacaaau

SEQ ID NO: 906715 - RNA, 19 nt, Artificial Sequence
  Description of Artificial Sequence: Synthetic oligonucleotide
  Antisense strand to SEQ ID NO: 906714
auuuguauaccuaacacau

SEQ ID NO: 906716 - RNA, 19 nt, Artificial Sequence
  Description of Artificial Sequence: Synthetic oligonucleotide
  Sense strand starting at position 177 of SEQ ID NO: 589035
ugugaaaugcuuuaaaugu

SEQ ID NO: 906717 - RNA, 19 nt, Artificial Sequence
  Description of Artificial Sequence: Synthetic oligonucleotide
  Antisense strand to SEQ ID NO: 906716
acauuuaaagcauuucaca

SEQ ID NO: 906718 - RNA, 19 nt, Artificial Sequence
  Description of Artificial Sequence: Synthetic oligonucleotide
  Sense strand starting at position 345 of SEQ ID NO: 589035
uccagaugcucugcaugaa

SEQ ID NO: 906719 - RNA, 19 nt, Artificial Sequence
  Description of Artificial Sequence: Synthetic oligonucleotide
  Antisense strand to SEQ ID NO: 906718
uucaugcagagcaucugga

SEQ ID NO: 906720 - RNA, 19 nt, Artificial Sequence
  Description of Artificial Sequence: Synthetic oligonucleotide
  Sense strand starting at position 346 of SEQ ID NO: 589035
ccagaugcucugcaugaau

SEQ ID NO: 906721 - RNA, 19 nt, Artificial Sequence
  Description of Artificial Sequence: Synthetic oligonucleotide
  Antisense strand to SEQ ID NO: 906720
auucaugcagagcaucugg

SEQ ID NO: 906722 - RNA, 19 nt, Artificial Sequence
  Description of Artificial Sequence: Synthetic oligonucleotide
  Sense strand starting at position 348 of SEQ ID NO: 589035
agaugcucugcaugaauug

SEQ ID NO: 906723 - RNA, 19 nt, Artificial Sequence
  Description of Artificial Sequence: Synthetic oligonucleotide
  Antisense strand to SEQ ID NO: 906722
caauucaugcagagcaucu

SEQ ID NO: 906724 - RNA, 19 nt, Artificial Sequence
  Description of Artificial Sequence: Synthetic oligonucleotide
  Sense strand starting at position 349 of SEQ ID NO: 589035
gaugcucugcaugaauuga

SEQ ID NO: 906725 - RNA, 19 nt, Artificial Sequence
  Description of Artificial Sequence: Synthetic oligonucleotide
  Antisense strand to SEQ ID NO: 906724
ucaauucaugcagagcauc

SEQ ID NO: 906726 - RNA, 19 nt, Artificial Sequence
  Description of Artificial Sequence: Synthetic oligonucleotide
  Sense strand starting at position 373 of SEQ ID NO: 589035
uggucucuccucgaaauuc

SEQ ID NO: 906727 - RNA, 19 nt, Artificial Sequence
  Description of Artificial Sequence: Synthetic oligonucleotide
  Antisense strand to SEQ ID NO: 906726
gaauuucgaggagagacca

SEQ ID NO: 906728 - RNA, 19 nt, Artificial Sequence
  Description of Artificial Sequence: Synthetic oligonucleotide
  Sense strand starting at position 410 of SEQ ID NO: 589035
gucuucuugcuugcuguaa

SEQ ID NO: 906729 - RNA, 19 nt, Artificial Sequence
  Description of Artificial Sequence: Synthetic oligonucleotide
  Antisense strand to SEQ ID NO: 906728
uuacagcaagcaagaagac

SEQ ID NO: 906730 - RNA, 19 nt, Artificial Sequence
  Description of Artificial Sequence: Synthetic oligonucleotide
  Sense strand starting at position 618 of SEQ ID NO: 589035
aauguuuaggcugagcuaa

SEQ ID NO: 906731 - RNA, 19 nt, Artificial Sequence
  Description of Artificial Sequence: Synthetic oligonucleotide
  Antisense strand to SEQ ID NO: 906730
uuagcucagccuaaacauu

SEQ ID NO: 906732 - RNA, 19 nt, Artificial Sequence
  Description of Artificial Sequence: Synthetic oligonucleotide
  Sense strand starting at position 866 of SEQ ID NO: 589035
ccaguauauuugucuccuu

SEQ ID NO: 906733 - RNA, 19 nt, Artificial Sequence
  Description of Artificial Sequence: Synthetic oligonucleotide
  Antisense strand to SEQ ID NO: 906732
aaggagacaaauauacugg

SEQ ID NO: 906734 - RNA, 19 nt, Artificial Sequence
  Description of Artificial Sequence: Synthetic oligonucleotide
  Sense strand starting at position 957 of SEQ ID NO: 589035
aagaaucuccgauaagcgu

SEQ ID NO: 906735 - RNA, 19 nt, Artificial Sequence
  Description of Artificial Sequence: Synthetic oligonucleotide
  Antisense strand to SEQ ID NO: 906734
acgcuuaucggagauucuu

SEQ ID NO: 906736 - RNA, 19 nt, Artificial Sequence
  Description of Artificial Sequence: Synthetic oligonucleotide
  Sense strand starting at position 1051 of SEQ ID NO: 589035
gauuuccugcagugcaaau

SEQ ID NO: 906737 - RNA, 19 nt, Artificial Sequence
  Description of Artificial Sequence: Synthetic oligonucleotide
  Antisense strand to SEQ ID NO: 906736
auuugcacugcaggaaauc

SEQ ID NO: 906738 - RNA, 19 nt, Artificial Sequence
  Description of Artificial Sequence: Synthetic oligonucleotide
  Sense strand starting at position 1062 of SEQ ID NO: 589035
gugcaaaucugaccauauc

SEQ ID NO: 906739 - RNA, 19 nt, Artificial Sequence
  Description of Artificial Sequence: Synthetic oligonucleotide
  Antisense strand to SEQ ID NO: 906738
gauauggucagauuugcac

SEQ ID NO: 906740 - RNA, 19 nt, Artificial Sequence
  Description of Artificial Sequence: Synthetic oligonucleotide
  Sense strand starting at position 1079 of SEQ ID NO: 589035
ucaauauucuguuccgaac

SEQ ID NO: 906741 - RNA, 19 nt, Artificial Sequence
  Description of Artificial Sequence: Synthetic oligonucleotide
  Antisense strand to SEQ ID NO: 906740
guucggaacagaauauuga

SEQ ID NO: 906742 - RNA, 19 nt, Artificial Sequence
  Description of Artificial Sequence: Synthetic oligonucleotide
  Sense strand starting at position 1176 of SEQ ID NO: 589035
ccauucugugcauaggagu

SEQ ID NO: 906743 - RNA, 19 nt, Artificial Sequence
  Description of Artificial Sequence: Synthetic oligonucleotide
  Antisense strand to SEQ ID NO: 906742
acuccuaugcacagaaugg

SEQ ID NO: 906744 - RNA, 19 nt, Artificial Sequence
  Description of Artificial Sequence: Synthetic oligonucleotide
  Sense strand starting at position 1219 of SEQ ID NO: 589035
acaaguuaugcucagucau

SEQ ID NO: 906745 - RNA, 19 nt, Artificial Sequence
  Description of Artificial Sequence: Synthetic oligonucleotide
  Antisense strand to SEQ ID NO: 906744
augacugagcauaacuugu

SEQ ID NO: 906746 - RNA, 19 nt, Artificial Sequence
  Description of Artificial Sequence: Synthetic oligonucleotide
  Sense strand starting at position 1252 of SEQ ID NO: 589035
gcaacugucuucccugaaa

SEQ ID NO: 906747 - RNA, 19 nt, Artificial Sequence
  Description of Artificial Sequence: Synthetic oligonucleotide
  Antisense strand to SEQ ID NO: 906746
uuucagggaagacaguugc

SEQ ID NO: 906748 - RNA, 19 nt, Artificial Sequence
  Description of Artificial Sequence: Synthetic oligonucleotide
  Sense strand starting at position 2143 of SEQ ID NO: 589035
gagggaauuucugcguugu

SEQ ID NO: 906749 - RNA, 19 nt, Artificial Sequence
  Description of Artificial Sequence: Synthetic oligonucleotide
  Antisense strand to SEQ ID NO: 906748
acaacgcagaaauucccuc

SEQ ID NO: 906750 - RNA, 19 nt, Artificial Sequence
  Description of Artificial Sequence: Synthetic oligonucleotide
  Sense strand starting at position 2144 of SEQ ID NO: 589035
agggaauuucugcguugug

SEQ ID NO: 906751 - RNA, 19 nt, Artificial Sequence
  Description of Artificial Sequence: Synthetic oligonucleotide
  Antisense strand to SEQ ID NO: 906750
cacaacgcagaaauucccu

SEQ ID NO: 906752 - RNA, 19 nt, Artificial Sequence
  Description of Artificial Sequence: Synthetic oligonucleotide
  Sense strand starting at position 2364 of SEQ ID NO: 589035
gcacuuaaacuuugguaag

SEQ ID NO: 906753 - RNA, 19 nt, Artificial Sequence
  Description of Artificial Sequence: Synthetic oligonucleotide
  Antisense strand to SEQ ID NO: 906752
cuuaccaaaguuuaagugc

SEQ ID NO: 906754 - RNA, 19 nt, Artificial Sequence
  Description of Artificial Sequence: Synthetic oligonucleotide
  Sense strand starting at position 2481 of SEQ ID NO: 589035
gaguucuuccuagggcaaa

SEQ ID NO: 906755 - RNA, 19 nt, Artificial Sequence
  Description of Artificial Sequence: Synthetic oligonucleotide
  Antisense strand to SEQ ID NO: 906754
uuugcccuaggaagaacuc

SEQ ID NO: 906756 - RNA, 19 nt, Artificial Sequence
  Description of Artificial Sequence: Synthetic oligonucleotide
  Sense strand starting at position 2566 of SEQ ID NO: 589035
ggacgagaucuccagcugu

SEQ ID NO: 906757 - RNA, 19 nt, Artificial Sequence
  Description of Artificial Sequence: Synthetic oligonucleotide
  Antisense strand to SEQ ID NO: 906756
acagcuggagaucucgucc

SEQ ID NO: 906758 - RNA, 19 nt, Artificial Sequence
  Description of Artificial Sequence: Synthetic oligonucleotide
  Sense strand starting at position 2647 of SEQ ID NO: 589035
acuugaggauccuucuaga

SEQ ID NO: 906759 - RNA, 19 nt, Artificial Sequence
  Description of Artificial Sequence: Synthetic oligonucleotide
  Antisense strand to SEQ ID NO: 906758
ucuagaaggauccucaagu

SEQ ID NO: 906760 - RNA, 19 nt, Artificial Sequence
  Description of Artificial Sequence: Synthetic oligonucleotide
  Sense strand starting at position 3188 of SEQ ID NO: 589035
ccgggcuaauuugauauuu

SEQ ID NO: 906761 - RNA, 19 nt, Artificial Sequence
  Description of Artificial Sequence: Synthetic oligonucleotide
  Antisense strand to SEQ ID NO: 906760
aaauaucaaauuagcccgg

SEQ ID NO: 906762 - RNA, 19 nt, Artificial Sequence
  Description of Artificial Sequence: Synthetic oligonucleotide
  Sense strand starting at position 3208 of SEQ ID NO: 589035
gagauauggagacgugguu

SEQ ID NO: 906763 - RNA, 19 nt, Artificial Sequence
  Description of Artificial Sequence: Synthetic oligonucleotide
  Antisense strand to SEQ ID NO: 906762
aaccacgucuccauaucuc

SEQ ID NO: 906764 - RNA, 19 nt, Artificial Sequence
  Description of Artificial Sequence: Synthetic oligonucleotide
  Sense strand starting at position 3356 of SEQ ID NO: 589035
uuaagaguguuguuuaacu

SEQ ID NO: 906765 - RNA, 19 nt, Artificial Sequence
  Description of Artificial Sequence: Synthetic oligonucleotide
  Antisense strand to SEQ ID NO: 906764
aguuaaacaacacucuuaa

SEQ ID NO: 906766 - RNA, 19 nt, Artificial Sequence
  Description of Artificial Sequence: Synthetic oligonucleotide
  Sense strand starting at position 3358 of SEQ ID NO: 589035
aagaguguuguuuaacuuu

SEQ ID NO: 906767 - RNA, 19 nt, Artificial Sequence
  Description of Artificial Sequence: Synthetic oligonucleotide
  Antisense strand to SEQ ID NO: 906766
aaaguuaaacaacacucuu

SEQ ID NO: 906768 - RNA, 19 nt, Artificial Sequence
  Description of Artificial Sequence: Synthetic oligonucleotide
  Sense strand starting at position 3495 of SEQ ID NO: 589035
uggcauacagucuggugaa

SEQ ID NO: 906769 - RNA, 19 nt, Artificial Sequence
  Description of Artificial Sequence: Synthetic oligonucleotide
  Antisense strand to SEQ ID NO: 906768
uucaccagacuguaugcca

SEQ ID NO: 906770 - RNA, 19 nt, Artificial Sequence
  Description of Artificial Sequence: Synthetic oligonucleotide
  Sense strand starting at position 3516 of SEQ ID NO: 589035
ccucaugugcuuuagagaa

SEQ ID NO: 906771 - RNA, 19 nt, Artificial Sequence
  Description of Artificial Sequence: Synthetic oligonucleotide
  Antisense strand to SEQ ID NO: 906770
uucucuaaagcacaugagg

SEQ ID NO: 906772 - RNA, 19 nt, Artificial Sequence
  Description of Artificial Sequence: Synthetic oligonucleotide
  Sense strand starting at position 3526 of SEQ ID NO: 589035
uuuagagaagaauguguau

SEQ ID NO: 906773 - RNA, 19 nt, Artificial Sequence
  Description of Artificial Sequence: Synthetic oligonucleotide
  Antisense strand to SEQ ID NO: 906772
auacacauucuucucuaaa

SEQ ID NO: 906774 - RNA, 19 nt, Artificial Sequence
  Description of Artificial Sequence: Synthetic oligonucleotide
  Sense strand starting at position 3584 of SEQ ID NO: 589035
aaguauagcugguuuauua

SEQ ID NO: 906775 - RNA, 19 nt, Artificial Sequence
  Description of Artificial Sequence: Synthetic oligonucleotide
  Antisense strand to SEQ ID NO: 906774
uaauaaaccagcuauacuu

SEQ ID NO: 906776 - RNA, 19 nt, Artificial Sequence
  Description of Artificial Sequence: Synthetic oligonucleotide
  Sense strand starting at position 3588 of SEQ ID NO: 589035
auagcugguuuauuaugau

SEQ ID NO: 906777 - RNA, 19 nt, Artificial Sequence
  Description of Artificial Sequence: Synthetic oligonucleotide
  Antisense strand to SEQ ID NO: 906776
aucauaauaaaccagcuau

SEQ ID NO: 906778 - RNA, 19 nt, Artificial Sequence
  Description of Artificial Sequence: Synthetic oligonucleotide
  Sense strand starting at position 3605 of SEQ ID NO: 589035
augcuuaguuccucuauuu

SEQ ID NO: 906779 - RNA, 19 nt, Artificial Sequence
  Description of Artificial Sequence: Synthetic oligonucleotide
  Antisense strand to SEQ ID NO: 906778
aaauagaggaacuaagcau

SEQ ID NO: 906780 - RNA, 19 nt, Artificial Sequence
  Description of Artificial Sequence: Synthetic oligonucleotide
  Sense strand starting at position 3765 of SEQ ID NO: 589035
cgagguaaaugccuauaau

SEQ ID NO: 906781 - RNA, 19 nt, Artificial Sequence
  Description of Artificial Sequence: Synthetic oligonucleotide
  Antisense strand to SEQ ID NO: 906780
auuauaggcauuuaccucg

SEQ ID NO: 906782 - RNA, 19 nt, Artificial Sequence
  Description of Artificial Sequence: Synthetic oligonucleotide
  Sense strand starting at position 3766 of SEQ ID NO: 589035
gagguaaaugccuauaauu

SEQ ID NO: 906783 - RNA, 19 nt, Artificial Sequence
  Description of Artificial Sequence: Synthetic oligonucleotide
  Antisense strand to SEQ ID NO: 906782
aauuauaggcauuuaccuc

SEQ ID NO: 906784 - RNA, 19 nt, Artificial Sequence
  Description of Artificial Sequence: Synthetic oligonucleotide
  Sense strand starting at position 3964 of SEQ ID NO: 589035
uauuauuugcgagggaguc

SEQ ID NO: 906785 - RNA, 19 nt, Artificial Sequence
  Description of Artificial Sequence: Synthetic oligonucleotide
  Antisense strand to SEQ ID NO: 906784
gacucccucgcaaauaaua

SEQ ID NO: 906786 - RNA, 19 nt, Artificial Sequence
  Description of Artificial Sequence: Synthetic oligonucleotide
  Sense strand starting at position 3965 of SEQ ID NO: 589035
auuauuugcgagggagucu

SEQ ID NO: 906787 - RNA, 19 nt, Artificial Sequence
  Description of Artificial Sequence: Synthetic oligonucleotide
  Antisense strand to SEQ ID NO: 906786
agacucccucgcaaauaau

SEQ ID NO: 906788 - RNA, 19 nt, Artificial Sequence
  Description of Artificial Sequence: Synthetic oligonucleotide
  Sense strand starting at position 132 of SEQ ID NO: 589037
ggcagaaaguaaguagaaa

SEQ ID NO: 906789 - RNA, 19 nt, Artificial Sequence
  Description of Artificial Sequence: Synthetic oligonucleotide
  Antisense strand to SEQ ID NO: 906788
uuucuacuuacuuucugcc

SEQ ID NO: 906790 - RNA, 19 nt, Artificial Sequence
  Description of Artificial Sequence: Synthetic oligonucleotide
  Sense strand starting at position 221 of SEQ ID NO: 589037
uaaagagaguaggaaucaa

SEQ ID NO: 906791 - RNA, 19 nt, Artificial Sequence
  Description of Artificial Sequence: Synthetic oligonucleotide
  Antisense strand to SEQ ID NO: 906790
uugauuccuacucucuuua

SEQ ID NO: 906792 - RNA, 19 nt, Artificial Sequence
  Description of Artificial Sequence: Synthetic oligonucleotide
  Sense strand starting at position 320 of SEQ ID NO: 589037
aggagucuccaaugaauac

SEQ ID NO: 906793 - RNA, 19 nt, Artificial Sequence
  Description of Artificial Sequence: Synthetic oligonucleotide
  Antisense strand to SEQ ID NO: 906792
guauucauuggagacuccu

SEQ ID NO: 906794 - RNA, 19 nt, Artificial Sequence
  Description of Artificial Sequence: Synthetic oligonucleotide
  Sense strand starting at position 555 of SEQ ID NO: 589037
gucucuuaauugguuuauu

SEQ ID NO: 906795 - RNA, 19 nt, Artificial Sequence
  Description of Artificial Sequence: Synthetic oligonucleotide
  Antisense strand to SEQ ID NO: 906794
aauaaaccaauuaagagac

SEQ ID NO: 906796 - RNA, 19 nt, Artificial Sequence
  Description of Artificial Sequence: Synthetic oligonucleotide
  Sense strand starting at position 726 of SEQ ID NO: 589037
gcaugcaguuaucccagaa

SEQ ID NO: 906797 - RNA, 19 nt, Artificial Sequence
  Description of Artificial Sequence: Synthetic oligonucleotide
  Antisense strand to SEQ ID NO: 906796
uucugggauaacugcaugc

SEQ ID NO: 906798 - RNA, 19 nt, Artificial Sequence
  Description of Artificial Sequence: Synthetic oligonucleotide
  Sense strand starting at position 730 of SEQ ID NO: 589037
gcaguuaucccagaaaccc

SEQ ID NO: 906799 - RNA, 19 nt, Artificial Sequence
  Description of Artificial Sequence: Synthetic oligonucleotide
  Antisense strand to SEQ ID NO: 906798
ggguuucugggauaacugc

SEQ ID NO: 906800 - RNA, 19 nt, Artificial Sequence
  Description of Artificial Sequence: Synthetic oligonucleotide
  Sense strand starting at position 777 of SEQ ID NO: 589037
ucagucugauccuuucuua

SEQ ID NO: 906801 - RNA, 19 nt, Artificial Sequence
  Description of Artificial Sequence: Synthetic oligonucleotide
  Antisense strand to SEQ ID NO: 906800
uaagaaaggaucagacuga

SEQ ID NO: 906802 - RNA, 19 nt, Artificial Sequence
  Description of Artificial Sequence: Synthetic oligonucleotide
  Sense strand starting at position 799 of SEQ ID NO: 589037
uguagacaggccuguuaaa

SEQ ID NO: 906803 - RNA, 19 nt, Artificial Sequence
  Description of Artificial Sequence: Synthetic oligonucleotide
  Antisense strand to SEQ ID NO: 906802
uuuaacaggccugucuaca

SEQ ID NO: 906804 - RNA, 19 nt, Artificial Sequence
  Description of Artificial Sequence: Synthetic oligonucleotide
  Sense strand starting at position 812 of SEQ ID NO: 589037
guuaaacagcuguaacuca

SEQ ID NO: 906805 - RNA, 19 nt, Artificial Sequence
  Description of Artificial Sequence: Synthetic oligonucleotide
  Antisense strand to SEQ ID NO: 906804
ugaguuacagcuguuuaac

SEQ ID NO: 906806 - RNA, 19 nt, Artificial Sequence
  Description of Artificial Sequence: Synthetic oligonucleotide
  Sense strand starting at position 1050 of SEQ ID NO: 589037
ggucgagucacugagagug

SEQ ID NO: 906807 - RNA, 19 nt, Artificial Sequence
  Description of Artificial Sequence: Synthetic oligonucleotide
  Antisense strand to SEQ ID NO: 906806
cacucucagugacucgacc

SEQ ID NO: 906808 - RNA, 19 nt, Artificial Sequence
  Description of Artificial Sequence: Synthetic oligonucleotide
  Sense strand starting at position 1093 of SEQ ID NO: 589037
ggucaugagucaccuucca

SEQ ID NO: 906809 - RNA, 19 nt, Artificial Sequence
  Description of Artificial Sequence: Synthetic oligonucleotide
  Antisense strand to SEQ ID NO: 906808
uggaaggugacucaugacc

SEQ ID NO: 906810 - RNA, 19 nt, Artificial Sequence
  Description of Artificial Sequence: Synthetic oligonucleotide
  Sense strand starting at position 1222 of SEQ ID NO: 589037
acugacaggcccugaauua

SEQ ID NO: 906811 - RNA, 19 nt, Artificial Sequence
  Description of Artificial Sequence: Synthetic oligonucleotide
  Antisense strand to SEQ ID NO: 906810
uaauucagggccugucagu

SEQ ID NO: 906812 - RNA, 19 nt, Artificial Sequence
  Description of Artificial Sequence: Synthetic oligonucleotide
  Sense strand starting at position 1343 of SEQ ID NO: 589037
gaaauaucagguugacagc

SEQ ID NO: 906813 - RNA, 19 nt, Artificial Sequence
  Description of Artificial Sequence: Synthetic oligonucleotide
  Antisense strand to SEQ ID NO: 906812
gcugucaaccugauauuuc

SEQ ID NO: 906814 - RNA, 19 nt, Artificial Sequence
  Description of Artificial Sequence: Synthetic oligonucleotide
  Sense strand starting at position 1681 of SEQ ID NO: 589037
ggcagaagacugcgggauu

SEQ ID NO: 906815 - RNA, 19 nt, Artificial Sequence
  Description of Artificial Sequence: Synthetic oligonucleotide
  Antisense strand to SEQ ID NO: 906814
aaucccgcagucuucugcc

SEQ ID NO: 906816 - RNA, 19 nt, Artificial Sequence
  Description of Artificial Sequence: Synthetic oligonucleotide
  Sense strand starting at position 2155 of SEQ ID NO: 589037
gacugacuacgcuguugaa

SEQ ID NO: 906817 - RNA, 19 nt, Artificial Sequence
  Description of Artificial Sequence: Synthetic oligonucleotide
  Antisense strand to SEQ ID NO: 906816
uucaacagcguagucaguc

SEQ ID NO: 906818 - RNA, 19 nt, Artificial Sequence
  Description of Artificial Sequence: Synthetic oligonucleotide
  Sense strand starting at position 2182 of SEQ ID NO: 589037
agcagauacugaguucuaa

SEQ ID NO: 906819 - RNA, 19 nt, Artificial Sequence
  Description of Artificial Sequence: Synthetic oligonucleotide
  Antisense strand to SEQ ID NO: 906818
uuagaacucaguaucugcu

SEQ ID NO: 906820 - RNA, 19 nt, Artificial Sequence
  Description of Artificial Sequence: Synthetic oligonucleotide
  Sense strand starting at position 2591 of SEQ ID NO: 589037
guaugccuggcggagauua

SEQ ID NO: 906821 - RNA, 19 nt, Artificial Sequence
  Description of Artificial Sequence: Synthetic oligonucleotide
  Antisense strand to SEQ ID NO: 906820
uaaucuccgccaggcauac

SEQ ID NO: 906822 - RNA, 19 nt, Artificial Sequence
  Description of Artificial Sequence: Synthetic oligonucleotide
  Sense strand starting at position 2599 of SEQ ID NO: 589037
ggcggagauuaucuccaaa

SEQ ID NO: 906823 - RNA, 19 nt, Artificial Sequence
  Description of Artificial Sequence: Synthetic oligonucleotide
  Antisense strand to SEQ ID NO: 906822
uuuggagauaaucuccgcc

SEQ ID NO: 906824 - RNA, 19 nt, Artificial Sequence
  Description of Artificial Sequence: Synthetic oligonucleotide
  Sense strand starting at position 2601 of SEQ ID NO: 589037
cggagauuaucuccaaauc

SEQ ID NO: 906825 - RNA, 19 nt, Artificial Sequence
  Description of Artificial Sequence: Synthetic oligonucleotide
  Antisense strand to SEQ ID NO: 906824
gauuuggagauaaucuccg

SEQ ID NO: 906826 - RNA, 19 nt, Artificial Sequence
  Description of Artificial Sequence: Synthetic oligonucleotide
  Sense strand starting at position 2669 of SEQ ID NO: 589037
cucaguaaauggucaauga

SEQ ID NO: 906827 - RNA, 19 nt, Artificial Sequence
  Description of Artificial Sequence: Synthetic oligonucleotide
  Antisense strand to SEQ ID NO: 906826
ucauugaccauuuacugag

SEQ ID NO: 906828 - RNA, 19 nt, Artificial Sequence
  Description of Artificial Sequence: Synthetic oligonucleotide
  Sense strand starting at position 2839 of SEQ ID NO: 589037
cauguuaguguagaagaga

SEQ ID NO: 906829 - RNA, 19 nt, Artificial Sequence
  Description of Artificial Sequence: Synthetic oligonucleotide
  Antisense strand to SEQ ID NO: 906828
ucucuucuacacuaacaug

SEQ ID NO: 906830 - RNA, 19 nt, Artificial Sequence
  Description of Artificial Sequence: Synthetic oligonucleotide
  Sense strand starting at position 2856 of SEQ ID NO: 589037
gagauaggucuuuagcggu

SEQ ID NO: 906831 - RNA, 19 nt, Artificial Sequence
  Description of Artificial Sequence: Synthetic oligonucleotide
  Antisense strand to SEQ ID NO: 906830
accgcuaaagaccuaucuc

SEQ ID NO: 906832 - RNA, 19 nt, Artificial Sequence
  Description of Artificial Sequence: Synthetic oligonucleotide
  Sense strand starting at position 2907 of SEQ ID NO: 589037
aagugcccucuuuguagaa

SEQ ID NO: 906833 - RNA, 19 nt, Artificial Sequence
  Description of Artificial Sequence: Synthetic oligonucleotide
  Antisense strand to SEQ ID NO: 906832
uucuacaaagagggcacuu

SEQ ID NO: 906834 - RNA, 19 nt, Artificial Sequence
  Description of Artificial Sequence: Synthetic oligonucleotide
  Sense strand starting at position 2958 of SEQ ID NO: 589037
aagcgauguggucauaaug

SEQ ID NO: 906835 - RNA, 19 nt, Artificial Sequence
  Description of Artificial Sequence: Synthetic oligonucleotide
  Antisense strand to SEQ ID NO: 906834
cauuaugaccacaucgcuu

SEQ ID NO: 906836 - RNA, 19 nt, Artificial Sequence
  Description of Artificial Sequence: Synthetic oligonucleotide
  Sense strand starting at position 3012 of SEQ ID NO: 589037
ugacaugccuguuugauau

SEQ ID NO: 906837 - RNA, 19 nt, Artificial Sequence
  Description of Artificial Sequence: Synthetic oligonucleotide
  Antisense strand to SEQ ID NO: 906836
auaucaaacaggcauguca

SEQ ID NO: 906838 - RNA, 19 nt, Artificial Sequence
  Description of Artificial Sequence: Synthetic oligonucleotide
  Sense strand starting at position 3023 of SEQ ID NO: 589037
uuugauauugucugucuca

SEQ ID NO: 906839 - RNA, 19 nt, Artificial Sequence
  Description of Artificial Sequence: Synthetic oligonucleotide
  Antisense strand to SEQ ID NO: 906838
ugagacagacaauaucaaa

SEQ ID NO: 906840 - RNA, 19 nt, Artificial Sequence
  Description of Artificial Sequence: Synthetic oligonucleotide
  Sense strand starting at position 3024 of SEQ ID NO: 589037
uugauauugucugucucag

SEQ ID NO: 906841 - RNA, 19 nt, Artificial Sequence
  Description of Artificial Sequence: Synthetic oligonucleotide
  Antisense strand to SEQ ID NO: 906840
cugagacagacaauaucaa

SEQ ID NO: 906842 - RNA, 19 nt, Artificial Sequence
  Description of Artificial Sequence: Synthetic oligonucleotide
  Sense strand starting at position 3065 of SEQ ID NO: 589037
cuguuaugccugucuugcu

SEQ ID NO: 906843 - RNA, 19 nt, Artificial Sequence
  Description of Artificial Sequence: Synthetic oligonucleotide
  Antisense strand to SEQ ID NO: 906842
agcaagacaggcauaacag

SEQ ID NO: 906844 - RNA, 19 nt, Artificial Sequence
  Description of Artificial Sequence: Synthetic oligonucleotide
  Sense strand starting at position 3107 of SEQ ID NO: 589037
gaguguagcuuuccuagag

SEQ ID NO: 906845 - RNA, 19 nt, Artificial Sequence
  Description of Artificial Sequence: Synthetic oligonucleotide
  Antisense strand to SEQ ID NO: 906844
cucuaggaaagcuacacuc

SEQ ID NO: 906846 - RNA, 19 nt, Artificial Sequence
  Description of Artificial Sequence: Synthetic oligonucleotide
  Sense strand starting at position 3108 of SEQ ID NO: 589037
aguguagcuuuccuagaga

SEQ ID NO: 906847 - RNA, 19 nt, Artificial Sequence
  Description of Artificial Sequence: Synthetic oligonucleotide
  Antisense strand to SEQ ID NO: 906846
ucucuaggaaagcuacacu

SEQ ID NO: 906848 - RNA, 19 nt, Artificial Sequence
  Description of Artificial Sequence: Synthetic oligonucleotide
  Sense strand starting at position 3111 of SEQ ID NO: 589037
guagcuuuccuagagaauu

SEQ ID NO: 906849 - RNA, 19 nt, Artificial Sequence
  Description of Artificial Sequence: Synthetic oligonucleotide
  Antisense strand to SEQ ID NO: 906848
aauucucuaggaaagcuac

SEQ ID NO: 906850 - RNA, 19 nt, Artificial Sequence
  Description of Artificial Sequence: Synthetic oligonucleotide
  Sense strand starting at position 3204 of SEQ ID NO: 589037
ugcagaacagcuugucaaa

SEQ ID NO: 906851 - RNA, 19 nt, Artificial Sequence
  Description of Artificial Sequence: Synthetic oligonucleotide
  Antisense strand to SEQ ID NO: 906850
uuugacaagcuguucugca

SEQ ID NO: 906852 - RNA, 19 nt, Artificial Sequence
  Description of Artificial Sequence: Synthetic oligonucleotide
  Sense strand starting at position 3206 of SEQ ID NO: 589037
cagaacagcuugucaaaga

SEQ ID NO: 906853 - RNA, 19 nt, Artificial Sequence
  Description of Artificial Sequence: Synthetic oligonucleotide
  Antisense strand to SEQ ID NO: 906852
ucuuugacaagcuguucug

SEQ ID NO: 906854 - RNA, 19 nt, Artificial Sequence
  Description of Artificial Sequence: Synthetic oligonucleotide
  Sense strand starting at position 3578 of SEQ ID NO: 589037
aguugaguauacucuuuaa

SEQ ID NO: 906855 - RNA, 19 nt, Artificial Sequence
  Description of Artificial Sequence: Synthetic oligonucleotide
  Antisense strand to SEQ ID NO: 906854
uuaaagaguauacucaacu

SEQ ID NO: 906856 - RNA, 19 nt, Artificial Sequence
  Description of Artificial Sequence: Synthetic oligonucleotide
  Sense strand starting at position 3581 of SEQ ID NO: 589037
ugaguauacucuuuaagug

SEQ ID NO: 906857 - RNA, 19 nt, Artificial Sequence
  Description of Artificial Sequence: Synthetic oligonucleotide
  Antisense strand to SEQ ID NO: 906856
cacuuaaagaguauacuca

SEQ ID NO: 906858 - RNA, 19 nt, Artificial Sequence
  Description of Artificial Sequence: Synthetic oligonucleotide
  Sense strand starting at position 3582 of SEQ ID NO: 589037
gaguauacucuuuaagugu

SEQ ID NO: 906859 - RNA, 19 nt, Artificial Sequence
  Description of Artificial Sequence: Synthetic oligonucleotide
  Antisense strand to SEQ ID NO: 906858
acacuuaaagaguauacuc

SEQ ID NO: 906860 - RNA, 19 nt, Artificial Sequence
  Description of Artificial Sequence: Synthetic oligonucleotide
  Sense strand starting at position 3623 of SEQ ID NO: 589037
cuaagcagaccugaaguuu

SEQ ID NO: 906861 - RNA, 19 nt, Artificial Sequence
  Description of Artificial Sequence: Synthetic oligonucleotide
  Antisense strand to SEQ ID NO: 906860
aaacuucaggucugcuuag

SEQ ID NO: 906862 - RNA, 19 nt, Artificial Sequence
  Description of Artificial Sequence: Synthetic oligonucleotide
  Sense strand starting at position 3655 of SEQ ID NO: 589037
ccaucaugugccuaugaag

SEQ ID NO: 906863 - RNA, 19 nt, Artificial Sequence
  Description of Artificial Sequence: Synthetic oligonucleotide
  Antisense strand to SEQ ID NO: 906862
cuucauaggcacaugaugg

SEQ ID NO: 906864 - RNA, 19 nt, Artificial Sequence
  Description of Artificial Sequence: Synthetic oligonucleotide
  Sense strand starting at position 3673 of SEQ ID NO: 589037
gugguaaguaaaugcuaag

SEQ ID NO: 906865 - RNA, 19 nt, Artificial Sequence
  Description of Artificial Sequence: Synthetic oligonucleotide
  Antisense strand to SEQ ID NO: 906864
cuuagcauuuacuuaccac

SEQ ID NO: 906866 - RNA, 19 nt, Artificial Sequence
  Description of Artificial Sequence: Synthetic oligonucleotide
  Sense strand starting at position 3900 of SEQ ID NO: 589037
ucuuaaacgcauggauaca

SEQ ID NO: 906867 - RNA, 19 nt, Artificial Sequence
  Description of Artificial Sequence: Synthetic oligonucleotide
  Antisense strand to SEQ ID NO: 906866
uguauccaugcguuuaaga

SEQ ID NO: 906868 - RNA, 19 nt, Artificial Sequence
  Description of Artificial Sequence: Synthetic oligonucleotide
  Sense strand starting at position 32 of SEQ ID NO: 589038
gaaucaauaccuuggguuc

SEQ ID NO: 906869 - RNA, 19 nt, Artificial Sequence
  Description of Artificial Sequence: Synthetic oligonucleotide
  Antisense strand to SEQ ID NO: 906868
gaacccaagguauugauuc

SEQ ID NO: 906870 - RNA, 19 nt, Artificial Sequence
  Description of Artificial Sequence: Synthetic oligonucleotide
  Sense strand starting at position 66 of SEQ ID NO: 589038
aaacgaaugugagccagau

SEQ ID NO: 906871 - RNA, 19 nt, Artificial Sequence
  Description of Artificial Sequence: Synthetic oligonucleotide
  Antisense strand to SEQ ID NO: 906870
aucuggcucacauucguuu

SEQ ID NO: 906872 - RNA, 19 nt, Artificial Sequence
  Description of Artificial Sequence: Synthetic oligonucleotide
  Sense strand starting at position 85 of SEQ ID NO: 589038
ucaagauucucugucagca

SEQ ID NO: 906873 - RNA, 19 nt, Artificial Sequence
  Description of Artificial Sequence: Synthetic oligonucleotide
  Antisense strand to SEQ ID NO: 906872
ugcugacagagaaucuuga

SEQ ID NO: 906874 - RNA, 19 nt, Artificial Sequence
  Description of Artificial Sequence: Synthetic oligonucleotide
  Sense strand starting at position 171 of SEQ ID NO: 589038
ugcugaguucuuuaaguac

SEQ ID NO: 906875 - RNA, 19 nt, Artificial Sequence
  Description of Artificial Sequence: Synthetic oligonucleotide
  Antisense strand to SEQ ID NO: 906874
guacuuaaagaacucagca

SEQ ID NO: 906876 - RNA, 19 nt, Artificial Sequence
  Description of Artificial Sequence: Synthetic oligonucleotide
  Sense strand starting at position 174 of SEQ ID NO: 589038
ugaguucuuuaaguacuau

SEQ ID NO: 906877 - RNA, 19 nt, Artificial Sequence
  Description of Artificial Sequence: Synthetic oligonucleotide
  Antisense strand to SEQ ID NO: 906876
auaguacuuaaagaacuca

SEQ ID NO: 906878 - RNA, 19 nt, Artificial Sequence
  Description of Artificial Sequence: Synthetic oligonucleotide
  Sense strand starting at position 185 of SEQ ID NO: 589038
aguacuauuugauauccca

SEQ ID NO: 906879 - RNA, 19 nt, Artificial Sequence
  Description of Artificial Sequence: Synthetic oligonucleotide
  Antisense strand to SEQ ID NO: 906878
ugggauaucaaauaguacu

SEQ ID NO: 906880 - RNA, 19 nt, Artificial Sequence
  Description of Artificial Sequence: Synthetic oligonucleotide
  Sense strand starting at position 255 of SEQ ID NO: 589038
gagcguucgcuccuaaguc

SEQ ID NO: 906881 - RNA, 19 nt, Artificial Sequence
  Description of Artificial Sequence: Synthetic oligonucleotide
  Antisense strand to SEQ ID NO: 906880
gacuuaggagcgaacgcuc

SEQ ID NO: 906882 - RNA, 19 nt, Artificial Sequence
  Description of Artificial Sequence: Synthetic oligonucleotide
  Sense strand starting at position 263 of SEQ ID NO: 589038
gcuccuaagucuguaagau

SEQ ID NO: 906883 - RNA, 19 nt, Artificial Sequence
  Description of Artificial Sequence: Synthetic oligonucleotide
  Antisense strand to SEQ ID NO: 906882
aucuuacagacuuaggagc

SEQ ID NO: 906884 - RNA, 19 nt, Artificial Sequence
  Description of Artificial Sequence: Synthetic oligonucleotide
  Sense strand starting at position 264 of SEQ ID NO: 589038
cuccuaagucuguaagaug

SEQ ID NO: 906885 - RNA, 19 nt, Artificial Sequence
  Description of Artificial Sequence: Synthetic oligonucleotide
  Antisense strand to SEQ ID NO: 906884
caucuuacagacuuaggag

SEQ ID NO: 906886 - RNA, 19 nt, Artificial Sequence
  Description of Artificial Sequence: Synthetic oligonucleotide
  Sense strand starting at position 423 of SEQ ID NO: 589038
acgaguugacuucaggacu

SEQ ID NO: 906887 - RNA, 19 nt, Artificial Sequence
  Description of Artificial Sequence: Synthetic oligonucleotide
  Antisense strand to SEQ ID NO: 906886
aguccugaagucaacucgu

SEQ ID NO: 906888 - RNA, 19 nt, Artificial Sequence
  Description of Artificial Sequence: Synthetic oligonucleotide
  Sense strand starting at position 505 of SEQ ID NO: 589038
uagucuuaccuguaagguc

SEQ ID NO: 906889 - RNA, 19 nt, Artificial Sequence
  Description of Artificial Sequence: Synthetic oligonucleotide
  Antisense strand to SEQ ID NO: 906888
gaccuuacagguaagacua

SEQ ID NO: 906890 - RNA, 19 nt, Artificial Sequence
  Description of Artificial Sequence: Synthetic oligonucleotide
  Sense strand starting at position 555 of SEQ ID NO: 589038
ucccaaauuugaugagauu

SEQ ID NO: 906891 - RNA, 19 nt, Artificial Sequence
  Description of Artificial Sequence: Synthetic oligonucleotide
  Antisense strand to SEQ ID NO: 906890
aaucucaucaaauuuggga

SEQ ID NO: 906892 - RNA, 19 nt, Artificial Sequence
  Description of Artificial Sequence: Synthetic oligonucleotide
  Sense strand starting at position 564 of SEQ ID NO: 589038
ugaugagauuuccauaagg

SEQ ID NO: 906893 - RNA, 19 nt, Artificial Sequence
  Description of Artificial Sequence: Synthetic oligonucleotide
  Antisense strand to SEQ ID NO: 906892
ccuuauggaaaucucauca

SEQ ID NO: 906894 - RNA, 19 nt, Artificial Sequence
  Description of Artificial Sequence: Synthetic oligonucleotide
  Sense strand starting at position 569 of SEQ ID NO: 589038
agauuuccauaaggguuaa

SEQ ID NO: 906895 - RNA, 19 nt, Artificial Sequence
  Description of Artificial Sequence: Synthetic oligonucleotide
  Antisense strand to SEQ ID NO: 906894
uuaacccuuauggaaaucu

SEQ ID NO: 906896 - RNA, 19 nt, Artificial Sequence
  Description of Artificial Sequence: Synthetic oligonucleotide
  Sense strand starting at position 711 of SEQ ID NO: 589038
acaagaguuuaggcaaaug

SEQ ID NO: 906897 - RNA, 19 nt, Artificial Sequence
  Description of Artificial Sequence: Synthetic oligonucleotide
  Antisense strand to SEQ ID NO: 906896
cauuugccuaaacucuugu

SEQ ID NO: 906898 - RNA, 19 nt, Artificial Sequence
  Description of Artificial Sequence: Synthetic oligonucleotide
  Sense strand starting at position 848 of SEQ ID NO: 589038
cguaauguccucuacuuaa

SEQ ID NO: 906899 - RNA, 19 nt, Artificial Sequence
  Description of Artificial Sequence: Synthetic oligonucleotide
  Antisense strand to SEQ ID NO: 906898
uuaaguagaggacauuacg

SEQ ID NO: 906900 - RNA, 19 nt, Artificial Sequence
  Description of Artificial Sequence: Synthetic oligonucleotide
  Sense strand starting at position 922 of SEQ ID NO: 589038
ggugaagaguuccuucuau

SEQ ID NO: 906901 - RNA, 19 nt, Artificial Sequence
  Description of Artificial Sequence: Synthetic oligonucleotide
  Antisense strand to SEQ ID NO: 906900
auagaaggaacucuucacc

SEQ ID NO: 906902 - RNA, 19 nt, Artificial Sequence
  Description of Artificial Sequence: Synthetic oligonucleotide
  Sense strand starting at position 1078 of SEQ ID NO: 589038
ccagaaugcugacugacuu

SEQ ID NO: 906903 - RNA, 19 nt, Artificial Sequence
  Description of Artificial Sequence: Synthetic oligonucleotide
  Antisense strand to SEQ ID NO: 906902
aagucagucagcauucugg

SEQ ID NO: 906904 - RNA, 19 nt, Artificial Sequence
  Description of Artificial Sequence: Synthetic oligonucleotide
  Sense strand starting at position 1254 of SEQ ID NO: 589038
gggaguagugggcauucaa

SEQ ID NO: 906905 - RNA, 19 nt, Artificial Sequence
  Description of Artificial Sequence: Synthetic oligonucleotide
  Antisense strand to SEQ ID NO: 906904
uugaaugcccacuacuccc

SEQ ID NO: 906906 - RNA, 19 nt, Artificial Sequence
  Description of Artificial Sequence: Synthetic oligonucleotide
  Sense strand starting at position 1384 of SEQ ID NO: 589038
ccuugcucuggugaaauga

SEQ ID NO: 906907 - RNA, 19 nt, Artificial Sequence
  Description of Artificial Sequence: Synthetic oligonucleotide
  Antisense strand to SEQ ID NO: 906906
ucauuucaccagagcaagg

SEQ ID NO: 906908 - RNA, 19 nt, Artificial Sequence
  Description of Artificial Sequence: Synthetic oligonucleotide
  Sense strand starting at position 2216 of SEQ ID NO: 589038
guguuuacuaccgacugaa

SEQ ID NO: 906909 - RNA, 19 nt, Artificial Sequence
  Description of Artificial Sequence: Synthetic oligonucleotide
  Antisense strand to SEQ ID NO: 906908
uucagucgguaguaaacac

SEQ ID NO: 906910 - RNA, 19 nt, Artificial Sequence
  Description of Artificial Sequence: Synthetic oligonucleotide
  Sense strand starting at position 2228 of SEQ ID NO: 589038
gacugaauccgugagcucu

SEQ ID NO: 906911 - RNA, 19 nt, Artificial Sequence
  Description of Artificial Sequence: Synthetic oligonucleotide
  Antisense strand to SEQ ID NO: 906910
agagcucacggauucaguc

SEQ ID NO: 906912 - RNA, 19 nt, Artificial Sequence
  Description of Artificial Sequence: Synthetic oligonucleotide
  Sense strand starting at position 2239 of SEQ ID NO: 589038
ugagcucucugaccaauca

SEQ ID NO: 906913 - RNA, 19 nt, Artificial Sequence
  Description of Artificial Sequence: Synthetic oligonucleotide
  Antisense strand to SEQ ID NO: 906912
ugauuggucagagagcuca

SEQ ID NO: 906914 - RNA, 19 nt, Artificial Sequence
  Description of Artificial Sequence: Synthetic oligonucleotide
  Sense strand starting at position 2316 of SEQ ID NO: 589038
acuaaacugcuccagguuu

SEQ ID NO: 906915 - RNA, 19 nt, Artificial Sequence
  Description of Artificial Sequence: Synthetic oligonucleotide
  Antisense strand to SEQ ID NO: 906914
aaaccuggagcaguuuagu

SEQ ID NO: 906916 - RNA, 19 nt, Artificial Sequence
  Description of Artificial Sequence: Synthetic oligonucleotide
  Sense strand starting at position 2394 of SEQ ID NO: 589038
gcgggcuuuccgccuaaau

SEQ ID NO: 906917 - RNA, 19 nt, Artificial Sequence
  Description of Artificial Sequence: Synthetic oligonucleotide
  Antisense strand to SEQ ID NO: 906916
auuuaggcggaaagcccgc

SEQ ID NO: 906918 - RNA, 19 nt, Artificial Sequence
  Description of Artificial Sequence: Synthetic oligonucleotide
  Sense strand starting at position 2395 of SEQ ID NO: 589038
cgggcuuuccgccuaaauc

SEQ ID NO: 906919 - RNA, 19 nt, Artificial Sequence
  Description of Artificial Sequence: Synthetic oligonucleotide
  Antisense strand to SEQ ID NO: 906918
gauuuaggcggaaagcccg

SEQ ID NO: 906920 - RNA, 19 nt, Artificial Sequence
  Description of Artificial Sequence: Synthetic oligonucleotide
  Sense strand starting at position 2625 of SEQ ID NO: 589038
cuucauagacguugggaaa

SEQ ID NO: 906921 - RNA, 19 nt, Artificial Sequence
  Description of Artificial Sequence: Synthetic oligonucleotide
  Antisense strand to SEQ ID NO: 906920
uuucccaacgucuaugaag

SEQ ID NO: 906922 - RNA, 19 nt, Artificial Sequence
  Description of Artificial Sequence: Synthetic oligonucleotide
  Sense strand starting at position 2660 of SEQ ID NO: 589038
gcucuuuagguuuaacuaa

SEQ ID NO: 906923 - RNA, 19 nt, Artificial Sequence
  Description of Artificial Sequence: Synthetic oligonucleotide
  Antisense strand to SEQ ID NO: 906922
uuaguuaaaccuaaagagc

SEQ ID NO: 906924 - RNA, 19 nt, Artificial Sequence
  Description of Artificial Sequence: Synthetic oligonucleotide
  Sense strand starting at position 2679 of SEQ ID NO: 589038
gccaaaguccagggugaaa

SEQ ID NO: 906925 - RNA, 19 nt, Artificial Sequence
  Description of Artificial Sequence: Synthetic oligonucleotide
  Antisense strand to SEQ ID NO: 906924
uuucacccuggacuuuggc

SEQ ID NO: 906926 - RNA, 19 nt, Artificial Sequence
  Description of Artificial Sequence: Synthetic oligonucleotide
  Sense strand starting at position 3286 of SEQ ID NO: 589038
ggcagaucgcccgagauca

SEQ ID NO: 906927 - RNA, 19 nt, Artificial Sequence
  Description of Artificial Sequence: Synthetic oligonucleotide
  Antisense strand to SEQ ID NO: 906926
ugaucucgggcgaucugcc

SEQ ID NO: 906928 - RNA, 19 nt, Artificial Sequence
  Description of Artificial Sequence: Synthetic oligonucleotide
  Sense strand starting at position 3539 of SEQ ID NO: 589038
ccgcuuuaagaauggaaca

SEQ ID NO: 906929 - RNA, 19 nt, Artificial Sequence
  Description of Artificial Sequence: Synthetic oligonucleotide
  Antisense strand to SEQ ID NO: 906928
uguuccauucuuaaagcgg

SEQ ID NO: 906930 - RNA, 19 nt, Artificial Sequence
  Description of Artificial Sequence: Synthetic oligonucleotide
  Sense strand starting at position 3589 of SEQ ID NO: 589038
uucaguuacuggucggaag

SEQ ID NO: 906931 - RNA, 19 nt, Artificial Sequence
  Description of Artificial Sequence: Synthetic oligonucleotide
  Antisense strand to SEQ ID NO: 906930
cuuccgaccaguaacugaa

SEQ ID NO: 906932 - RNA, 19 nt, Artificial Sequence
  Description of Artificial Sequence: Synthetic oligonucleotide
  Sense strand starting at position 3659 of SEQ ID NO: 589038
ggagucugauguuuaauuc

SEQ ID NO: 906933 - RNA, 19 nt, Artificial Sequence
  Description of Artificial Sequence: Synthetic oligonucleotide
  Antisense strand to SEQ ID NO: 906932
gaauuaaacaucagacucc

SEQ ID NO: 906934 - RNA, 19 nt, Artificial Sequence
  Description of Artificial Sequence: Synthetic oligonucleotide
  Sense strand starting at position 3681 of SEQ ID NO: 589038
uccuuaagauucgcugaca

SEQ ID NO: 906935 - RNA, 19 nt, Artificial Sequence
  Description of Artificial Sequence: Synthetic oligonucleotide
  Antisense strand to SEQ ID NO: 906934
ugucagcgaaucuuaagga

SEQ ID NO: 906936 - RNA, 19 nt, Artificial Sequence
  Description of Artificial Sequence: Synthetic oligonucleotide
  Sense strand starting at position 3684 of SEQ ID NO: 589038
uuaagauucgcugacacua

SEQ ID NO: 906937 - RNA, 19 nt, Artificial Sequence
  Description of Artificial Sequence: Synthetic oligonucleotide
  Antisense strand to SEQ ID NO: 906936
uagugucagcgaaucuuaa

SEQ ID NO: 906938 - RNA, 19 nt, Artificial Sequence
  Description of Artificial Sequence: Synthetic oligonucleotide
  Sense strand starting at position 3723 of SEQ ID NO: 589038
cugacagauugaucgguaa

SEQ ID NO: 906939 - RNA, 19 nt, Artificial Sequence
  Description of Artificial Sequence: Synthetic oligonucleotide
  Antisense strand to SEQ ID NO: 906938
uuaccgaucaaucugucag

SEQ ID NO: 906940 - RNA, 19 nt, Artificial Sequence
  Description of Artificial Sequence: Synthetic oligonucleotide
  Sense strand starting at position 3764 of SEQ ID NO: 589038
gacaguaagccaggcaaua

SEQ ID NO: 906941 - RNA, 19 nt, Artificial Sequence
  Description of Artificial Sequence: Synthetic oligonucleotide
  Antisense strand to SEQ ID NO: 906940
uauugccuggcuuacuguc

SEQ ID NO: 906942 - RNA, 19 nt, Artificial Sequence
  Description of Artificial Sequence: Synthetic oligonucleotide
  Sense strand starting at position 3814 of SEQ ID NO: 589038
cgguaaaugccaugaccua

SEQ ID NO: 906943 - RNA, 19 nt, Artificial Sequence
  Description of Artificial Sequence: Synthetic oligonucleotide
  Antisense strand to SEQ ID NO: 906942
uaggucauggcauuuaccg

SEQ ID NO: 906944 - RNA, 19 nt, Artificial Sequence
  Description of Artificial Sequence: Synthetic oligonucleotide
  Sense strand starting at position 3826 of SEQ ID NO: 589038
ugaccuagauugccucaga

SEQ ID NO: 906945 - RNA, 19 nt, Artificial Sequence
  Description of Artificial Sequence: Synthetic oligonucleotide
  Antisense strand to SEQ ID NO: 906944
ucugaggcaaucuagguca

SEQ ID NO: 906946 - RNA, 19 nt, Artificial Sequence
  Description of Artificial Sequence: Synthetic oligonucleotide
  Sense strand starting at position 3827 of SEQ ID NO: 589038
gaccuagauugccucagau

SEQ ID NO: 906947 - RNA, 19 nt, Artificial Sequence
  Description of Artificial Sequence: Synthetic oligonucleotide
  Antisense strand to SEQ ID NO: 906946
aucugaggcaaucuagguc

SEQ ID NO: 906948 - RNA, 19 nt, Artificial Sequence
  Description of Artificial Sequence: Synthetic oligonucleotide
  Sense strand starting at position 23 of SEQ ID NO: 589039
gagguacaaggcugugaaa

SEQ ID NO: 906949 - RNA, 19 nt, Artificial Sequence
  Description of Artificial Sequence: Synthetic oligonucleotide
  Antisense strand to SEQ ID NO: 906948
uuucacagccuuguaccuc

SEQ ID NO: 906950 - RNA, 19 nt, Artificial Sequence
  Description of Artificial Sequence: Synthetic oligonucleotide
  Sense strand starting at position 62 of SEQ ID NO: 589039
gcuguacugauggauucua

SEQ ID NO: 906951 - RNA, 19 nt, Artificial Sequence
  Description of Artificial Sequence: Synthetic oligonucleotide
  Antisense strand to SEQ ID NO: 906950
uagaauccaucaguacagc

SEQ ID NO: 906952 - RNA, 19 nt, Artificial Sequence
  Description of Artificial Sequence: Synthetic oligonucleotide
  Sense strand starting at position 214 of SEQ ID NO: 589039
auggaaaucuauguuuaca

SEQ ID NO: 906953 - RNA, 19 nt, Artificial Sequence
  Description of Artificial Sequence: Synthetic oligonucleotide
  Antisense strand to SEQ ID NO: 906952
uguaaacauagauuuccau

SEQ ID NO: 906954 - RNA, 19 nt, Artificial Sequence
  Description of Artificial Sequence: Synthetic oligonucleotide
  Sense strand starting at position 233 of SEQ ID NO: 589039
ggacuaucuucugaaauuu

SEQ ID NO: 906955 - RNA, 19 nt, Artificial Sequence
  Description of Artificial Sequence: Synthetic oligonucleotide
  Antisense strand to SEQ ID NO: 906954
aaauuucagaagauagucc

SEQ ID NO: 906956 - RNA, 19 nt, Artificial Sequence
  Description of Artificial Sequence: Synthetic oligonucleotide
  Sense strand starting at position 258 of SEQ ID NO: 589039
ucucacagucuuuaucaga

SEQ ID NO: 906957 - RNA, 19 nt, Artificial Sequence
  Description of Artificial Sequence: Synthetic oligonucleotide
  Antisense strand to SEQ ID NO: 906956
ucugauaaagacugugaga

SEQ ID NO: 906958 - RNA, 19 nt, Artificial Sequence
  Description of Artificial Sequence: Synthetic oligonucleotide
  Sense strand starting at position 401 of SEQ ID NO: 589039
augugaaccaucugaaggu

SEQ ID NO: 906959 - RNA, 19 nt, Artificial Sequence
  Description of Artificial Sequence: Synthetic oligonucleotide
  Antisense strand to SEQ ID NO: 906958
accuucagaugguucacau

SEQ ID NO: 906960 - RNA, 19 nt, Artificial Sequence
  Description of Artificial Sequence: Synthetic oligonucleotide
  Sense strand starting at position 473 of SEQ ID NO: 589039
ccaguauagcaagacagua

SEQ ID NO: 906961 - RNA, 19 nt, Artificial Sequence
  Description of Artificial Sequence: Synthetic oligonucleotide
  Antisense strand to SEQ ID NO: 906960
uacugucuugcuauacugg

SEQ ID NO: 906962 - RNA, 19 nt, Artificial Sequence
  Description of Artificial Sequence: Synthetic oligonucleotide
  Sense strand starting at position 519 of SEQ ID NO: 589039
guaagauggugauucugac

SEQ ID NO: 906963 - RNA, 19 nt, Artificial Sequence
  Description of Artificial Sequence: Synthetic oligonucleotide
  Antisense strand to SEQ ID NO: 906962
gucagaaucaccaucuuac

SEQ ID NO: 906964 - RNA, 19 nt, Artificial Sequence
  Description of Artificial Sequence: Synthetic oligonucleotide
  Sense strand starting at position 609 of SEQ ID NO: 589039
ccuggaacucagugucauu

SEQ ID NO: 906965 - RNA, 19 nt, Artificial Sequence
  Description of Artificial Sequence: Synthetic oligonucleotide
  Antisense strand to SEQ ID NO: 906964
aaugacacugaguuccagg

SEQ ID NO: 906966 - RNA, 19 nt, Artificial Sequence
  Description of Artificial Sequence: Synthetic oligonucleotide
  Sense strand starting at position 806 of SEQ ID NO: 589039
ccaugcuguaauggugaaa

SEQ ID NO: 906967 - RNA, 19 nt, Artificial Sequence
  Description of Artificial Sequence: Synthetic oligonucleotide
  Antisense strand to SEQ ID NO: 906966
uuucaccauuacagcaugg

SEQ ID NO: 906968 - RNA, 19 nt, Artificial Sequence
  Description of Artificial Sequence: Synthetic oligonucleotide
  Sense strand starting at position 987 of SEQ ID NO: 589039
augaauuguagugaacagu

SEQ ID NO: 906969 - RNA, 19 nt, Artificial Sequence
  Description of Artificial Sequence: Synthetic oligonucleotide
  Antisense strand to SEQ ID NO: 906968
acuguucacuacaauucau

SEQ ID NO: 906970 - RNA, 19 nt, Artificial Sequence
  Description of Artificial Sequence: Synthetic oligonucleotide
  Sense strand starting at position 1039 of SEQ ID NO: 589039
ccuuguggucaagaacaau

SEQ ID NO: 906971 - RNA, 19 nt, Artificial Sequence
  Description of Artificial Sequence: Synthetic oligonucleotide
  Antisense strand to SEQ ID NO: 906970
auuguucuugaccacaagg

SEQ ID NO: 906972 - RNA, 19 nt, Artificial Sequence
  Description of Artificial Sequence: Synthetic oligonucleotide
  Sense strand starting at position 1220 of SEQ ID NO: 589039
acaggucuucuuuauacca

SEQ ID NO: 906973 - RNA, 19 nt, Artificial Sequence
  Description of Artificial Sequence: Synthetic oligonucleotide
  Antisense strand to SEQ ID NO: 906972
ugguauaaagaagaccugu

SEQ ID NO: 906974 - RNA, 19 nt, Artificial Sequence
  Description of Artificial Sequence: Synthetic oligonucleotide
  Sense strand starting at position 1365 of SEQ ID NO: 589039
ccagauuucuuaggaaaga

SEQ ID NO: 906975 - RNA, 19 nt, Artificial Sequence
  Description of Artificial Sequence: Synthetic oligonucleotide
  Antisense strand to SEQ ID NO: 906974
ucuuuccuaagaaaucugg

SEQ ID NO: 906976 - RNA, 19 nt, Artificial Sequence
  Description of Artificial Sequence: Synthetic oligonucleotide
  Sense strand starting at position 1522 of SEQ ID NO: 589039
uuacauucgcguuuccagu

SEQ ID NO: 906977 - RNA, 19 nt, Artificial Sequence
  Description of Artificial Sequence: Synthetic oligonucleotide
  Antisense strand to SEQ ID NO: 906976
acuggaaacgcgaauguaa

SEQ ID NO: 906978 - RNA, 19 nt, Artificial Sequence
  Description of Artificial Sequence: Synthetic oligonucleotide
  Sense strand starting at position 1811 of SEQ ID NO: 589039
gugguugcagcacaagauu

SEQ ID NO: 906979 - RNA, 19 nt, Artificial Sequence
  Description of Artificial Sequence: Synthetic oligonucleotide
  Antisense strand to SEQ ID NO: 906978
aaucuugugcugcaaccac

SEQ ID NO: 906980 - RNA, 19 nt, Artificial Sequence
  Description of Artificial Sequence: Synthetic oligonucleotide
  Sense strand starting at position 1896 of SEQ ID NO: 589039
ugaggaaucuacuuugcac

SEQ ID NO: 906981 - RNA, 19 nt, Artificial Sequence
  Description of Artificial Sequence: Synthetic oligonucleotide
  Antisense strand to SEQ ID NO: 906980
gugcaaaguagauuccuca

SEQ ID NO: 906982 - RNA, 19 nt, Artificial Sequence
  Description of Artificial Sequence: Synthetic oligonucleotide
  Sense strand starting at position 1978 of SEQ ID NO: 589039
auggacuuagccuggaaga

SEQ ID NO: 906983 - RNA, 19 nt, Artificial Sequence
  Description of Artificial Sequence: Synthetic oligonucleotide
  Antisense strand to SEQ ID NO: 906982
ucuuccaggcuaaguccau

SEQ ID NO: 906984 - RNA, 19 nt, Artificial Sequence
  Description of Artificial Sequence: Synthetic oligonucleotide
  Sense strand starting at position 1979 of SEQ ID NO: 589039
uggacuuagccuggaagaa

SEQ ID NO: 906985 - RNA, 19 nt, Artificial Sequence
  Description of Artificial Sequence: Synthetic oligonucleotide
  Antisense strand to SEQ ID NO: 906984
uucuuccaggcuaagucca

SEQ ID NO: 906986 - RNA, 19 nt, Artificial Sequence
  Description of Artificial Sequence: Synthetic oligonucleotide
  Sense strand starting at position 2494 of SEQ ID NO: 589039
gugaguccuccugaacauc

SEQ ID NO: 906987 - RNA, 19 nt, Artificial Sequence
  Description of Artificial Sequence: Synthetic oligonucleotide
  Antisense strand to SEQ ID NO: 906986
gauguucaggaggacucac

SEQ ID NO: 906988 - RNA, 19 nt, Artificial Sequence
  Description of Artificial Sequence: Synthetic oligonucleotide
  Sense strand starting at position 2576 of SEQ ID NO: 589039
uggauuauucugggacgau

SEQ ID NO: 906989 - RNA, 19 nt, Artificial Sequence
  Description of Artificial Sequence: Synthetic oligonucleotide
  Antisense strand to SEQ ID NO: 906988
aucgucccagaauaaucca

SEQ ID NO: 906990 - RNA, 19 nt, Artificial Sequence
  Description of Artificial Sequence: Synthetic oligonucleotide
  Sense strand starting at position 2649 of SEQ ID NO: 589039
cauaaagauccguauucga

SEQ ID NO: 906991 - RNA, 19 nt, Artificial Sequence
  Description of Artificial Sequence: Synthetic oligonucleotide
  Antisense strand to SEQ ID NO: 906990
ucgaauacggaucuuuaug

SEQ ID NO: 906992 - RNA, 19 nt, Artificial Sequence
  Description of Artificial Sequence: Synthetic oligonucleotide
  Sense strand starting at position 2652 of SEQ ID NO: 589039
aaagauccguauucgagau

SEQ ID NO: 906993 - RNA, 19 nt, Artificial Sequence
  Description of Artificial Sequence: Synthetic oligonucleotide
  Antisense strand to SEQ ID NO: 906992
aucucgaauacggaucuuu

SEQ ID NO: 906994 - RNA, 19 nt, Artificial Sequence
  Description of Artificial Sequence: Synthetic oligonucleotide
  Sense strand starting at position 2662 of SEQ ID NO: 589039
auucgagauugccuagaua

SEQ ID NO: 906995 - RNA, 19 nt, Artificial Sequence
  Description of Artificial Sequence: Synthetic oligonucleotide
  Antisense strand to SEQ ID NO: 906994
uaucuaggcaaucucgaau

SEQ ID NO: 906996 - RNA, 19 nt, Artificial Sequence
  Description of Artificial Sequence: Synthetic oligonucleotide
  Sense strand starting at position 2665 of SEQ ID NO: 589039
cgagauugccuagauaaug

SEQ ID NO: 906997 - RNA, 19 nt, Artificial Sequence
  Description of Artificial Sequence: Synthetic oligonucleotide
  Antisense strand to SEQ ID NO: 906996
cauuaucuaggcaaucucg

SEQ ID NO: 906998 - RNA, 19 nt, Artificial Sequence
  Description of Artificial Sequence: Synthetic oligonucleotide
  Sense strand starting at position 3110 of SEQ ID NO: 589039
cccaacguaucuuuaaaga

SEQ ID NO: 906999 - RNA, 19 nt, Artificial Sequence
  Description of Artificial Sequence: Synthetic oligonucleotide
  Antisense strand to SEQ ID NO: 906998
ucuuuaaagauacguuggg

SEQ ID NO: 907000 - RNA, 19 nt, Artificial Sequence
  Description of Artificial Sequence: Synthetic oligonucleotide
  Sense strand starting at position 3162 of SEQ ID NO: 589039
ccugaacugcccuaagaua

SEQ ID NO: 907001 - RNA, 19 nt, Artificial Sequence
  Description of Artificial Sequence: Synthetic oligonucleotide
  Antisense strand to SEQ ID NO: 907000
uaucuuagggcaguucagg

SEQ ID NO: 907002 - RNA, 19 nt, Artificial Sequence
  Description of Artificial Sequence: Synthetic oligonucleotide
  Sense strand starting at position 3173 of SEQ ID NO: 589039
cuaagauaauugguuccca

SEQ ID NO: 907003 - RNA, 19 nt, Artificial Sequence
  Description of Artificial Sequence: Synthetic oligonucleotide
  Antisense strand to SEQ ID NO: 907002
ugggaaccaauuaucuuag

SEQ ID NO: 907004 - RNA, 19 nt, Artificial Sequence
  Description of Artificial Sequence: Synthetic oligonucleotide
  Sense strand starting at position 3177 of SEQ ID NO: 589039
gauaauugguucccaguuu

SEQ ID NO: 907005 - RNA, 19 nt, Artificial Sequence
  Description of Artificial Sequence: Synthetic oligonucleotide
  Antisense strand to SEQ ID NO: 907004
aaacugggaaccaauuauc

SEQ ID NO: 907006 - RNA, 19 nt, Artificial Sequence
  Description of Artificial Sequence: Synthetic oligonucleotide
  Sense strand starting at position 3234 of SEQ ID NO: 589039
uuaacacgccuguauuaau

SEQ ID NO: 907007 - RNA, 19 nt, Artificial Sequence
  Description of Artificial Sequence: Synthetic oligonucleotide
  Antisense strand to SEQ ID NO: 907006
auuaauacaggcguguuaa

SEQ ID NO: 907008 - RNA, 19 nt, Artificial Sequence
  Description of Artificial Sequence: Synthetic oligonucleotide
  Sense strand starting at position 3245 of SEQ ID NO: 589039
guauuaauuugugccucau

SEQ ID NO: 907009 - RNA, 19 nt, Artificial Sequence
  Description of Artificial Sequence: Synthetic oligonucleotide
  Antisense strand to SEQ ID NO: 907008
augaggcacaaauuaauac

SEQ ID NO: 907010 - RNA, 19 nt, Artificial Sequence
  Description of Artificial Sequence: Synthetic oligonucleotide
  Sense strand starting at position 3257 of SEQ ID NO: 589039
gccucaucuaggcagaguu

SEQ ID NO: 907011 - RNA, 19 nt, Artificial Sequence
  Description of Artificial Sequence: Synthetic oligonucleotide
  Antisense strand to SEQ ID NO: 907010
aacucugccuagaugaggc

SEQ ID NO: 907012 - RNA, 19 nt, Artificial Sequence
  Description of Artificial Sequence: Synthetic oligonucleotide
  Sense strand starting at position 3259 of SEQ ID NO: 589039
cucaucuaggcagaguuau

SEQ ID NO: 907013 - RNA, 19 nt, Artificial Sequence
  Description of Artificial Sequence: Synthetic oligonucleotide
  Antisense strand to SEQ ID NO: 907012
auaacucugccuagaugag

SEQ ID NO: 907014 - RNA, 19 nt, Artificial Sequence
  Description of Artificial Sequence: Synthetic oligonucleotide
  Sense strand starting at position 3270 of SEQ ID NO: 589039
agaguuauuuaggacagug

SEQ ID NO: 907015 - RNA, 19 nt, Artificial Sequence
  Description of Artificial Sequence: Synthetic oligonucleotide
  Antisense strand to SEQ ID NO: 907014
cacuguccuaaauaacucu

SEQ ID NO: 907016 - RNA, 19 nt, Artificial Sequence
  Description of Artificial Sequence: Synthetic oligonucleotide
  Sense strand starting at position 3280 of SEQ ID NO: 589039
aggacaguggcuuacugau

SEQ ID NO: 907017 - RNA, 19 nt, Artificial Sequence
  Description of Artificial Sequence: Synthetic oligonucleotide
  Antisense strand to SEQ ID NO: 907016
aucaguaagccacuguccu

SEQ ID NO: 907018 - RNA, 19 nt, Artificial Sequence
  Description of Artificial Sequence: Synthetic oligonucleotide
  Sense strand starting at position 3290 of SEQ ID NO: 589039
cuuacugaucuuuguauuc

SEQ ID NO: 907019 - RNA, 19 nt, Artificial Sequence
  Description of Artificial Sequence: Synthetic oligonucleotide
  Antisense strand to SEQ ID NO: 907018
gaauacaaagaucaguaag

SEQ ID NO: 907020 - RNA, 19 nt, Artificial Sequence
  Description of Artificial Sequence: Synthetic oligonucleotide
  Sense strand starting at position 3295 of SEQ ID NO: 589039
ugaucuuuguauucucgaa

SEQ ID NO: 907021 - RNA, 19 nt, Artificial Sequence
  Description of Artificial Sequence: Synthetic oligonucleotide
  Antisense strand to SEQ ID NO: 907020
uucgagaauacaaagauca

SEQ ID NO: 907022 - RNA, 19 nt, Artificial Sequence
  Description of Artificial Sequence: Synthetic oligonucleotide
  Sense strand starting at position 3322 of SEQ ID NO: 589039
cuugguaggcaucaaguau

SEQ ID NO: 907023 - RNA, 19 nt, Artificial Sequence
  Description of Artificial Sequence: Synthetic oligonucleotide
  Antisense strand to SEQ ID NO: 907022
auacuugaugccuaccaag

SEQ ID NO: 907024 - RNA, 19 nt, Artificial Sequence
  Description of Artificial Sequence: Synthetic oligonucleotide
  Sense strand starting at position 3333 of SEQ ID NO: 589039
ucaaguauuugugcugaau

SEQ ID NO: 907025 - RNA, 19 nt, Artificial Sequence
  Description of Artificial Sequence: Synthetic oligonucleotide
  Antisense strand to SEQ ID NO: 907024
auucagcacaaauacuuga

SEQ ID NO: 907026 - RNA, 19 nt, Artificial Sequence
  Description of Artificial Sequence: Synthetic oligonucleotide
  Sense strand starting at position 3348 of SEQ ID NO: 589039
gaaugaagauaugacugaa

SEQ ID NO: 907027 - RNA, 19 nt, Artificial Sequence
  Description of Artificial Sequence: Synthetic oligonucleotide
  Antisense strand to SEQ ID NO: 907026
uucagucauaucuucauuc

SEQ ID NO: 907028 - RNA, 19 nt, Artificial Sequence
  Description of Artificial Sequence: Synthetic oligonucleotide
  Sense strand starting at position 231 of SEQ ID NO: 589040
cuuguuaggucuuuaugaa

SEQ ID NO: 907029 - RNA, 19 nt, Artificial Sequence
  Description of Artificial Sequence: Synthetic oligonucleotide
  Antisense strand to SEQ ID NO: 907028
uucauaaagaccuaacaag

SEQ ID NO: 907030 - RNA, 19 nt, Artificial Sequence
  Description of Artificial Sequence: Synthetic oligonucleotide
  Sense strand starting at position 232 of SEQ ID NO: 589040
uuguuaggucuuuaugaaa

SEQ ID NO: 907031 - RNA, 19 nt, Artificial Sequence
  Description of Artificial Sequence: Synthetic oligonucleotide
  Antisense strand to SEQ ID NO: 907030
uuucauaaagaccuaacaa

SEQ ID NO: 907032 - RNA, 19 nt, Artificial Sequence
  Description of Artificial Sequence: Synthetic oligonucleotide
  Sense strand starting at position 245 of SEQ ID NO: 589040
augaaacagucgucuuaca

SEQ ID NO: 907033 - RNA, 19 nt, Artificial Sequence
  Description of Artificial Sequence: Synthetic oligonucleotide
  Antisense strand to SEQ ID NO: 907032
uguaagacgacuguuucau

SEQ ID NO: 907034 - RNA, 19 nt, Artificial Sequence
  Description of Artificial Sequence: Synthetic oligonucleotide
  Sense strand starting at position 333 of SEQ ID NO: 589040
cgguuuauaacaggaauuc

SEQ ID NO: 907035 - RNA, 19 nt, Artificial Sequence
  Description of Artificial Sequence: Synthetic oligonucleotide
  Antisense strand to SEQ ID NO: 907034
gaauuccuguuauaaaccg

SEQ ID NO: 907036 - RNA, 19 nt, Artificial Sequence
  Description of Artificial Sequence: Synthetic oligonucleotide
  Sense strand starting at position 346 of SEQ ID NO: 589040
gaauucuagguccagguuu

SEQ ID NO: 907037 - RNA, 19 nt, Artificial Sequence
  Description of Artificial Sequence: Synthetic oligonucleotide
  Antisense strand to SEQ ID NO: 907036
aaaccuggaccuagaauuc

SEQ ID NO: 907038 - RNA, 19 nt, Artificial Sequence
  Description of Artificial Sequence: Synthetic oligonucleotide
  Sense strand starting at position 348 of SEQ ID NO: 589040
auucuagguccagguuuga

SEQ ID NO: 907039 - RNA, 19 nt, Artificial Sequence
  Description of Artificial Sequence: Synthetic oligonucleotide
  Antisense strand to SEQ ID NO: 907038
ucaaaccuggaccuagaau

SEQ ID NO: 907040 - RNA, 19 nt, Artificial Sequence
  Description of Artificial Sequence: Synthetic oligonucleotide
  Sense strand starting at position 362 of SEQ ID NO: 589040
uuugaauucucuccaguug

SEQ ID NO: 907041 - RNA, 19 nt, Artificial Sequence
  Description of Artificial Sequence: Synthetic oligonucleotide
  Antisense strand to SEQ ID NO: 907040
caacuggagagaauucaaa

SEQ ID NO: 907042 - RNA, 19 nt, Artificial Sequence
  Description of Artificial Sequence: Synthetic oligonucleotide
  Sense strand starting at position 363 of SEQ ID NO: 589040
uugaauucucuccaguugu

SEQ ID NO: 907043 - RNA, 19 nt, Artificial Sequence
  Description of Artificial Sequence: Synthetic oligonucleotide
  Antisense strand to SEQ ID NO: 907042
acaacuggagagaauucaa

SEQ ID NO: 907044 - RNA, 19 nt, Artificial Sequence
  Description of Artificial Sequence: Synthetic oligonucleotide
  Sense strand starting at position 376 of SEQ ID NO: 589040
aguugucugaauuaccagu

SEQ ID NO: 907045 - RNA, 19 nt, Artificial Sequence
  Description of Artificial Sequence: Synthetic oligonucleotide
  Antisense strand to SEQ ID NO: 907044
acugguaauucagacaacu

SEQ ID NO: 907046 - RNA, 19 nt, Artificial Sequence
  Description of Artificial Sequence: Synthetic oligonucleotide
  Sense strand starting at position 378 of SEQ ID NO: 589040
uugucugaauuaccaguau

SEQ ID NO: 907047 - RNA, 19 nt, Artificial Sequence
  Description of Artificial Sequence: Synthetic oligonucleotide
  Antisense strand to SEQ ID NO: 907046
auacugguaauucagacaa

SEQ ID NO: 907048 - RNA, 19 nt, Artificial Sequence
  Description of Artificial Sequence: Synthetic oligonucleotide
  Sense strand starting at position 382 of SEQ ID NO: 589040
cugaauuaccaguauguuc

SEQ ID NO: 907049 - RNA, 19 nt, Artificial Sequence
  Description of Artificial Sequence: Synthetic oligonucleotide
  Antisense strand to SEQ ID NO: 907048
gaacauacugguaauucag

SEQ ID NO: 907050 - RNA, 19 nt, Artificial Sequence
  Description of Artificial Sequence: Synthetic oligonucleotide
  Sense strand starting at position 480 of SEQ ID NO: 589040
gcauauggauugcuggaaa

SEQ ID NO: 907051 - RNA, 19 nt, Artificial Sequence
  Description of Artificial Sequence: Synthetic oligonucleotide
  Antisense strand to SEQ ID NO: 907050
uuuccagcaauccauaugc

SEQ ID NO: 907052 - RNA, 19 nt, Artificial Sequence
  Description of Artificial Sequence: Synthetic oligonucleotide
  Sense strand starting at position 669 of SEQ ID NO: 589040
ucuuuagugcgcuucacga

SEQ ID NO: 907053 - RNA, 19 nt, Artificial Sequence
  Description of Artificial Sequence: Synthetic oligonucleotide
  Antisense strand to SEQ ID NO: 907052
ucgugaagcgcacuaaaga

SEQ ID NO: 907054 - RNA, 19 nt, Artificial Sequence
  Description of Artificial Sequence: Synthetic oligonucleotide
  Sense strand starting at position 898 of SEQ ID NO: 589040
agugcuuuacccuagaggu

SEQ ID NO: 907055 - RNA, 19 nt, Artificial Sequence
  Description of Artificial Sequence: Synthetic oligonucleotide
  Antisense strand to SEQ ID NO: 907054
accucuaggguaaagcacu

SEQ ID NO: 907056 - RNA, 19 nt, Artificial Sequence
  Description of Artificial Sequence: Synthetic oligonucleotide
  Sense strand starting at position 1008 of SEQ ID NO: 589040
guuccagaacuguagcaua

SEQ ID NO: 907057 - RNA, 19 nt, Artificial Sequence
  Description of Artificial Sequence: Synthetic oligonucleotide
  Antisense strand to SEQ ID NO: 907056
uaugcuacaguucuggaac

SEQ ID NO: 907058 - RNA, 19 nt, Artificial Sequence
  Description of Artificial Sequence: Synthetic oligonucleotide
  Sense strand starting at position 1013 of SEQ ID NO: 589040
agaacuguagcauaguaga

SEQ ID NO: 907059 - RNA, 19 nt, Artificial Sequence
  Description of Artificial Sequence: Synthetic oligonucleotide
  Antisense strand to SEQ ID NO: 907058
ucuacuaugcuacaguucu

SEQ ID NO: 907060 - RNA, 19 nt, Artificial Sequence
  Description of Artificial Sequence: Synthetic oligonucleotide
  Sense strand starting at position 1021 of SEQ ID NO: 589040
agcauaguagaauauuacu

SEQ ID NO: 907061 - RNA, 19 nt, Artificial Sequence
  Description of Artificial Sequence: Synthetic oligonucleotide
  Antisense strand to SEQ ID NO: 907060
aguaauauucuacuaugcu

SEQ ID NO: 907062 - RNA, 19 nt, Artificial Sequence
  Description of Artificial Sequence: Synthetic oligonucleotide
  Sense strand starting at position 1167 of SEQ ID NO: 589040
guaaguguuauacaccgaa

SEQ ID NO: 907063 - RNA, 19 nt, Artificial Sequence
  Description of Artificial Sequence: Synthetic oligonucleotide
  Antisense strand to SEQ ID NO: 907062
uucgguguauaacacuuac

SEQ ID NO: 907064 - RNA, 19 nt, Artificial Sequence
  Description of Artificial Sequence: Synthetic oligonucleotide
  Sense strand starting at position 1170 of SEQ ID NO: 589040
aguguuauacaccgaaacu

SEQ ID NO: 907065 - RNA, 19 nt, Artificial Sequence
  Description of Artificial Sequence: Synthetic oligonucleotide
  Antisense strand to SEQ ID NO: 907064
aguuucgguguauaacacu

SEQ ID NO: 907066 - RNA, 19 nt, Artificial Sequence
  Description of Artificial Sequence: Synthetic oligonucleotide
  Sense strand starting at position 1181 of SEQ ID NO: 589040
ccgaaacuuuacgugaaag

SEQ ID NO: 907067 - RNA, 19 nt, Artificial Sequence
  Description of Artificial Sequence: Synthetic oligonucleotide
  Antisense strand to SEQ ID NO: 907066
cuuucacguaaaguuucgg

SEQ ID NO: 907068 - RNA, 19 nt, Artificial Sequence
  Description of Artificial Sequence: Synthetic oligonucleotide
  Sense strand starting at position 1182 of SEQ ID NO: 589040
cgaaacuuuacgugaaagg

SEQ ID NO: 907069 - RNA, 19 nt, Artificial Sequence
  Description of Artificial Sequence: Synthetic oligonucleotide
  Antisense strand to SEQ ID NO: 907068
ccuuucacguaaaguuucg

SEQ ID NO: 907070 - RNA, 19 nt, Artificial Sequence
  Description of Artificial Sequence: Synthetic oligonucleotide
  Sense strand starting at position 1261 of SEQ ID NO: 589040
ggcuuugagcgcuuagguu

SEQ ID NO: 907071 - RNA, 19 nt, Artificial Sequence
  Description of Artificial Sequence: Synthetic oligonucleotide
  Antisense strand to SEQ ID NO: 907070
aaccuaagcgcucaaagcc

SEQ ID NO: 907072 - RNA, 19 nt, Artificial Sequence
  Description of Artificial Sequence: Synthetic oligonucleotide
  Sense strand starting at position 1328 of SEQ ID NO: 589040
uggguuuccgaucaaggga

SEQ ID NO: 907073 - RNA, 19 nt, Artificial Sequence
  Description of Artificial Sequence: Synthetic oligonucleotide
  Antisense strand to SEQ ID NO: 907072
ucccuugaucggaaaccca

SEQ ID NO: 907074 - RNA, 19 nt, Artificial Sequence
  Description of Artificial Sequence: Synthetic oligonucleotide
  Sense strand starting at position 1410 of SEQ ID NO: 589040
acagcaauucccugaggaa

SEQ ID NO: 907075 - RNA, 19 nt, Artificial Sequence
  Description of Artificial Sequence: Synthetic oligonucleotide
  Antisense strand to SEQ ID NO: 907074
uuccucagggaauugcugu

SEQ ID NO: 907076 - RNA, 19 nt, Artificial Sequence
  Description of Artificial Sequence: Synthetic oligonucleotide
  Sense strand starting at position 1626 of SEQ ID NO: 589040
gccgaaugucuugacccaa

SEQ ID NO: 907077 - RNA, 19 nt, Artificial Sequence
  Description of Artificial Sequence: Synthetic oligonucleotide
  Antisense strand to SEQ ID NO: 907076
uugggucaagacauucggc

SEQ ID NO: 907078 - RNA, 19 nt, Artificial Sequence
  Description of Artificial Sequence: Synthetic oligonucleotide
  Sense strand starting at position 2192 of SEQ ID NO: 589040
cgucggagcgggcuaauua

SEQ ID NO: 907079 - RNA, 19 nt, Artificial Sequence
  Description of Artificial Sequence: Synthetic oligonucleotide
  Antisense strand to SEQ ID NO: 907078
uaauuagcccgcuccgacg

SEQ ID NO: 907080 - RNA, 19 nt, Artificial Sequence
  Description of Artificial Sequence: Synthetic oligonucleotide
  Sense strand starting at position 2367 of SEQ ID NO: 589040
gacuuaugcacccggagag

SEQ ID NO: 907081 - RNA, 19 nt, Artificial Sequence
  Description of Artificial Sequence: Synthetic oligonucleotide
  Antisense strand to SEQ ID NO: 907080
cucuccgggugcauaaguc

SEQ ID NO: 907082 - RNA, 19 nt, Artificial Sequence
  Description of Artificial Sequence: Synthetic oligonucleotide
  Sense strand starting at position 2607 of SEQ ID NO: 589040
aucucaaaguggucaagga

SEQ ID NO: 907083 - RNA, 19 nt, Artificial Sequence
  Description of Artificial Sequence: Synthetic oligonucleotide
  Antisense strand to SEQ ID NO: 907082
uccuugaccacuuugagau

SEQ ID NO: 907084 - RNA, 19 nt, Artificial Sequence
  Description of Artificial Sequence: Synthetic oligonucleotide
  Sense strand starting at position 2694 of SEQ ID NO: 589040
uuucgaagaauauguguaa

SEQ ID NO: 907085 - RNA, 19 nt, Artificial Sequence
  Description of Artificial Sequence: Synthetic oligonucleotide
  Antisense strand to SEQ ID NO: 907084
uuacacauauucuucgaaa

SEQ ID NO: 907086 - RNA, 19 nt, Artificial Sequence
  Description of Artificial Sequence: Synthetic oligonucleotide
  Sense strand starting at position 2695 of SEQ ID NO: 589040
uucgaagaauauguguaau

SEQ ID NO: 907087 - RNA, 19 nt, Artificial Sequence
  Description of Artificial Sequence: Synthetic oligonucleotide
  Antisense strand to SEQ ID NO: 907086
auuacacauauucuucgaa

SEQ ID NO: 907088 - RNA, 19 nt, Artificial Sequence
  Description of Artificial Sequence: Synthetic oligonucleotide
  Sense strand starting at position 2707 of SEQ ID NO: 589040
guguaauggcaagggauga

SEQ ID NO: 907089 - RNA, 19 nt, Artificial Sequence
  Description of Artificial Sequence: Synthetic oligonucleotide
  Antisense strand to SEQ ID NO: 907088
ucaucccuugccauuacac

SEQ ID NO: 907090 - RNA, 19 nt, Artificial Sequence
  Description of Artificial Sequence: Synthetic oligonucleotide
  Sense strand starting at position 2725 of SEQ ID NO: 589040
accagagagcguuacauuc

SEQ ID NO: 907091 - RNA, 19 nt, Artificial Sequence
  Description of Artificial Sequence: Synthetic oligonucleotide
  Antisense strand to SEQ ID NO: 907090
gaauguaacgcucucuggu

SEQ ID NO: 907092 - RNA, 19 nt, Artificial Sequence
  Description of Artificial Sequence: Synthetic oligonucleotide
  Sense strand starting at position 2828 of SEQ ID NO: 589040
uguucuaaaugcuuugaaa

SEQ ID NO: 907093 - RNA, 19 nt, Artificial Sequence
  Description of Artificial Sequence: Synthetic oligonucleotide
  Antisense strand to SEQ ID NO: 907092
uuucaaagcauuuagaaca

SEQ ID NO: 907094 - RNA, 19 nt, Artificial Sequence
  Description of Artificial Sequence: Synthetic oligonucleotide
  Sense strand starting at position 2861 of SEQ ID NO: 589040
agugaaauuagggagcguu

SEQ ID NO: 907095 - RNA, 19 nt, Artificial Sequence
  Description of Artificial Sequence: Synthetic oligonucleotide
  Antisense strand to SEQ ID NO: 907094
aacgcucccuaauuucacu

SEQ ID NO: 907096 - RNA, 19 nt, Artificial Sequence
  Description of Artificial Sequence: Synthetic oligonucleotide
  Sense strand starting at position 2976 of SEQ ID NO: 589040
caaaguucuggcuaugcca

SEQ ID NO: 907097 - RNA, 19 nt, Artificial Sequence
  Description of Artificial Sequence: Synthetic oligonucleotide
  Antisense strand to SEQ ID NO: 907096
uggcauagccagaacuuug

SEQ ID NO: 907098 - RNA, 19 nt, Artificial Sequence
  Description of Artificial Sequence: Synthetic oligonucleotide
  Sense strand starting at position 2984 of SEQ ID NO: 589040
uggcuaugccaauaacugu

SEQ ID NO: 907099 - RNA, 19 nt, Artificial Sequence
  Description of Artificial Sequence: Synthetic oligonucleotide
  Antisense strand to SEQ ID NO: 907098
acaguuauuggcauagcca

SEQ ID NO: 907100 - RNA, 19 nt, Artificial Sequence
  Description of Artificial Sequence: Synthetic oligonucleotide
  Sense strand starting at position 3235 of SEQ ID NO: 589040
agcacuugcagugaaguaa

SEQ ID NO: 907101 - RNA, 19 nt, Artificial Sequence
  Description of Artificial Sequence: Synthetic oligonucleotide
  Antisense strand to SEQ ID NO: 907100
uuacuucacugcaagugcu

SEQ ID NO: 907102 - RNA, 19 nt, Artificial Sequence
  Description of Artificial Sequence: Synthetic oligonucleotide
  Sense strand starting at position 3278 of SEQ ID NO: 589040
ugaauaugaggcuguuauu

SEQ ID NO: 907103 - RNA, 19 nt, Artificial Sequence
  Description of Artificial Sequence: Synthetic oligonucleotide
  Antisense strand to SEQ ID NO: 907102
aauaacagccucauauuca

SEQ ID NO: 907104 - RNA, 19 nt, Artificial Sequence
  Description of Artificial Sequence: Synthetic oligonucleotide
  Sense strand starting at position 3454 of SEQ ID NO: 589040
uguggagaugcaugauuac

SEQ ID NO: 907105 - RNA, 19 nt, Artificial Sequence
  Description of Artificial Sequence: Synthetic oligonucleotide
  Antisense strand to SEQ ID NO: 907104
guaaucaugcaucuccaca

SEQ ID NO: 907106 - RNA, 19 nt, Artificial Sequence
  Description of Artificial Sequence: Synthetic oligonucleotide
  Sense strand starting at position 3457 of SEQ ID NO: 589040
ggagaugcaugauuacauu

SEQ ID NO: 907107 - RNA, 19 nt, Artificial Sequence
  Description of Artificial Sequence: Synthetic oligonucleotide
  Antisense strand to SEQ ID NO: 907106
aauguaaucaugcaucucc

SEQ ID NO: 907108 - RNA, 19 nt, Artificial Sequence
  Description of Artificial Sequence: Synthetic oligonucleotide
  Sense strand starting at position 9 of SEQ ID NO: 589041
uuaagaaucucccaaguug

SEQ ID NO: 907109 - RNA, 19 nt, Artificial Sequence
  Description of Artificial Sequence: Synthetic oligonucleotide
  Antisense strand to SEQ ID NO: 907108
caacuugggagauucuuaa

SEQ ID NO: 907110 - RNA, 19 nt, Artificial Sequence
  Description of Artificial Sequence: Synthetic oligonucleotide
  Sense strand starting at position 353 of SEQ ID NO: 589041
agauguuccuucuugauga

SEQ ID NO: 907111 - RNA, 19 nt, Artificial Sequence
  Description of Artificial Sequence: Synthetic oligonucleotide
  Antisense strand to SEQ ID NO: 907110
ucaucaagaaggaacaucu

SEQ ID NO: 907112 - RNA, 19 nt, Artificial Sequence
  Description of Artificial Sequence: Synthetic oligonucleotide
  Sense strand starting at position 355 of SEQ ID NO: 589041
auguuccuucuugaugaca

SEQ ID NO: 907113 - RNA, 19 nt, Artificial Sequence
  Description of Artificial Sequence: Synthetic oligonucleotide
  Antisense strand to SEQ ID NO: 907112
ugucaucaagaaggaacau

SEQ ID NO: 907114 - RNA, 19 nt, Artificial Sequence
  Description of Artificial Sequence: Synthetic oligonucleotide
  Sense strand starting at position 435 of SEQ ID NO: 589041
auuggaaugugaugaauac

SEQ ID NO: 907115 - RNA, 19 nt, Artificial Sequence
  Description of Artificial Sequence: Synthetic oligonucleotide
  Antisense strand to SEQ ID NO: 907114
guauucaucacauuccaau

SEQ ID NO: 907116 - RNA, 19 nt, Artificial Sequence
  Description of Artificial Sequence: Synthetic oligonucleotide
  Sense strand starting at position 486 of SEQ ID NO: 589041
uuaguaagcugcccugaca

SEQ ID NO: 907117 - RNA, 19 nt, Artificial Sequence
  Description of Artificial Sequence: Synthetic oligonucleotide
  Antisense strand to SEQ ID NO: 907116
ugucagggcagcuuacuaa

SEQ ID NO: 907118 - RNA, 19 nt, Artificial Sequence
  Description of Artificial Sequence: Synthetic oligonucleotide
  Sense strand starting at position 578 of SEQ ID NO: 589041
caaaucugauugggaugga

SEQ ID NO: 907119 - RNA, 19 nt, Artificial Sequence
  Description of Artificial Sequence: Synthetic oligonucleotide
  Antisense strand to SEQ ID NO: 907118
uccaucccaaucagauuug

SEQ ID NO: 907120 - RNA, 19 nt, Artificial Sequence
  Description of Artificial Sequence: Synthetic oligonucleotide
  Sense strand starting at position 594 of SEQ ID NO: 589041
ggagaauccaaauguguaa

SEQ ID NO: 907121 - RNA, 19 nt, Artificial Sequence
  Description of Artificial Sequence: Synthetic oligonucleotide
  Antisense strand to SEQ ID NO: 907120
uuacacauuuggauucucc

SEQ ID NO: 907122 - RNA, 19 nt, Artificial Sequence
  Description of Artificial Sequence: Synthetic oligonucleotide
  Sense strand starting at position 861 of SEQ ID NO: 589041
ugcucagauucuccugaaa

SEQ ID NO: 907123 - RNA, 19 nt, Artificial Sequence
  Description of Artificial Sequence: Synthetic oligonucleotide
  Antisense strand to SEQ ID NO: 907122
uuucaggagaaucugagca

SEQ ID NO: 907124 - RNA, 19 nt, Artificial Sequence
  Description of Artificial Sequence: Synthetic oligonucleotide
  Sense strand starting at position 864 of SEQ ID NO: 589041
ucagauucuccugaaagca

SEQ ID NO: 907125 - RNA, 19 nt, Artificial Sequence
  Description of Artificial Sequence: Synthetic oligonucleotide
  Antisense strand to SEQ ID NO: 907124
ugcuuucaggagaaucuga

SEQ ID NO: 907126 - RNA, 19 nt, Artificial Sequence
  Description of Artificial Sequence: Synthetic oligonucleotide
  Sense strand starting at position 880 of SEQ ID NO: 589041
gcauaacgcuuuccuaagu

SEQ ID NO: 907127 - RNA, 19 nt, Artificial Sequence
  Description of Artificial Sequence: Synthetic oligonucleotide
  Antisense strand to SEQ ID NO: 907126
acuuaggaaagcguuaugc

SEQ ID NO: 907128 - RNA, 19 nt, Artificial Sequence
  Description of Artificial Sequence: Synthetic oligonucleotide
  Sense strand starting at position 885 of SEQ ID NO: 589041
acgcuuuccuaaguauaca

SEQ ID NO: 907129 - RNA, 19 nt, Artificial Sequence
  Description of Artificial Sequence: Synthetic oligonucleotide
  Antisense strand to SEQ ID NO: 907128
uguauacuuaggaaagcgu

SEQ ID NO: 907130 - RNA, 19 nt, Artificial Sequence
  Description of Artificial Sequence: Synthetic oligonucleotide
  Sense strand starting at position 1119 of SEQ ID NO: 589041
acuaaugcagcccguaauu

SEQ ID NO: 907131 - RNA, 19 nt, Artificial Sequence
  Description of Artificial Sequence: Synthetic oligonucleotide
  Antisense strand to SEQ ID NO: 907130
aauuacgggcugcauuagu

SEQ ID NO: 907132 - RNA, 19 nt, Artificial Sequence
  Description of Artificial Sequence: Synthetic oligonucleotide
  Sense strand starting at position 2138 of SEQ ID NO: 589041
ggcugcaucuauuauuuga

SEQ ID NO: 907133 - RNA, 19 nt, Artificial Sequence
  Description of Artificial Sequence: Synthetic oligonucleotide
  Antisense strand to SEQ ID NO: 907132
ucaaauaauagaugcagcc

SEQ ID NO: 907134 - RNA, 19 nt, Artificial Sequence
  Description of Artificial Sequence: Synthetic oligonucleotide
  Sense strand starting at position 2153 of SEQ ID NO: 589041
uugaaugacucguacgaag

SEQ ID NO: 907135 - RNA, 19 nt, Artificial Sequence
  Description of Artificial Sequence: Synthetic oligonucleotide
  Antisense strand to SEQ ID NO: 907134
cuucguacgagucauucaa

SEQ ID NO: 907136 - RNA, 19 nt, Artificial Sequence
  Description of Artificial Sequence: Synthetic oligonucleotide
  Sense strand starting at position 2155 of SEQ ID NO: 589041
gaaugacucguacgaagga

SEQ ID NO: 907137 - RNA, 19 nt, Artificial Sequence
  Description of Artificial Sequence: Synthetic oligonucleotide
  Antisense strand to SEQ ID NO: 907136
uccuucguacgagucauuc

SEQ ID NO: 907138 - RNA, 19 nt, Artificial Sequence
  Description of Artificial Sequence: Synthetic oligonucleotide
  Sense strand starting at position 2164 of SEQ ID NO: 589041
guacgaaggagaugcuauu

SEQ ID NO: 907139 - RNA, 19 nt, Artificial Sequence
  Description of Artificial Sequence: Synthetic oligonucleotide
  Antisense strand to SEQ ID NO: 907138
aauagcaucuccuucguac

SEQ ID NO: 907140 - RNA, 19 nt, Artificial Sequence
  Description of Artificial Sequence: Synthetic oligonucleotide
  Sense strand starting at position 2174 of SEQ ID NO: 589041
gaugcuauuuaccgggcaa

SEQ ID NO: 907141 - RNA, 19 nt, Artificial Sequence
  Description of Artificial Sequence: Synthetic oligonucleotide
  Antisense strand to SEQ ID NO: 907140
uugcccgguaaauagcauc

SEQ ID NO: 907142 - RNA, 19 nt, Artificial Sequence
  Description of Artificial Sequence: Synthetic oligonucleotide
  Sense strand starting at position 2175 of SEQ ID NO: 589041
augcuauuuaccgggcaaa

SEQ ID NO: 907143 - RNA, 19 nt, Artificial Sequence
  Description of Artificial Sequence: Synthetic oligonucleotide
  Antisense strand to SEQ ID NO: 907142
uuugcccgguaaauagcau

SEQ ID NO: 907144 - RNA, 19 nt, Artificial Sequence
  Description of Artificial Sequence: Synthetic oligonucleotide
  Sense strand starting at position 2396 of SEQ ID NO: 589041
gcgggaaacgcguacuuga

SEQ ID NO: 907145 - RNA, 19 nt, Artificial Sequence
  Description of Artificial Sequence: Synthetic oligonucleotide
  Antisense strand to SEQ ID NO: 907144
ucaaguacgcguuucccgc

SEQ ID NO: 907146 - RNA, 19 nt, Artificial Sequence
  Description of Artificial Sequence: Synthetic oligonucleotide
  Sense strand starting at position 2502 of SEQ ID NO: 589041
gccuccaacucucuggaau

SEQ ID NO: 907147 - RNA, 19 nt, Artificial Sequence
  Description of Artificial Sequence: Synthetic oligonucleotide
  Antisense strand to SEQ ID NO: 907146
auuccagagaguuggaggc

SEQ ID NO: 907148 - RNA, 19 nt, Artificial Sequence
  Description of Artificial Sequence: Synthetic oligonucleotide
  Sense strand starting at position 2513 of SEQ ID NO: 589041
ucuggaauucuaggcaaca

SEQ ID NO: 907149 - RNA, 19 nt, Artificial Sequence
  Description of Artificial Sequence: Synthetic oligonucleotide
  Antisense strand to SEQ ID NO: 907148
uguugccuagaauuccaga

SEQ ID NO: 907150 - RNA, 19 nt, Artificial Sequence
  Description of Artificial Sequence: Synthetic oligonucleotide
  Sense strand starting at position 2531 of SEQ ID NO: 589041
agauuaacacuuugugaau

SEQ ID NO: 907151 - RNA, 19 nt, Artificial Sequence
  Description of Artificial Sequence: Synthetic oligonucleotide
  Antisense strand to SEQ ID NO: 907150
auucacaaaguguuaaucu

SEQ ID NO: 907152 - RNA, 19 nt, Artificial Sequence
  Description of Artificial Sequence: Synthetic oligonucleotide
  Sense strand starting at position 2568 of SEQ ID NO: 589041
ugcuaaauauuggaguuaa

SEQ ID NO: 907153 - RNA, 19 nt, Artificial Sequence
  Description of Artificial Sequence: Synthetic oligonucleotide
  Antisense strand to SEQ ID NO: 907152
uuaacuccaauauuuagca

SEQ ID NO: 907154 - RNA, 19 nt, Artificial Sequence
  Description of Artificial Sequence: Synthetic oligonucleotide
  Sense strand starting at position 2579 of SEQ ID NO: 589041
ggaguuaaugcugauccuu

SEQ ID NO: 907155 - RNA, 19 nt, Artificial Sequence
  Description of Artificial Sequence: Synthetic oligonucleotide
  Antisense strand to SEQ ID NO: 907154
aaggaucagcauuaacucc

SEQ ID NO: 907156 - RNA, 19 nt, Artificial Sequence
  Description of Artificial Sequence: Synthetic oligonucleotide
  Sense strand starting at position 2596 of SEQ ID NO: 589041
uuuggaagucucugaaggu

SEQ ID NO: 907157 - RNA, 19 nt, Artificial Sequence
  Description of Artificial Sequence: Synthetic oligonucleotide
  Antisense strand to SEQ ID NO: 907156
accuucagagacuuccaaa

SEQ ID NO: 907158 - RNA, 19 nt, Artificial Sequence
  Description of Artificial Sequence: Synthetic oligonucleotide
  Sense strand starting at position 2597 of SEQ ID NO: 589041
uuggaagucucugaagguu

SEQ ID NO: 907159 - RNA, 19 nt, Artificial Sequence
  Description of Artificial Sequence: Synthetic oligonucleotide
  Antisense strand to SEQ ID NO: 907158
aaccuucagagacuuccaa

SEQ ID NO: 907160 - RNA, 19 nt, Artificial Sequence
  Description of Artificial Sequence: Synthetic oligonucleotide
  Sense strand starting at position 2603 of SEQ ID NO: 589041
gucucugaagguugcaaga

SEQ ID NO: 907161 - RNA, 19 nt, Artificial Sequence
  Description of Artificial Sequence: Synthetic oligonucleotide
  Antisense strand to SEQ ID NO: 907160
ucuugcaaccuucagagac

SEQ ID NO: 907162 - RNA, 19 nt, Artificial Sequence
  Description of Artificial Sequence: Synthetic oligonucleotide
  Sense strand starting at position 2605 of SEQ ID NO: 589041
cucugaagguugcaagauu

SEQ ID NO: 907163 - RNA, 19 nt, Artificial Sequence
  Description of Artificial Sequence: Synthetic oligonucleotide
  Antisense strand to SEQ ID NO: 907162
aaucuugcaaccuucagag

SEQ ID NO: 907164 - RNA, 19 nt, Artificial Sequence
  Description of Artificial Sequence: Synthetic oligonucleotide
  Sense strand starting at position 2738 of SEQ ID NO: 589041
guuaauauaaguggagaau

SEQ ID NO: 907165 - RNA, 19 nt, Artificial Sequence
  Description of Artificial Sequence: Synthetic oligonucleotide
  Antisense strand to SEQ ID NO: 907164
auucuccacuuauauuaac

SEQ ID NO: 907166 - RNA, 19 nt, Artificial Sequence
  Description of Artificial Sequence: Synthetic oligonucleotide
  Sense strand starting at position 2800 of SEQ ID NO: 589041
ucaaguugcccuuaauaug

SEQ ID NO: 907167 - RNA, 19 nt, Artificial Sequence
  Description of Artificial Sequence: Synthetic oligonucleotide
  Antisense strand to SEQ ID NO: 907166
cauauuaagggcaacuuga

SEQ ID NO: 907168 - RNA, 19 nt, Artificial Sequence
  Description of Artificial Sequence: Synthetic oligonucleotide
  Sense strand starting at position 2810 of SEQ ID NO: 589041
cuuaauaugugauccgaua

SEQ ID NO: 907169 - RNA, 19 nt, Artificial Sequence
  Description of Artificial Sequence: Synthetic oligonucleotide
  Antisense strand to SEQ ID NO: 907168
uaucggaucacauauuaag

SEQ ID NO: 907170 - RNA, 19 nt, Artificial Sequence
  Description of Artificial Sequence: Synthetic oligonucleotide
  Sense strand starting at position 2841 of SEQ ID NO: 589041
aacugaguucuuugucuug

SEQ ID NO: 907171 - RNA, 19 nt, Artificial Sequence
  Description of Artificial Sequence: Synthetic oligonucleotide
  Antisense strand to SEQ ID NO: 907170
caagacaaagaacucaguu

SEQ ID NO: 907172 - RNA, 19 nt, Artificial Sequence
  Description of Artificial Sequence: Synthetic oligonucleotide
  Sense strand starting at position 2844 of SEQ ID NO: 589041
ugaguucuuugucuuguga

SEQ ID NO: 907173 - RNA, 19 nt, Artificial Sequence
  Description of Artificial Sequence: Synthetic oligonucleotide
  Antisense strand to SEQ ID NO: 907172
ucacaagacaaagaacuca

SEQ ID NO: 907174 - RNA, 19 nt, Artificial Sequence
  Description of Artificial Sequence: Synthetic oligonucleotide
  Sense strand starting at position 2858 of SEQ ID NO: 589041
ugugaagcuccaggcuuaa

SEQ ID NO: 907175 - RNA, 19 nt, Artificial Sequence
  Description of Artificial Sequence: Synthetic oligonucleotide
  Antisense strand to SEQ ID NO: 907174
uuaagccuggagcuucaca

SEQ ID NO: 907176 - RNA, 19 nt, Artificial Sequence
  Description of Artificial Sequence: Synthetic oligonucleotide
  Sense strand starting at position 2947 of SEQ ID NO: 589041
agcagcuacgagugaauuu

SEQ ID NO: 907177 - RNA, 19 nt, Artificial Sequence
  Description of Artificial Sequence: Synthetic oligonucleotide
  Antisense strand to SEQ ID NO: 907176
aaauucacucguagcugcu

SEQ ID NO: 907178 - RNA, 19 nt, Artificial Sequence
  Description of Artificial Sequence: Synthetic oligonucleotide
  Sense strand starting at position 3507 of SEQ ID NO: 589041
augggauggugcuaacuga

SEQ ID NO: 907179 - RNA, 19 nt, Artificial Sequence
  Description of Artificial Sequence: Synthetic oligonucleotide
  Antisense strand to SEQ ID NO: 907178
ucaguuagcaccaucccau

SEQ ID NO: 907180 - RNA, 19 nt, Artificial Sequence
  Description of Artificial Sequence: Synthetic oligonucleotide
  Sense strand starting at position 3541 of SEQ ID NO: 589041
ucccucugggccugauaaa

SEQ ID NO: 907181 - RNA, 19 nt, Artificial Sequence
  Description of Artificial Sequence: Synthetic oligonucleotide
  Antisense strand to SEQ ID NO: 907180
uuuaucaggcccagaggga

SEQ ID NO: 907182 - RNA, 19 nt, Artificial Sequence
  Description of Artificial Sequence: Synthetic oligonucleotide
  Sense strand starting at position 3622 of SEQ ID NO: 589041
auagcuuaaggccgagaau

SEQ ID NO: 907183 - RNA, 19 nt, Artificial Sequence
  Description of Artificial Sequence: Synthetic oligonucleotide
  Antisense strand to SEQ ID NO: 907182
auucucggccuuaagcuau

SEQ ID NO: 907184 - RNA, 19 nt, Artificial Sequence
  Description of Artificial Sequence: Synthetic oligonucleotide
  Sense strand starting at position 3623 of SEQ ID NO: 589041
uagcuuaaggccgagaauu

SEQ ID NO: 907185 - RNA, 19 nt, Artificial Sequence
  Description of Artificial Sequence: Synthetic oligonucleotide
  Antisense strand to SEQ ID NO: 907184
aauucucggccuuaagcua

SEQ ID NO: 907186 - RNA, 19 nt, Artificial Sequence
  Description of Artificial Sequence: Synthetic oligonucleotide
  Sense strand starting at position 3631 of SEQ ID NO: 589041
ggccgagaauucgaaacca

SEQ ID NO: 907187 - RNA, 19 nt, Artificial Sequence
  Description of Artificial Sequence: Synthetic oligonucleotide
  Antisense strand to SEQ ID NO: 907186
ugguuucgaauucucggcc

SEQ ID NO: 907188 - RNA, 19 nt, Artificial Sequence
  Description of Artificial Sequence: Synthetic oligonucleotide
  Sense strand starting at position 116 of SEQ ID NO: 589042
acguuugucaguuugccau

SEQ ID NO: 907189 - RNA, 19 nt, Artificial Sequence
  Description of Artificial Sequence: Synthetic oligonucleotide
  Antisense strand to SEQ ID NO: 907188
auggcaaacugacaaacgu

SEQ ID NO: 907190 - RNA, 19 nt, Artificial Sequence
  Description of Artificial Sequence: Synthetic oligonucleotide
  Sense strand starting at position 119 of SEQ ID NO: 589042
uuugucaguuugccauuua

SEQ ID NO: 907191 - RNA, 19 nt, Artificial Sequence
  Description of Artificial Sequence: Synthetic oligonucleotide
  Antisense strand to SEQ ID NO: 907190
uaaauggcaaacugacaaa

SEQ ID NO: 907192 - RNA, 19 nt, Artificial Sequence
  Description of Artificial Sequence: Synthetic oligonucleotide
  Sense strand starting at position 120 of SEQ ID NO: 589042
uugucaguuugccauuuaa

SEQ ID NO: 907193 - RNA, 19 nt, Artificial Sequence
  Description of Artificial Sequence: Synthetic oligonucleotide
  Antisense strand to SEQ ID NO: 907192
uuaaauggcaaacugacaa

SEQ ID NO: 907194 - RNA, 19 nt, Artificial Sequence
  Description of Artificial Sequence: Synthetic oligonucleotide
  Sense strand starting at position 135 of SEQ ID NO: 589042
uuaagaaucucccaaguug

SEQ ID NO: 907195 - RNA, 19 nt, Artificial Sequence
  Description of Artificial Sequence: Synthetic oligonucleotide
  Antisense strand to SEQ ID NO: 907194
caacuugggagauucuuaa

SEQ ID NO: 907196 - RNA, 19 nt, Artificial Sequence
  Description of Artificial Sequence: Synthetic oligonucleotide
  Sense strand starting at position 479 of SEQ ID NO: 589042
agauguuccuucuugauga

SEQ ID NO: 907197 - RNA, 19 nt, Artificial Sequence
  Description of Artificial Sequence: Synthetic oligonucleotide
  Antisense strand to SEQ ID NO: 907196
ucaucaagaaggaacaucu

SEQ ID NO: 907198 - RNA, 19 nt, Artificial Sequence
  Description of Artificial Sequence: Synthetic oligonucleotide
  Sense strand starting at position 481 of SEQ ID NO: 589042
auguuccuucuugaugaca

SEQ ID NO: 907199 - RNA, 19 nt, Artificial Sequence
  Description of Artificial Sequence: Synthetic oligonucleotide
  Antisense strand to SEQ ID NO: 907198
ugucaucaagaaggaacau

SEQ ID NO: 907200 - RNA, 19 nt, Artificial Sequence
  Description of Artificial Sequence: Synthetic oligonucleotide
  Sense strand starting at position 561 of SEQ ID NO: 589042
auuggaaugugaugaauac

SEQ ID NO: 907201 - RNA, 19 nt, Artificial Sequence
  Description of Artificial Sequence: Synthetic oligonucleotide
  Antisense strand to SEQ ID NO: 907200
guauucaucacauuccaau

SEQ ID NO: 907202 - RNA, 19 nt, Artificial Sequence
  Description of Artificial Sequence: Synthetic oligonucleotide
  Sense strand starting at position 612 of SEQ ID NO: 589042
uuaguaagcugcccugaca

SEQ ID NO: 907203 - RNA, 19 nt, Artificial Sequence
  Description of Artificial Sequence: Synthetic oligonucleotide
  Antisense strand to SEQ ID NO: 907202
ugucagggcagcuuacuaa

SEQ ID NO: 907204 - RNA, 19 nt, Artificial Sequence
  Description of Artificial Sequence: Synthetic oligonucleotide
  Sense strand starting at position 704 of SEQ ID NO: 589042
caaaucugauugggaugga

SEQ ID NO: 907205 - RNA, 19 nt, Artificial Sequence
  Description of Artificial Sequence: Synthetic oligonucleotide
  Antisense strand to SEQ ID NO: 907204
uccaucccaaucagauuug

SEQ ID NO: 907206 - RNA, 19 nt, Artificial Sequence
  Description of Artificial Sequence: Synthetic oligonucleotide
  Sense strand starting at position 720 of SEQ ID NO: 589042
ggagaauccaaauguguaa

SEQ ID NO: 907207 - RNA, 19 nt, Artificial Sequence
  Description of Artificial Sequence: Synthetic oligonucleotide
  Antisense strand to SEQ ID NO: 907206
uuacacauuuggauucucc

SEQ ID NO: 907208 - RNA, 19 nt, Artificial Sequence
  Description of Artificial Sequence: Synthetic oligonucleotide
  Sense strand starting at position 987 of SEQ ID NO: 589042
ugcucagauucuccugaaa

SEQ ID NO: 907209 - RNA, 19 nt, Artificial Sequence
  Description of Artificial Sequence: Synthetic oligonucleotide
  Antisense strand to SEQ ID NO: 907208
uuucaggagaaucugagca

SEQ ID NO: 907210 - RNA, 19 nt, Artificial Sequence
  Description of Artificial Sequence: Synthetic oligonucleotide
  Sense strand starting at position 990 of SEQ ID NO: 589042
ucagauucuccugaaagca

SEQ ID NO: 907211 - RNA, 19 nt, Artificial Sequence
  Description of Artificial Sequence: Synthetic oligonucleotide
  Antisense strand to SEQ ID NO: 907210
ugcuuucaggagaaucuga

SEQ ID NO: 907212 - RNA, 19 nt, Artificial Sequence
  Description of Artificial Sequence: Synthetic oligonucleotide
  Sense strand starting at position 1006 of SEQ ID NO: 589042
gcauaacgcuuuccuaagu

SEQ ID NO: 907213 - RNA, 19 nt, Artificial Sequence
  Description of Artificial Sequence: Synthetic oligonucleotide
  Antisense strand to SEQ ID NO: 907212
acuuaggaaagcguuaugc

SEQ ID NO: 907214 - RNA, 19 nt, Artificial Sequence
  Description of Artificial Sequence: Synthetic oligonucleotide
  Sense strand starting at position 1011 of SEQ ID NO: 589042
acgcuuuccuaaguauaca

SEQ ID NO: 907215 - RNA, 19 nt, Artificial Sequence
  Description of Artificial Sequence: Synthetic oligonucleotide
  Antisense strand to SEQ ID NO: 907214
uguauacuuaggaaagcgu

SEQ ID NO: 907216 - RNA, 19 nt, Artificial Sequence
  Description of Artificial Sequence: Synthetic oligonucleotide
  Sense strand starting at position 1245 of SEQ ID NO: 589042
acuaaugcagcccguaauu

SEQ ID NO: 907217 - RNA, 19 nt, Artificial Sequence
  Description of Artificial Sequence: Synthetic oligonucleotide
  Antisense strand to SEQ ID NO: 907216
aauuacgggcugcauuagu

SEQ ID NO: 907218 - RNA, 19 nt, Artificial Sequence
  Description of Artificial Sequence: Synthetic oligonucleotide
  Sense strand starting at position 2264 of SEQ ID NO: 589042
ggcugcaucuauuauuuga

SEQ ID NO: 907219 - RNA, 19 nt, Artificial Sequence
  Description of Artificial Sequence: Synthetic oligonucleotide
  Antisense strand to SEQ ID NO: 907218
ucaaauaauagaugcagcc

SEQ ID NO: 907220 - RNA, 19 nt, Artificial Sequence
  Description of Artificial Sequence: Synthetic oligonucleotide
  Sense strand starting at position 2281 of SEQ ID NO: 589042
gaaugacucguacgaagga

SEQ ID NO: 907221 - RNA, 19 nt, Artificial Sequence
  Description of Artificial Sequence: Synthetic oligonucleotide
  Antisense strand to SEQ ID NO: 907220
uccuucguacgagucauuc

SEQ ID NO: 907222 - RNA, 19 nt, Artificial Sequence
  Description of Artificial Sequence: Synthetic oligonucleotide
  Sense strand starting at position 2290 of SEQ ID NO: 589042
guacgaaggagaugcuauu

SEQ ID NO: 907223 - RNA, 19 nt, Artificial Sequence
  Description of Artificial Sequence: Synthetic oligonucleotide
  Antisense strand to SEQ ID NO: 907222
aauagcaucuccuucguac

SEQ ID NO: 907224 - RNA, 19 nt, Artificial Sequence
  Description of Artificial Sequence: Synthetic oligonucleotide
  Sense strand starting at position 2300 of SEQ ID NO: 589042
gaugcuauuuaccgggcaa

SEQ ID NO: 907225 - RNA, 19 nt, Artificial Sequence
  Description of Artificial Sequence: Synthetic oligonucleotide
  Antisense strand to SEQ ID NO: 907224
uugcccgguaaauagcauc

SEQ ID NO: 907226 - RNA, 19 nt, Artificial Sequence
  Description of Artificial Sequence: Synthetic oligonucleotide
  Sense strand starting at position 2301 of SEQ ID NO: 589042
augcuauuuaccgggcaaa

SEQ ID NO: 907227 - RNA, 19 nt, Artificial Sequence
  Description of Artificial Sequence: Synthetic oligonucleotide
  Antisense strand to SEQ ID NO: 907226
uuugcccgguaaauagcau

SEQ ID NO: 907228 - RNA, 19 nt, Artificial Sequence
  Description of Artificial Sequence: Synthetic oligonucleotide
  Sense strand starting at position 2522 of SEQ ID NO: 589042
gcgggaaacgcguacuuga

SEQ ID NO: 907229 - RNA, 19 nt, Artificial Sequence
  Description of Artificial Sequence: Synthetic oligonucleotide
  Antisense strand to SEQ ID NO: 907228
ucaaguacgcguuucccgc

SEQ ID NO: 907230 - RNA, 19 nt, Artificial Sequence
  Description of Artificial Sequence: Synthetic oligonucleotide
  Sense strand starting at position 2628 of SEQ ID NO: 589042
gccuccaacucucuggaau

SEQ ID NO: 907231 - RNA, 19 nt, Artificial Sequence
  Description of Artificial Sequence: Synthetic oligonucleotide
  Antisense strand to SEQ ID NO: 907230
auuccagagaguuggaggc

SEQ ID NO: 907232 - RNA, 19 nt, Artificial Sequence
  Description of Artificial Sequence: Synthetic oligonucleotide
  Sense strand starting at position 2639 of SEQ ID NO: 589042
ucuggaauucuaggcaaca

SEQ ID NO: 907233 - RNA, 19 nt, Artificial Sequence
  Description of Artificial Sequence: Synthetic oligonucleotide
  Antisense strand to SEQ ID NO: 907232
uguugccuagaauuccaga

SEQ ID NO: 907234 - RNA, 19 nt, Artificial Sequence
  Description of Artificial Sequence: Synthetic oligonucleotide
  Sense strand starting at position 2657 of SEQ ID NO: 589042
agauuaacacuuugugaau

SEQ ID NO: 907235 - RNA, 19 nt, Artificial Sequence
  Description of Artificial Sequence: Synthetic oligonucleotide
  Antisense strand to SEQ ID NO: 907234
auucacaaaguguuaaucu

SEQ ID NO: 907236 - RNA, 19 nt, Artificial Sequence
  Description of Artificial Sequence: Synthetic oligonucleotide
  Sense strand starting at position 2694 of SEQ ID NO: 589042
ugcuaaauauuggaguuaa

SEQ ID NO: 907237 - RNA, 19 nt, Artificial Sequence
  Description of Artificial Sequence: Synthetic oligonucleotide
  Antisense strand to SEQ ID NO: 907236
uuaacuccaauauuuagca

SEQ ID NO: 907238 - RNA, 19 nt, Artificial Sequence
  Description of Artificial Sequence: Synthetic oligonucleotide
  Sense strand starting at position 2705 of SEQ ID NO: 589042
ggaguuaaugcugauccuu

SEQ ID NO: 907239 - RNA, 19 nt, Artificial Sequence
  Description of Artificial Sequence: Synthetic oligonucleotide
  Antisense strand to SEQ ID NO: 907238
aaggaucagcauuaacucc

SEQ ID NO: 907240 - RNA, 19 nt, Artificial Sequence
  Description of Artificial Sequence: Synthetic oligonucleotide
  Sense strand starting at position 2722 of SEQ ID NO: 589042
uuuggaagucucugaaggu

SEQ ID NO: 907241 - RNA, 19 nt, Artificial Sequence
  Description of Artificial Sequence: Synthetic oligonucleotide
  Antisense strand to SEQ ID NO: 907240
accuucagagacuuccaaa

SEQ ID NO: 907242 - RNA, 19 nt, Artificial Sequence
  Description of Artificial Sequence: Synthetic oligonucleotide
  Sense strand starting at position 2723 of SEQ ID NO: 589042
uuggaagucucugaagguu

SEQ ID NO: 907243 - RNA, 19 nt, Artificial Sequence
  Description of Artificial Sequence: Synthetic oligonucleotide
  Antisense strand to SEQ ID NO: 907242
aaccuucagagacuuccaa

SEQ ID NO: 907244 - RNA, 19 nt, Artificial Sequence
  Description of Artificial Sequence: Synthetic oligonucleotide
  Sense strand starting at position 2729 of SEQ ID NO: 589042
gucucugaagguugcaaga

SEQ ID NO: 907245 - RNA, 19 nt, Artificial Sequence
  Description of Artificial Sequence: Synthetic oligonucleotide
  Antisense strand to SEQ ID NO: 907244
ucuugcaaccuucagagac

SEQ ID NO: 907246 - RNA, 19 nt, Artificial Sequence
  Description of Artificial Sequence: Synthetic oligonucleotide
  Sense strand starting at position 2864 of SEQ ID NO: 589042
guuaauauaaguggagaau

SEQ ID NO: 907247 - RNA, 19 nt, Artificial Sequence
  Description of Artificial Sequence: Synthetic oligonucleotide
  Antisense strand to SEQ ID NO: 907246
auucuccacuuauauuaac

SEQ ID NO: 907248 - RNA, 19 nt, Artificial Sequence
  Description of Artificial Sequence: Synthetic oligonucleotide
  Sense strand starting at position 2926 of SEQ ID NO: 589042
ucaaguugcccuuaauaug

SEQ ID NO: 907249 - RNA, 19 nt, Artificial Sequence
  Description of Artificial Sequence: Synthetic oligonucleotide
  Antisense strand to SEQ ID NO: 907248
cauauuaagggcaacuuga

SEQ ID NO: 907250 - RNA, 19 nt, Artificial Sequence
  Description of Artificial Sequence: Synthetic oligonucleotide
  Sense strand starting at position 2936 of SEQ ID NO: 589042
cuuaauaugugauccgaua

SEQ ID NO: 907251 - RNA, 19 nt, Artificial Sequence
  Description of Artificial Sequence: Synthetic oligonucleotide
  Antisense strand to SEQ ID NO: 907250
uaucggaucacauauuaag

SEQ ID NO: 907252 - RNA, 19 nt, Artificial Sequence
  Description of Artificial Sequence: Synthetic oligonucleotide
  Sense strand starting at position 2967 of SEQ ID NO: 589042
aacugaguucuuugucuug

SEQ ID NO: 907253 - RNA, 19 nt, Artificial Sequence
  Description of Artificial Sequence: Synthetic oligonucleotide
  Antisense strand to SEQ ID NO: 907252
caagacaaagaacucaguu

SEQ ID NO: 907254 - RNA, 19 nt, Artificial Sequence
  Description of Artificial Sequence: Synthetic oligonucleotide
  Sense strand starting at position 2970 of SEQ ID NO: 589042
ugaguucuuugucuuguga

SEQ ID NO: 907255 - RNA, 19 nt, Artificial Sequence
  Description of Artificial Sequence: Synthetic oligonucleotide
  Antisense strand to SEQ ID NO: 907254
ucacaagacaaagaacuca

SEQ ID NO: 907256 - RNA, 19 nt, Artificial Sequence
  Description of Artificial Sequence: Synthetic oligonucleotide
  Sense strand starting at position 2984 of SEQ ID NO: 589042
ugugaagcuccaggcuuaa

SEQ ID NO: 907257 - RNA, 19 nt, Artificial Sequence
  Description of Artificial Sequence: Synthetic oligonucleotide
  Antisense strand to SEQ ID NO: 907256
uuaagccuggagcuucaca

SEQ ID NO: 907258 - RNA, 19 nt, Artificial Sequence
  Description of Artificial Sequence: Synthetic oligonucleotide
  Sense strand starting at position 3073 of SEQ ID NO: 589042
agcagcuacgagugaauuu

SEQ ID NO: 907259 - RNA, 19 nt, Artificial Sequence
  Description of Artificial Sequence: Synthetic oligonucleotide
  Antisense strand to SEQ ID NO: 907258
aaauucacucguagcugcu

SEQ ID NO: 907260 - RNA, 19 nt, Artificial Sequence
  Description of Artificial Sequence: Synthetic oligonucleotide
  Sense strand starting at position 3633 of SEQ ID NO: 589042
augggauggugcuaacuga

SEQ ID NO: 907261 - RNA, 19 nt, Artificial Sequence
  Description of Artificial Sequence: Synthetic oligonucleotide
  Antisense strand to SEQ ID NO: 907260
ucaguuagcaccaucccau

SEQ ID NO: 907262 - RNA, 19 nt, Artificial Sequence
  Description of Artificial Sequence: Synthetic oligonucleotide
  Sense strand starting at position 3667 of SEQ ID NO: 589042
ucccucugggccugauaaa

SEQ ID NO: 907263 - RNA, 19 nt, Artificial Sequence
  Description of Artificial Sequence: Synthetic oligonucleotide
  Antisense strand to SEQ ID NO: 907262
uuuaucaggcccagaggga

SEQ ID NO: 907264 - RNA, 19 nt, Artificial Sequence
  Description of Artificial Sequence: Synthetic oligonucleotide
  Sense strand starting at position 3748 of SEQ ID NO: 589042
auagcuuaaggccgagaau

SEQ ID NO: 907265 - RNA, 19 nt, Artificial Sequence
  Description of Artificial Sequence: Synthetic oligonucleotide
  Antisense strand to SEQ ID NO: 907264
auucucggccuuaagcuau

SEQ ID NO: 907266 - RNA, 19 nt, Artificial Sequence
  Description of Artificial Sequence: Synthetic oligonucleotide
  Sense strand starting at position 3749 of SEQ ID NO: 589042
uagcuuaaggccgagaauu

SEQ ID NO: 907267 - RNA, 19 nt, Artificial Sequence
  Description of Artificial Sequence: Synthetic oligonucleotide
  Antisense strand to SEQ ID NO: 907266
aauucucggccuuaagcua

SEQ ID NO: 907268 - RNA, 19 nt, Artificial Sequence
  Description of Artificial Sequence: Synthetic oligonucleotide
  Sense strand starting at position 60 of SEQ ID NO: 589043
ggacccaucccaugcagaa

SEQ ID NO: 907269 - RNA, 19 nt, Artificial Sequence
  Description of Artificial Sequence: Synthetic oligonucleotide
  Antisense strand to SEQ ID NO: 907268
uucugcaugggaugggucc

SEQ ID NO: 907270 - RNA, 19 nt, Artificial Sequence
  Description of Artificial Sequence: Synthetic oligonucleotide
  Sense strand starting at position 275 of SEQ ID NO: 589043
gucccuguuggugagagua

SEQ ID NO: 907271 - RNA, 19 nt, Artificial Sequence
  Description of Artificial Sequence: Synthetic oligonucleotide
  Antisense strand to SEQ ID NO: 907270
uacucucaccaacagggac

SEQ ID NO: 907272 - RNA, 19 nt, Artificial Sequence
  Description of Artificial Sequence: Synthetic oligonucleotide
  Sense strand starting at position 530 of SEQ ID NO: 589043
guguuccuggcugagcaaa

SEQ ID NO: 907273 - RNA, 19 nt, Artificial Sequence
  Description of Artificial Sequence: Synthetic oligonucleotide
  Antisense strand to SEQ ID NO: 907272
uuugcucagccaggaacac

SEQ ID NO: 907274 - RNA, 19 nt, Artificial Sequence
  Description of Artificial Sequence: Synthetic oligonucleotide
  Sense strand starting at position 553 of SEQ ID NO: 589043
uggagauguugguuccaug

SEQ ID NO: 907275 - RNA, 19 nt, Artificial Sequence
  Description of Artificial Sequence: Synthetic oligonucleotide
  Antisense strand to SEQ ID NO: 907274
cauggaaccaacaucucca

SEQ ID NO: 907276 - RNA, 19 nt, Artificial Sequence
  Description of Artificial Sequence: Synthetic oligonucleotide
  Sense strand starting at position 636 of SEQ ID NO: 589043
agguuauagagccagaucu

SEQ ID NO: 907277 - RNA, 19 nt, Artificial Sequence
  Description of Artificial Sequence: Synthetic oligonucleotide
  Antisense strand to SEQ ID NO: 907276
agaucuggcucuauaaccu

SEQ ID NO: 907278 - RNA, 19 nt, Artificial Sequence
  Description of Artificial Sequence: Synthetic oligonucleotide
  Sense strand starting at position 638 of SEQ ID NO: 589043
guuauagagccagaucugu

SEQ ID NO: 907279 - RNA, 19 nt, Artificial Sequence
  Description of Artificial Sequence: Synthetic oligonucleotide
  Antisense strand to SEQ ID NO: 907278
acagaucuggcucuauaac

SEQ ID NO: 907280 - RNA, 19 nt, Artificial Sequence
  Description of Artificial Sequence: Synthetic oligonucleotide
  Sense strand starting at position 726 of SEQ ID NO: 589043
agaagagagucgcuacaaa

SEQ ID NO: 907281 - RNA, 19 nt, Artificial Sequence
  Description of Artificial Sequence: Synthetic oligonucleotide
  Antisense strand to SEQ ID NO: 907280
uuuguagcgacucucuucu

SEQ ID NO: 907282 - RNA, 19 nt, Artificial Sequence
  Description of Artificial Sequence: Synthetic oligonucleotide
  Sense strand starting at position 850 of SEQ ID NO: 589043
uggcucugcaauggugaga

SEQ ID NO: 907283 - RNA, 19 nt, Artificial Sequence
  Description of Artificial Sequence: Synthetic oligonucleotide
  Antisense strand to SEQ ID NO: 907282
ucucaccauugcagagcca

SEQ ID NO: 907284 - RNA, 19 nt, Artificial Sequence
  Description of Artificial Sequence: Synthetic oligonucleotide
  Sense strand starting at position 867 of SEQ ID NO: 589043
gagacugguuaggucugaa

SEQ ID NO: 907285 - RNA, 19 nt, Artificial Sequence
  Description of Artificial Sequence: Synthetic oligonucleotide
  Antisense strand to SEQ ID NO: 907284
uucagaccuaaccagucuc

SEQ ID NO: 907286 - RNA, 19 nt, Artificial Sequence
  Description of Artificial Sequence: Synthetic oligonucleotide
  Sense strand starting at position 870 of SEQ ID NO: 589043
acugguuaggucugaaaug

SEQ ID NO: 907287 - RNA, 19 nt, Artificial Sequence
  Description of Artificial Sequence: Synthetic oligonucleotide
  Antisense strand to SEQ ID NO: 907286
cauuucagaccuaaccagu

SEQ ID NO: 907288 - RNA, 19 nt, Artificial Sequence
  Description of Artificial Sequence: Synthetic oligonucleotide
  Sense strand starting at position 879 of SEQ ID NO: 589043
gucugaaaugccugagaga

SEQ ID NO: 907289 - RNA, 19 nt, Artificial Sequence
  Description of Artificial Sequence: Synthetic oligonucleotide
  Antisense strand to SEQ ID NO: 907288
ucucucaggcauuucagac

SEQ ID NO: 907290 - RNA, 19 nt, Artificial Sequence
  Description of Artificial Sequence: Synthetic oligonucleotide
  Sense strand starting at position 1055 of SEQ ID NO: 589043
agacaaauccugugucccu

SEQ ID NO: 907291 - RNA, 19 nt, Artificial Sequence
  Description of Artificial Sequence: Synthetic oligonucleotide
  Antisense strand to SEQ ID NO: 907290
agggacacaggauuugucu

SEQ ID NO: 907292 - RNA, 19 nt, Artificial Sequence
  Description of Artificial Sequence: Synthetic oligonucleotide
  Sense strand starting at position 1130 of SEQ ID NO: 589043
cggagaccugagcaaguuu

SEQ ID NO: 907293 - RNA, 19 nt, Artificial Sequence
  Description of Artificial Sequence: Synthetic oligonucleotide
  Antisense strand to SEQ ID NO: 907292
aaacuugcucaggucuccg

SEQ ID NO: 907294 - RNA, 19 nt, Artificial Sequence
  Description of Artificial Sequence: Synthetic oligonucleotide
  Sense strand starting at position 1176 of SEQ ID NO: 589043
gaggucugucuugggagga

SEQ ID NO: 907295 - RNA, 19 nt, Artificial Sequence
  Description of Artificial Sequence: Synthetic oligonucleotide
  Antisense strand to SEQ ID NO: 907294
uccucccaagacagaccuc

SEQ ID NO: 907296 - RNA, 19 nt, Artificial Sequence
  Description of Artificial Sequence: Synthetic oligonucleotide
  Sense strand starting at position 1350 of SEQ ID NO: 589043
gugggugaaucugugggaa

SEQ ID NO: 907297 - RNA, 19 nt, Artificial Sequence
  Description of Artificial Sequence: Synthetic oligonucleotide
  Antisense strand to SEQ ID NO: 907296
uucccacagauucacccac

SEQ ID NO: 907298 - RNA, 19 nt, Artificial Sequence
  Description of Artificial Sequence: Synthetic oligonucleotide
  Sense strand starting at position 1353 of SEQ ID NO: 589043
ggugaaucugugggaagau

SEQ ID NO: 907299 - RNA, 19 nt, Artificial Sequence
  Description of Artificial Sequence: Synthetic oligonucleotide
  Antisense strand to SEQ ID NO: 907298
aucuucccacagauucacc

SEQ ID NO: 907300 - RNA, 19 nt, Artificial Sequence
  Description of Artificial Sequence: Synthetic oligonucleotide
  Sense strand starting at position 1501 of SEQ ID NO: 589043
cuccuaaucguauggauag

SEQ ID NO: 907301 - RNA, 19 nt, Artificial Sequence
  Description of Artificial Sequence: Synthetic oligonucleotide
  Antisense strand to SEQ ID NO: 907300
cuauccauacgauuaggag

SEQ ID NO: 907302 - RNA, 19 nt, Artificial Sequence
  Description of Artificial Sequence: Synthetic oligonucleotide
  Sense strand starting at position 1507 of SEQ ID NO: 589043
aucguauggauaggaagau

SEQ ID NO: 907303 - RNA, 19 nt, Artificial Sequence
  Description of Artificial Sequence: Synthetic oligonucleotide
  Antisense strand to SEQ ID NO: 907302
aucuuccuauccauacgau

SEQ ID NO: 907304 - RNA, 19 nt, Artificial Sequence
  Description of Artificial Sequence: Synthetic oligonucleotide
  Sense strand starting at position 1631 of SEQ ID NO: 589043
cagggcauuuggcaaugau

SEQ ID NO: 907305 - RNA, 19 nt, Artificial Sequence
  Description of Artificial Sequence: Synthetic oligonucleotide
  Antisense strand to SEQ ID NO: 907304
aucauugccaaaugcccug

SEQ ID NO: 907306 - RNA, 19 nt, Artificial Sequence
  Description of Artificial Sequence: Synthetic oligonucleotide
  Sense strand starting at position 1650 of SEQ ID NO: 589043
caggaagaugcugggauua

SEQ ID NO: 907307 - RNA, 19 nt, Artificial Sequence
  Description of Artificial Sequence: Synthetic oligonucleotide
  Antisense strand to SEQ ID NO: 907306
uaaucccagcaucuuccug

SEQ ID NO: 907308 - RNA, 19 nt, Artificial Sequence
  Description of Artificial Sequence: Synthetic oligonucleotide
  Sense strand starting at position 1704 of SEQ ID NO: 589043
uggcucuuggaaugauaga

SEQ ID NO: 907309 - RNA, 19 nt, Artificial Sequence
  Description of Artificial Sequence: Synthetic oligonucleotide
  Antisense strand to SEQ ID NO: 907308
ucuaucauuccaagagcca

SEQ ID NO: 907310 - RNA, 19 nt, Artificial Sequence
  Description of Artificial Sequence: Synthetic oligonucleotide
  Sense strand starting at position 2178 of SEQ ID NO: 589043
gcugguaacucccucaacu

SEQ ID NO: 907311 - RNA, 19 nt, Artificial Sequence
  Description of Artificial Sequence: Synthetic oligonucleotide
  Antisense strand to SEQ ID NO: 907310
aguugagggaguuaccagc

SEQ ID NO: 907312 - RNA, 19 nt, Artificial Sequence
  Description of Artificial Sequence: Synthetic oligonucleotide
  Sense strand starting at position 2525 of SEQ ID NO: 589043
gacuaugggugauccaacu

SEQ ID NO: 907313 - RNA, 19 nt, Artificial Sequence
  Description of Artificial Sequence: Synthetic oligonucleotide
  Antisense strand to SEQ ID NO: 907312
aguuggaucacccauaguc

SEQ ID NO: 907314 - RNA, 19 nt, Artificial Sequence
  Description of Artificial Sequence: Synthetic oligonucleotide
  Sense strand starting at position 2899 of SEQ ID NO: 589043
ccaggauacuccucugaca

SEQ ID NO: 907315 - RNA, 19 nt, Artificial Sequence
  Description of Artificial Sequence: Synthetic oligonucleotide
  Antisense strand to SEQ ID NO: 907314
ugucagaggaguauccugg

SEQ ID NO: 907316 - RNA, 19 nt, Artificial Sequence
  Description of Artificial Sequence: Synthetic oligonucleotide
  Sense strand starting at position 2901 of SEQ ID NO: 589043
aggauacuccucugacauc

SEQ ID NO: 907317 - RNA, 19 nt, Artificial Sequence
  Description of Artificial Sequence: Synthetic oligonucleotide
  Antisense strand to SEQ ID NO: 907316
gaugucagaggaguauccu

SEQ ID NO: 907318 - RNA, 19 nt, Artificial Sequence
  Description of Artificial Sequence: Synthetic oligonucleotide
  Sense strand starting at position 2966 of SEQ ID NO: 589043
cuucccaucccaugugauu

SEQ ID NO: 907319 - RNA, 19 nt, Artificial Sequence
  Description of Artificial Sequence: Synthetic oligonucleotide
  Antisense strand to SEQ ID NO: 907318
aaucacaugggaugggaag

SEQ ID NO: 907320 - RNA, 19 nt, Artificial Sequence
  Description of Artificial Sequence: Synthetic oligonucleotide
  Sense strand starting at position 3056 of SEQ ID NO: 589043
acaggccuuccaugagauu

SEQ ID NO: 907321 - RNA, 19 nt, Artificial Sequence
  Description of Artificial Sequence: Synthetic oligonucleotide
  Antisense strand to SEQ ID NO: 907320
aaucucauggaaggccugu

SEQ ID NO: 907322 - RNA, 19 nt, Artificial Sequence
  Description of Artificial Sequence: Synthetic oligonucleotide
  Sense strand starting at position 3057 of SEQ ID NO: 589043
caggccuuccaugagauua

SEQ ID NO: 907323 - RNA, 19 nt, Artificial Sequence
  Description of Artificial Sequence: Synthetic oligonucleotide
  Antisense strand to SEQ ID NO: 907322
uaaucucauggaaggccug

SEQ ID NO: 907324 - RNA, 19 nt, Artificial Sequence
  Description of Artificial Sequence: Synthetic oligonucleotide
  Sense strand starting at position 3068 of SEQ ID NO: 589043
ugagauuacugucuagaug

SEQ ID NO: 907325 - RNA, 19 nt, Artificial Sequence
  Description of Artificial Sequence: Synthetic oligonucleotide
  Antisense strand to SEQ ID NO: 907324
caucuagacaguaaucuca

SEQ ID NO: 907326 - RNA, 19 nt, Artificial Sequence
  Description of Artificial Sequence: Synthetic oligonucleotide
  Sense strand starting at position 3069 of SEQ ID NO: 589043
gagauuacugucuagaugc

SEQ ID NO: 907327 - RNA, 19 nt, Artificial Sequence
  Description of Artificial Sequence: Synthetic oligonucleotide
  Antisense strand to SEQ ID NO: 907326
gcaucuagacaguaaucuc

SEQ ID NO: 907328 - RNA, 19 nt, Artificial Sequence
  Description of Artificial Sequence: Synthetic oligonucleotide
  Sense strand starting at position 3182 of SEQ ID NO: 589043
cugucuguggcuggagaaa

SEQ ID NO: 907329 - RNA, 19 nt, Artificial Sequence
  Description of Artificial Sequence: Synthetic oligonucleotide
  Antisense strand to SEQ ID NO: 907328
uuucuccagccacagacag

SEQ ID NO: 907330 - RNA, 19 nt, Artificial Sequence
  Description of Artificial Sequence: Synthetic oligonucleotide
  Sense strand starting at position 3336 of SEQ ID NO: 589043
gguugcaagagucaaugaa

SEQ ID NO: 907331 - RNA, 19 nt, Artificial Sequence
  Description of Artificial Sequence: Synthetic oligonucleotide
  Antisense strand to SEQ ID NO: 907330
uucauugacucuugcaacc

SEQ ID NO: 907332 - RNA, 19 nt, Artificial Sequence
  Description of Artificial Sequence: Synthetic oligonucleotide
  Sense strand starting at position 3677 of SEQ ID NO: 589043
uuugacuagccugaguaga

SEQ ID NO: 907333 - RNA, 19 nt, Artificial Sequence
  Description of Artificial Sequence: Synthetic oligonucleotide
  Antisense strand to SEQ ID NO: 907332
ucuacucaggcuagucaaa

SEQ ID NO: 907334 - RNA, 19 nt, Artificial Sequence
  Description of Artificial Sequence: Synthetic oligonucleotide
  Sense strand starting at position 3679 of SEQ ID NO: 589043
ugacuagccugaguagaug

SEQ ID NO: 907335 - RNA, 19 nt, Artificial Sequence
  Description of Artificial Sequence: Synthetic oligonucleotide
  Antisense strand to SEQ ID NO: 907334
caucuacucaggcuaguca

SEQ ID NO: 907336 - RNA, 19 nt, Artificial Sequence
  Description of Artificial Sequence: Synthetic oligonucleotide
  Sense strand starting at position 3687 of SEQ ID NO: 589043
cugaguagauguuugaguu

SEQ ID NO: 907337 - RNA, 19 nt, Artificial Sequence
  Description of Artificial Sequence: Synthetic oligonucleotide
  Antisense strand to SEQ ID NO: 907336
aacucaaacaucuacucag

SEQ ID NO: 907338 - RNA, 19 nt, Artificial Sequence
  Description of Artificial Sequence: Synthetic oligonucleotide
  Sense strand starting at position 3688 of SEQ ID NO: 589043
ugaguagauguuugaguug

SEQ ID NO: 907339 - RNA, 19 nt, Artificial Sequence
  Description of Artificial Sequence: Synthetic oligonucleotide
  Antisense strand to SEQ ID NO: 907338
caacucaaacaucuacuca

SEQ ID NO: 907340 - RNA, 19 nt, Artificial Sequence
  Description of Artificial Sequence: Synthetic oligonucleotide
  Sense strand starting at position 3706 of SEQ ID NO: 589043
gggugucugucauuugcag

SEQ ID NO: 907341 - RNA, 19 nt, Artificial Sequence
  Description of Artificial Sequence: Synthetic oligonucleotide
  Antisense strand to SEQ ID NO: 907340
cugcaaaugacagacaccc

SEQ ID NO: 907342 - RNA, 19 nt, Artificial Sequence
  Description of Artificial Sequence: Synthetic oligonucleotide
  Sense strand starting at position 3934 of SEQ ID NO: 589043
aaacuucuguuugugcaga

SEQ ID NO: 907343 - RNA, 19 nt, Artificial Sequence
  Description of Artificial Sequence: Synthetic oligonucleotide
  Antisense strand to SEQ ID NO: 907342
ucugcacaaacagaaguuu

SEQ ID NO: 907344 - RNA, 19 nt, Artificial Sequence
  Description of Artificial Sequence: Synthetic oligonucleotide
  Sense strand starting at position 3939 of SEQ ID NO: 589043
ucuguuugugcagagguga

SEQ ID NO: 907345 - RNA, 19 nt, Artificial Sequence
  Description of Artificial Sequence: Synthetic oligonucleotide
  Antisense strand to SEQ ID NO: 907344
ucaccucugcacaaacaga

SEQ ID NO: 907346 - RNA, 19 nt, Artificial Sequence
  Description of Artificial Sequence: Synthetic oligonucleotide
  Sense strand starting at position 3947 of SEQ ID NO: 589043
ugcagaggugacugauguu

SEQ ID NO: 907347 - RNA, 19 nt, Artificial Sequence
  Description of Artificial Sequence: Synthetic oligonucleotide
  Antisense strand to SEQ ID NO: 907346
aacaucagucaccucugca

SEQ ID NO: 907348 - RNA, 19 nt, Artificial Sequence
  Description of Artificial Sequence: Synthetic oligonucleotide
  Sense strand starting at position 34 of SEQ ID NO: 589045
cugaaagggugucccauua

SEQ ID NO: 907349 - RNA, 19 nt, Artificial Sequence
  Description of Artificial Sequence: Synthetic oligonucleotide
  Antisense strand to SEQ ID NO: 907348
uaaugggacacccuuucag

SEQ ID NO: 907350 - RNA, 19 nt, Artificial Sequence
  Description of Artificial Sequence: Synthetic oligonucleotide
  Sense strand starting at position 115 of SEQ ID NO: 589045
cccacuguucucugacuuu

SEQ ID NO: 907351 - RNA, 19 nt, Artificial Sequence
  Description of Artificial Sequence: Synthetic oligonucleotide
  Antisense strand to SEQ ID NO: 907350
aaagucagagaacaguggg

SEQ ID NO: 907352 - RNA, 19 nt, Artificial Sequence
  Description of Artificial Sequence: Synthetic oligonucleotide
  Sense strand starting at position 538 of SEQ ID NO: 589045
ugcggaaugcucugccaca

SEQ ID NO: 907353 - RNA, 19 nt, Artificial Sequence
  Description of Artificial Sequence: Synthetic oligonucleotide
  Antisense strand to SEQ ID NO: 907352
uguggcagagcauuccgca

SEQ ID NO: 907354 - RNA, 19 nt, Artificial Sequence
  Description of Artificial Sequence: Synthetic oligonucleotide
  Sense strand starting at position 539 of SEQ ID NO: 589045
gcggaaugcucugccacaa

SEQ ID NO: 907355 - RNA, 19 nt, Artificial Sequence
  Description of Artificial Sequence: Synthetic oligonucleotide
  Antisense strand to SEQ ID NO: 907354
uuguggcagagcauuccgc

SEQ ID NO: 907356 - RNA, 19 nt, Artificial Sequence
  Description of Artificial Sequence: Synthetic oligonucleotide
  Sense strand starting at position 583 of SEQ ID NO: 589045
cuuaucucugcucaaaggu

SEQ ID NO: 907357 - RNA, 19 nt, Artificial Sequence
  Description of Artificial Sequence: Synthetic oligonucleotide
  Antisense strand to SEQ ID NO: 907356
accuuugagcagagauaag

SEQ ID NO: 907358 - RNA, 19 nt, Artificial Sequence
  Description of Artificial Sequence: Synthetic oligonucleotide
  Sense strand starting at position 592 of SEQ ID NO: 589045
gcucaaaggucaccuuacu

SEQ ID NO: 907359 - RNA, 19 nt, Artificial Sequence
  Description of Artificial Sequence: Synthetic oligonucleotide
  Antisense strand to SEQ ID NO: 907358
aguaaggugaccuuugagc

SEQ ID NO: 907360 - RNA, 19 nt, Artificial Sequence
  Description of Artificial Sequence: Synthetic oligonucleotide
  Sense strand starting at position 666 of SEQ ID NO: 589045
gguccuuccuucucuauuu

SEQ ID NO: 907361 - RNA, 19 nt, Artificial Sequence
  Description of Artificial Sequence: Synthetic oligonucleotide
  Antisense strand to SEQ ID NO: 907360
aaauagagaaggaaggacc

SEQ ID NO: 907362 - RNA, 19 nt, Artificial Sequence
  Description of Artificial Sequence: Synthetic oligonucleotide
  Sense strand starting at position 848 of SEQ ID NO: 589045
caguuugaagucugaagag

SEQ ID NO: 907363 - RNA, 19 nt, Artificial Sequence
  Description of Artificial Sequence: Synthetic oligonucleotide
  Antisense strand to SEQ ID NO: 907362
cucuucagacuucaaacug

SEQ ID NO: 907364 - RNA, 19 nt, Artificial Sequence
  Description of Artificial Sequence: Synthetic oligonucleotide
  Sense strand starting at position 863 of SEQ ID NO: 589045
agagaaacauucugugaaa

SEQ ID NO: 907365 - RNA, 19 nt, Artificial Sequence
  Description of Artificial Sequence: Synthetic oligonucleotide
  Antisense strand to SEQ ID NO: 907364
uuucacagaauguuucucu

SEQ ID NO: 907366 - RNA, 19 nt, Artificial Sequence
  Description of Artificial Sequence: Synthetic oligonucleotide
  Sense strand starting at position 866 of SEQ ID NO: 589045
gaaacauucugugaaagau

SEQ ID NO: 907367 - RNA, 19 nt, Artificial Sequence
  Description of Artificial Sequence: Synthetic oligonucleotide
  Antisense strand to SEQ ID NO: 907366
aucuuucacagaauguuuc

SEQ ID NO: 907368 - RNA, 19 nt, Artificial Sequence
  Description of Artificial Sequence: Synthetic oligonucleotide
  Sense strand starting at position 1127 of SEQ ID NO: 589045
cuggaaaucuugggcucuu

SEQ ID NO: 907369 - RNA, 19 nt, Artificial Sequence
  Description of Artificial Sequence: Synthetic oligonucleotide
  Antisense strand to SEQ ID NO: 907368
aagagcccaagauuuccag

SEQ ID NO: 907370 - RNA, 19 nt, Artificial Sequence
  Description of Artificial Sequence: Synthetic oligonucleotide
  Sense strand starting at position 1128 of SEQ ID NO: 589045
uggaaaucuugggcucuuu

SEQ ID NO: 907371 - RNA, 19 nt, Artificial Sequence
  Description of Artificial Sequence: Synthetic oligonucleotide
  Antisense strand to SEQ ID NO: 907370
aaagagcccaagauuucca

SEQ ID NO: 907372 - RNA, 19 nt, Artificial Sequence
  Description of Artificial Sequence: Synthetic oligonucleotide
  Sense strand starting at position 1136 of SEQ ID NO: 589045
uugggcucuuucggucaaa

SEQ ID NO: 907373 - RNA, 19 nt, Artificial Sequence
  Description of Artificial Sequence: Synthetic oligonucleotide
  Antisense strand to SEQ ID NO: 907372
uuugaccgaaagagcccaa

SEQ ID NO: 907374 - RNA, 19 nt, Artificial Sequence
  Description of Artificial Sequence: Synthetic oligonucleotide
  Sense strand starting at position 1139 of SEQ ID NO: 589045
ggcucuuucggucaaagag

SEQ ID NO: 907375 - RNA, 19 nt, Artificial Sequence
  Description of Artificial Sequence: Synthetic oligonucleotide
  Antisense strand to SEQ ID NO: 907374
cucuuugaccgaaagagcc

SEQ ID NO: 907376 - RNA, 19 nt, Artificial Sequence
  Description of Artificial Sequence: Synthetic oligonucleotide
  Sense strand starting at position 1271 of SEQ ID NO: 589045
uucccuauacuuuguguca

SEQ ID NO: 907377 - RNA, 19 nt, Artificial Sequence
  Description of Artificial Sequence: Synthetic oligonucleotide
  Antisense strand to SEQ ID NO: 907376
ugacacaaaguauagggaa

SEQ ID NO: 907378 - RNA, 19 nt, Artificial Sequence
  Description of Artificial Sequence: Synthetic oligonucleotide
  Sense strand starting at position 1272 of SEQ ID NO: 589045
ucccuauacuuugugucau

SEQ ID NO: 907379 - RNA, 19 nt, Artificial Sequence
  Description of Artificial Sequence: Synthetic oligonucleotide
  Antisense strand to SEQ ID NO: 907378
augacacaaaguauaggga

SEQ ID NO: 907380 - RNA, 19 nt, Artificial Sequence
  Description of Artificial Sequence: Synthetic oligonucleotide
  Sense strand starting at position 1273 of SEQ ID NO: 589045
cccuauacuuugugucauc

SEQ ID NO: 907381 - RNA, 19 nt, Artificial Sequence
  Description of Artificial Sequence: Synthetic oligonucleotide
  Antisense strand to SEQ ID NO: 907380
gaugacacaaaguauaggg

SEQ ID NO: 907382 - RNA, 19 nt, Artificial Sequence
  Description of Artificial Sequence: Synthetic oligonucleotide
  Sense strand starting at position 1311 of SEQ ID NO: 589045
gaauccaagucguccuuga

SEQ ID NO: 907383 - RNA, 19 nt, Artificial Sequence
  Description of Artificial Sequence: Synthetic oligonucleotide
  Antisense strand to SEQ ID NO: 907382
ucaaggacgacuuggauuc

SEQ ID NO: 907384 - RNA, 19 nt, Artificial Sequence
  Description of Artificial Sequence: Synthetic oligonucleotide
  Sense strand starting at position 1315 of SEQ ID NO: 589045
ccaagucguccuugagcuu

SEQ ID NO: 907385 - RNA, 19 nt, Artificial Sequence
  Description of Artificial Sequence: Synthetic oligonucleotide
  Antisense strand to SEQ ID NO: 907384
aagcucaaggacgacuugg

SEQ ID NO: 907386 - RNA, 19 nt, Artificial Sequence
  Description of Artificial Sequence: Synthetic oligonucleotide
  Sense strand starting at position 1712 of SEQ ID NO: 589045
gaaugcagcccgggagaau

SEQ ID NO: 907387 - RNA, 19 nt, Artificial Sequence
  Description of Artificial Sequence: Synthetic oligonucleotide
  Antisense strand to SEQ ID NO: 907386
auucucccgggcugcauuc

SEQ ID NO: 907388 - RNA, 19 nt, Artificial Sequence
  Description of Artificial Sequence: Synthetic oligonucleotide
  Sense strand starting at position 1758 of SEQ ID NO: 589045
gggaucucgucaggcuaga

SEQ ID NO: 907389 - RNA, 19 nt, Artificial Sequence
  Description of Artificial Sequence: Synthetic oligonucleotide
  Antisense strand to SEQ ID NO: 907388
ucuagccugacgagauccc

SEQ ID NO: 907390 - RNA, 19 nt, Artificial Sequence
  Description of Artificial Sequence: Synthetic oligonucleotide
  Sense strand starting at position 2174 of SEQ ID NO: 589045
gagagaacgcgucauucag

SEQ ID NO: 907391 - RNA, 19 nt, Artificial Sequence
  Description of Artificial Sequence: Synthetic oligonucleotide
  Antisense strand to SEQ ID NO: 907390
cugaaugacgcguucucuc

SEQ ID NO: 907392 - RNA, 19 nt, Artificial Sequence
  Description of Artificial Sequence: Synthetic oligonucleotide
  Sense strand starting at position 2372 of SEQ ID NO: 589045
cgugucaacccgcagucau

SEQ ID NO: 907393 - RNA, 19 nt, Artificial Sequence
  Description of Artificial Sequence: Synthetic oligonucleotide
  Antisense strand to SEQ ID NO: 907392
augacugcggguugacacg

SEQ ID NO: 907394 - RNA, 19 nt, Artificial Sequence
  Description of Artificial Sequence: Synthetic oligonucleotide
  Sense strand starting at position 2448 of SEQ ID NO: 589045
cgagcuuccaaaugggaaa

SEQ ID NO: 907395 - RNA, 19 nt, Artificial Sequence
  Description of Artificial Sequence: Synthetic oligonucleotide
  Antisense strand to SEQ ID NO: 907394
uuucccauuuggaagcucg

SEQ ID NO: 907396 - RNA, 19 nt, Artificial Sequence
  Description of Artificial Sequence: Synthetic oligonucleotide
  Sense strand starting at position 2513 of SEQ ID NO: 589045
gucuccaaguccuaaggau

SEQ ID NO: 907397 - RNA, 19 nt, Artificial Sequence
  Description of Artificial Sequence: Synthetic oligonucleotide
  Antisense strand to SEQ ID NO: 907396
auccuuaggacuuggagac

SEQ ID NO: 907398 - RNA, 19 nt, Artificial Sequence
  Description of Artificial Sequence: Synthetic oligonucleotide
  Sense strand starting at position 2522 of SEQ ID NO: 589045
uccuaaggauccugucaaa

SEQ ID NO: 907399 - RNA, 19 nt, Artificial Sequence
  Description of Artificial Sequence: Synthetic oligonucleotide
  Antisense strand to SEQ ID NO: 907398
uuugacaggauccuuagga

SEQ ID NO: 907400 - RNA, 19 nt, Artificial Sequence
  Description of Artificial Sequence: Synthetic oligonucleotide
  Sense strand starting at position 3009 of SEQ ID NO: 589045
uacuaucacgucuggcuaa

SEQ ID NO: 907401 - RNA, 19 nt, Artificial Sequence
  Description of Artificial Sequence: Synthetic oligonucleotide
  Antisense strand to SEQ ID NO: 907400
uuagccagacgugauagua

SEQ ID NO: 907402 - RNA, 19 nt, Artificial Sequence
  Description of Artificial Sequence: Synthetic oligonucleotide
  Sense strand starting at position 3159 of SEQ ID NO: 589045
gcuagaugcuccuuucuug

SEQ ID NO: 907403 - RNA, 19 nt, Artificial Sequence
  Description of Artificial Sequence: Synthetic oligonucleotide
  Antisense strand to SEQ ID NO: 907402
caagaaaggagcaucuagc

SEQ ID NO: 907404 - RNA, 19 nt, Artificial Sequence
  Description of Artificial Sequence: Synthetic oligonucleotide
  Sense strand starting at position 3164 of SEQ ID NO: 589045
augcuccuuucuugaggaa

SEQ ID NO: 907405 - RNA, 19 nt, Artificial Sequence
  Description of Artificial Sequence: Synthetic oligonucleotide
  Antisense strand to SEQ ID NO: 907404
uuccucaagaaaggagcau

SEQ ID NO: 907406 - RNA, 19 nt, Artificial Sequence
  Description of Artificial Sequence: Synthetic oligonucleotide
  Sense strand starting at position 3275 of SEQ ID NO: 589045
acaacuauguucguacagu

SEQ ID NO: 907407 - RNA, 19 nt, Artificial Sequence
  Description of Artificial Sequence: Synthetic oligonucleotide
  Antisense strand to SEQ ID NO: 907406
acuguacgaacauaguugu

SEQ ID NO: 907408 - RNA, 19 nt, Artificial Sequence
  Description of Artificial Sequence: Synthetic oligonucleotide
  Sense strand starting at position 3276 of SEQ ID NO: 589045
caacuauguucguacaguc

SEQ ID NO: 907409 - RNA, 19 nt, Artificial Sequence
  Description of Artificial Sequence: Synthetic oligonucleotide
  Antisense strand to SEQ ID NO: 907408
gacuguacgaacauaguug

SEQ ID NO: 907410 - RNA, 19 nt, Artificial Sequence
  Description of Artificial Sequence: Synthetic oligonucleotide
  Sense strand starting at position 3340 of SEQ ID NO: 589045
ccuauaaucucagcagaug

SEQ ID NO: 907411 - RNA, 19 nt, Artificial Sequence
  Description of Artificial Sequence: Synthetic oligonucleotide
  Antisense strand to SEQ ID NO: 907410
caucugcugagauuauagg

SEQ ID NO: 907412 - RNA, 19 nt, Artificial Sequence
  Description of Artificial Sequence: Synthetic oligonucleotide
  Sense strand starting at position 3598 of SEQ ID NO: 589045
ugggaacucucauauuaau

SEQ ID NO: 907413 - RNA, 19 nt, Artificial Sequence
  Description of Artificial Sequence: Synthetic oligonucleotide
  Antisense strand to SEQ ID NO: 907412
auuaauaugagaguuccca

SEQ ID NO: 907414 - RNA, 19 nt, Artificial Sequence
  Description of Artificial Sequence: Synthetic oligonucleotide
  Sense strand starting at position 3638 of SEQ ID NO: 589045
guggcucaagccuguuaua

SEQ ID NO: 907415 - RNA, 19 nt, Artificial Sequence
  Description of Artificial Sequence: Synthetic oligonucleotide
  Antisense strand to SEQ ID NO: 907414
uauaacaggcuugagccac

SEQ ID NO: 907416 - RNA, 19 nt, Artificial Sequence
  Description of Artificial Sequence: Synthetic oligonucleotide
  Sense strand starting at position 3641 of SEQ ID NO: 589045
gcucaagccuguuauauca

SEQ ID NO: 907417 - RNA, 19 nt, Artificial Sequence
  Description of Artificial Sequence: Synthetic oligonucleotide
  Antisense strand to SEQ ID NO: 907416
ugauauaacaggcuugagc

SEQ ID NO: 907418 - RNA, 19 nt, Artificial Sequence
  Description of Artificial Sequence: Synthetic oligonucleotide
  Sense strand starting at position 3648 of SEQ ID NO: 589045
ccuguuauaucagcacuuu

SEQ ID NO: 907419 - RNA, 19 nt, Artificial Sequence
  Description of Artificial Sequence: Synthetic oligonucleotide
  Antisense strand to SEQ ID NO: 907418
aaagugcugauauaacagg

SEQ ID NO: 907420 - RNA, 19 nt, Artificial Sequence
  Description of Artificial Sequence: Synthetic oligonucleotide
  Sense strand starting at position 3649 of SEQ ID NO: 589045
cuguuauaucagcacuuug

SEQ ID NO: 907421 - RNA, 19 nt, Artificial Sequence
  Description of Artificial Sequence: Synthetic oligonucleotide
  Antisense strand to SEQ ID NO: 907420
caaagugcugauauaacag

SEQ ID NO: 907422 - RNA, 19 nt, Artificial Sequence
  Description of Artificial Sequence: Synthetic oligonucleotide
  Sense strand starting at position 490 of SEQ ID NO: 589048
ugacuaaccuggcuaaagu

SEQ ID NO: 907423 - RNA, 19 nt, Artificial Sequence
  Description of Artificial Sequence: Synthetic oligonucleotide
  Antisense strand to SEQ ID NO: 907422
acuuuagccagguuaguca

SEQ ID NO: 907424 - RNA, 19 nt, Artificial Sequence
  Description of Artificial Sequence: Synthetic oligonucleotide
  Sense strand starting at position 568 of SEQ ID NO: 589048
acuuauuagugucuggaau

SEQ ID NO: 907425 - RNA, 19 nt, Artificial Sequence
  Description of Artificial Sequence: Synthetic oligonucleotide
  Antisense strand to SEQ ID NO: 907424
auuccagacacuaauaagu

SEQ ID NO: 907426 - RNA, 19 nt, Artificial Sequence
  Description of Artificial Sequence: Synthetic oligonucleotide
  Sense strand starting at position 569 of SEQ ID NO: 589048
cuuauuagugucuggaaua

SEQ ID NO: 907427 - RNA, 19 nt, Artificial Sequence
  Description of Artificial Sequence: Synthetic oligonucleotide
  Antisense strand to SEQ ID NO: 907426
uauuccagacacuaauaag

SEQ ID NO: 907428 - RNA, 19 nt, Artificial Sequence
  Description of Artificial Sequence: Synthetic oligonucleotide
  Sense strand starting at position 630 of SEQ ID NO: 589048
aauguaagucauugaggga

SEQ ID NO: 907429 - RNA, 19 nt, Artificial Sequence
  Description of Artificial Sequence: Synthetic oligonucleotide
  Antisense strand to SEQ ID NO: 907428
ucccucaaugacuuacauu

SEQ ID NO: 907430 - RNA, 19 nt, Artificial Sequence
  Description of Artificial Sequence: Synthetic oligonucleotide
  Sense strand starting at position 877 of SEQ ID NO: 589048
uauggaucucugcaaguuc

SEQ ID NO: 907431 - RNA, 19 nt, Artificial Sequence
  Description of Artificial Sequence: Synthetic oligonucleotide
  Antisense strand to SEQ ID NO: 907430
gaacuugcagagauccaua

SEQ ID NO: 907432 - RNA, 19 nt, Artificial Sequence
  Description of Artificial Sequence: Synthetic oligonucleotide
  Sense strand starting at position 1008 of SEQ ID NO: 589048
uuagacuucuagucacaga

SEQ ID NO: 907433 - RNA, 19 nt, Artificial Sequence
  Description of Artificial Sequence: Synthetic oligonucleotide
  Antisense strand to SEQ ID NO: 907432
ucugugacuagaagucuaa

SEQ ID NO: 907434 - RNA, 19 nt, Artificial Sequence
  Description of Artificial Sequence: Synthetic oligonucleotide
  Sense strand starting at position 1384 of SEQ ID NO: 589048
uuugauaacccaggcucua

SEQ ID NO: 907435 - RNA, 19 nt, Artificial Sequence
  Description of Artificial Sequence: Synthetic oligonucleotide
  Antisense strand to SEQ ID NO: 907434
uagagccuggguuaucaaa

SEQ ID NO: 907436 - RNA, 19 nt, Artificial Sequence
  Description of Artificial Sequence: Synthetic oligonucleotide
  Sense strand starting at position 2026 of SEQ ID NO: 589048
gacaauuagaucgggaggu

SEQ ID NO: 907437 - RNA, 19 nt, Artificial Sequence
  Description of Artificial Sequence: Synthetic oligonucleotide
  Antisense strand to SEQ ID NO: 907436
accucccgaucuaauuguc

SEQ ID NO: 907438 - RNA, 19 nt, Artificial Sequence
  Description of Artificial Sequence: Synthetic oligonucleotide
  Sense strand starting at position 2104 of SEQ ID NO: 589048
aaccgaguuccguuacgca

SEQ ID NO: 907439 - RNA, 19 nt, Artificial Sequence
  Description of Artificial Sequence: Synthetic oligonucleotide
  Antisense strand to SEQ ID NO: 907438
ugcguaacggaacucgguu

SEQ ID NO: 907440 - RNA, 19 nt, Artificial Sequence
  Description of Artificial Sequence: Synthetic oligonucleotide
  Sense strand starting at position 2170 of SEQ ID NO: 589048
gcaucacugccggaagaua

SEQ ID NO: 907441 - RNA, 19 nt, Artificial Sequence
  Description of Artificial Sequence: Synthetic oligonucleotide
  Antisense strand to SEQ ID NO: 907440
uaucuuccggcagugaugc

SEQ ID NO: 907442 - RNA, 19 nt, Artificial Sequence
  Description of Artificial Sequence: Synthetic oligonucleotide
  Sense strand starting at position 2354 of SEQ ID NO: 589048
agaggacguuaaucuuuga

SEQ ID NO: 907443 - RNA, 19 nt, Artificial Sequence
  Description of Artificial Sequence: Synthetic oligonucleotide
  Antisense strand to SEQ ID NO: 907442
ucaaagauuaacguccucu

SEQ ID NO: 907444 - RNA, 19 nt, Artificial Sequence
  Description of Artificial Sequence: Synthetic oligonucleotide
  Sense strand starting at position 2357 of SEQ ID NO: 589048
ggacguuaaucuuugagau

SEQ ID NO: 907445 - RNA, 19 nt, Artificial Sequence
  Description of Artificial Sequence: Synthetic oligonucleotide
  Antisense strand to SEQ ID NO: 907444
aucucaaagauuaacgucc

SEQ ID NO: 907446 - RNA, 19 nt, Artificial Sequence
  Description of Artificial Sequence: Synthetic oligonucleotide
  Sense strand starting at position 2358 of SEQ ID NO: 589048
gacguuaaucuuugagaua

SEQ ID NO: 907447 - RNA, 19 nt, Artificial Sequence
  Description of Artificial Sequence: Synthetic oligonucleotide
  Antisense strand to SEQ ID NO: 907446
uaucucaaagauuaacguc

SEQ ID NO: 907448 - RNA, 19 nt, Artificial Sequence
  Description of Artificial Sequence: Synthetic oligonucleotide
  Sense strand starting at position 2553 of SEQ ID NO: 589048
auugaauaugugcagguua

SEQ ID NO: 907449 - RNA, 19 nt, Artificial Sequence
  Description of Artificial Sequence: Synthetic oligonucleotide
  Antisense strand to SEQ ID NO: 907448
uaaccugcacauauucaau

SEQ ID NO: 907450 - RNA, 19 nt, Artificial Sequence
  Description of Artificial Sequence: Synthetic oligonucleotide
  Sense strand starting at position 2622 of SEQ ID NO: 589048
gauguaaguccagagucca

SEQ ID NO: 907451 - RNA, 19 nt, Artificial Sequence
  Description of Artificial Sequence: Synthetic oligonucleotide
  Antisense strand to SEQ ID NO: 907450
uggacucuggacuuacauc

SEQ ID NO: 907452 - RNA, 19 nt, Artificial Sequence
  Description of Artificial Sequence: Synthetic oligonucleotide
  Sense strand starting at position 2654 of SEQ ID NO: 589048
cagggucuccaaugucaaa

SEQ ID NO: 907453 - RNA, 19 nt, Artificial Sequence
  Description of Artificial Sequence: Synthetic oligonucleotide
  Antisense strand to SEQ ID NO: 907452
uuugacauuggagacccug

SEQ ID NO: 907454 - RNA, 19 nt, Artificial Sequence
  Description of Artificial Sequence: Synthetic oligonucleotide
  Sense strand starting at position 2791 of SEQ ID NO: 589048
gcacuacagguguauauau

SEQ ID NO: 907455 - RNA, 19 nt, Artificial Sequence
  Description of Artificial Sequence: Synthetic oligonucleotide
  Antisense strand to SEQ ID NO: 907454
auauauacaccuguagugc

SEQ ID NO: 907456 - RNA, 19 nt, Artificial Sequence
  Description of Artificial Sequence: Synthetic oligonucleotide
  Sense strand starting at position 2798 of SEQ ID NO: 589048
agguguauauauccaauaa

SEQ ID NO: 907457 - RNA, 19 nt, Artificial Sequence
  Description of Artificial Sequence: Synthetic oligonucleotide
  Antisense strand to SEQ ID NO: 907456
uuauuggauauauacaccu

SEQ ID NO: 907458 - RNA, 19 nt, Artificial Sequence
  Description of Artificial Sequence: Synthetic oligonucleotide
  Sense strand starting at position 2847 of SEQ ID NO: 589048
guauaaauggauuguaaca

SEQ ID NO: 907459 - RNA, 19 nt, Artificial Sequence
  Description of Artificial Sequence: Synthetic oligonucleotide
  Antisense strand to SEQ ID NO: 907458
uguuacaauccauuuauac

SEQ ID NO: 907460 - RNA, 19 nt, Artificial Sequence
  Description of Artificial Sequence: Synthetic oligonucleotide
  Sense strand starting at position 3199 of SEQ ID NO: 589048
cagucaaguugaccgauaa

SEQ ID NO: 907461 - RNA, 19 nt, Artificial Sequence
  Description of Artificial Sequence: Synthetic oligonucleotide
  Antisense strand to SEQ ID NO: 907460
uuaucggucaacuugacug

SEQ ID NO: 907462 - RNA, 19 nt, Artificial Sequence
  Description of Artificial Sequence: Synthetic oligonucleotide
  Sense strand starting at position 3200 of SEQ ID NO: 589048
agucaaguugaccgauaaa

SEQ ID NO: 907463 - RNA, 19 nt, Artificial Sequence
  Description of Artificial Sequence: Synthetic oligonucleotide
  Antisense strand to SEQ ID NO: 907462
uuuaucggucaacuugacu

SEQ ID NO: 907464 - RNA, 19 nt, Artificial Sequence
  Description of Artificial Sequence: Synthetic oligonucleotide
  Sense strand starting at position 3258 of SEQ ID NO: 589048
gguuacagaaucugugaga

SEQ ID NO: 907465 - RNA, 19 nt, Artificial Sequence
  Description of Artificial Sequence: Synthetic oligonucleotide
  Antisense strand to SEQ ID NO: 907464
ucucacagauucuguaacc

SEQ ID NO: 907466 - RNA, 19 nt, Artificial Sequence
  Description of Artificial Sequence: Synthetic oligonucleotide
  Sense strand starting at position 3259 of SEQ ID NO: 589048
guuacagaaucugugagau

SEQ ID NO: 907467 - RNA, 19 nt, Artificial Sequence
  Description of Artificial Sequence: Synthetic oligonucleotide
  Antisense strand to SEQ ID NO: 907466
aucucacagauucuguaac

SEQ ID NO: 907468 - RNA, 19 nt, Artificial Sequence
  Description of Artificial Sequence: Synthetic oligonucleotide
  Sense strand starting at position 3274 of SEQ ID NO: 589048
agauaauagguuugugaua

SEQ ID NO: 907469 - RNA, 19 nt, Artificial Sequence
  Description of Artificial Sequence: Synthetic oligonucleotide
  Antisense strand to SEQ ID NO: 907468
uaucacaaaccuauuaucu

SEQ ID NO: 907470 - RNA, 19 nt, Artificial Sequence
  Description of Artificial Sequence: Synthetic oligonucleotide
  Sense strand starting at position 3275 of SEQ ID NO: 589048
gauaauagguuugugauac

SEQ ID NO: 907471 - RNA, 19 nt, Artificial Sequence
  Description of Artificial Sequence: Synthetic oligonucleotide
  Antisense strand to SEQ ID NO: 907470
guaucacaaaccuauuauc

SEQ ID NO: 907472 - RNA, 19 nt, Artificial Sequence
  Description of Artificial Sequence: Synthetic oligonucleotide
  Sense strand starting at position 3299 of SEQ ID NO: 589048
uccacuaaagcuggugaua

SEQ ID NO: 907473 - RNA, 19 nt, Artificial Sequence
  Description of Artificial Sequence: Synthetic oligonucleotide
  Antisense strand to SEQ ID NO: 907472
uaucaccagcuuuagugga

SEQ ID NO: 907474 - RNA, 19 nt, Artificial Sequence
  Description of Artificial Sequence: Synthetic oligonucleotide
  Sense strand starting at position 3302 of SEQ ID NO: 589048
acuaaagcuggugauaauu

SEQ ID NO: 907475 - RNA, 19 nt, Artificial Sequence
  Description of Artificial Sequence: Synthetic oligonucleotide
  Antisense strand to SEQ ID NO: 907474
aauuaucaccagcuuuagu

SEQ ID NO: 907476 - RNA, 19 nt, Artificial Sequence
  Description of Artificial Sequence: Synthetic oligonucleotide
  Sense strand starting at position 3417 of SEQ ID NO: 589048
cacuguguuccugacagag

SEQ ID NO: 907477 - RNA, 19 nt, Artificial Sequence
  Description of Artificial Sequence: Synthetic oligonucleotide
  Antisense strand to SEQ ID NO: 907476
cucugucaggaacacagug

SEQ ID NO: 907478 - RNA, 19 nt, Artificial Sequence
  Description of Artificial Sequence: Synthetic oligonucleotide
  Sense strand starting at position 3421 of SEQ ID NO: 589048
guguuccugacagaguauu

SEQ ID NO: 907479 - RNA, 19 nt, Artificial Sequence
  Description of Artificial Sequence: Synthetic oligonucleotide
  Antisense strand to SEQ ID NO: 907478
aauacucugucaggaacac

SEQ ID NO: 907480 - RNA, 19 nt, Artificial Sequence
  Description of Artificial Sequence: Synthetic oligonucleotide
  Sense strand starting at position 3427 of SEQ ID NO: 589048
cugacagaguauucuuuga

SEQ ID NO: 907481 - RNA, 19 nt, Artificial Sequence
  Description of Artificial Sequence: Synthetic oligonucleotide
  Antisense strand to SEQ ID NO: 907480
ucaaagaauacucugucag

SEQ ID NO: 907482 - RNA, 19 nt, Artificial Sequence
  Description of Artificial Sequence: Synthetic oligonucleotide
  Sense strand starting at position 3429 of SEQ ID NO: 589048
gacagaguauucuuugagc

SEQ ID NO: 907483 - RNA, 19 nt, Artificial Sequence
  Description of Artificial Sequence: Synthetic oligonucleotide
  Antisense strand to SEQ ID NO: 907482
gcucaaagaauacucuguc

SEQ ID NO: 907484 - RNA, 19 nt, Artificial Sequence
  Description of Artificial Sequence: Synthetic oligonucleotide
  Sense strand starting at position 3500 of SEQ ID NO: 589048
ugacuuuaauuguuccuga

SEQ ID NO: 907485 - RNA, 19 nt, Artificial Sequence
  Description of Artificial Sequence: Synthetic oligonucleotide
  Antisense strand to SEQ ID NO: 907484
ucaggaacaauuaaaguca

SEQ ID NO: 907486 - RNA, 19 nt, Artificial Sequence
  Description of Artificial Sequence: Synthetic oligonucleotide
  Sense strand starting at position 3807 of SEQ ID NO: 589048
auauaugugguagggauga

SEQ ID NO: 907487 - RNA, 19 nt, Artificial Sequence
  Description of Artificial Sequence: Synthetic oligonucleotide
  Antisense strand to SEQ ID NO: 907486
ucaucccuaccacauauau

SEQ ID NO: 907488 - RNA, 19 nt, Artificial Sequence
  Description of Artificial Sequence: Synthetic oligonucleotide
  Sense strand starting at position 3809 of SEQ ID NO: 589048
auaugugguagggaugagu

SEQ ID NO: 907489 - RNA, 19 nt, Artificial Sequence
  Description of Artificial Sequence: Synthetic oligonucleotide
  Antisense strand to SEQ ID NO: 907488
acucaucccuaccacauau

SEQ ID NO: 907490 - RNA, 19 nt, Artificial Sequence
  Description of Artificial Sequence: Synthetic oligonucleotide
  Sense strand starting at position 3826 of SEQ ID NO: 589048
guuaguacggaggaucaga

SEQ ID NO: 907491 - RNA, 19 nt, Artificial Sequence
  Description of Artificial Sequence: Synthetic oligonucleotide
  Antisense strand to SEQ ID NO: 907490
ucugauccuccguacuaac

SEQ ID NO: 907492 - RNA, 19 nt, Artificial Sequence
  Description of Artificial Sequence: Synthetic oligonucleotide
  Sense strand starting at position 3970 of SEQ ID NO: 589048
agaggucacacacgguaaa

SEQ ID NO: 907493 - RNA, 19 nt, Artificial Sequence
  Description of Artificial Sequence: Synthetic oligonucleotide
  Antisense strand to SEQ ID NO: 907492
uuuaccgugugugaccucu

SEQ ID NO: 907494 - RNA, 19 nt, Artificial Sequence
  Description of Artificial Sequence: Synthetic oligonucleotide
  Sense strand starting at position 3971 of SEQ ID NO: 589048
gaggucacacacgguaaau

SEQ ID NO: 907495 - RNA, 19 nt, Artificial Sequence
  Description of Artificial Sequence: Synthetic oligonucleotide
  Antisense strand to SEQ ID NO: 907494
auuuaccgugugugaccuc

SEQ ID NO: 907496 - RNA, 19 nt, Artificial Sequence
  Description of Artificial Sequence: Synthetic oligonucleotide
  Sense strand starting at position 3973 of SEQ ID NO: 589048
ggucacacacgguaaauau

SEQ ID NO: 907497 - RNA, 19 nt, Artificial Sequence
  Description of Artificial Sequence: Synthetic oligonucleotide
  Antisense strand to SEQ ID NO: 907496
auauuuaccgugugugacc

SEQ ID NO: 907498 - RNA, 19 nt, Artificial Sequence
  Description of Artificial Sequence: Synthetic oligonucleotide
  Sense strand starting at position 3981 of SEQ ID NO: 589048
acgguaaauauguauggua

SEQ ID NO: 907499 - RNA, 19 nt, Artificial Sequence
  Description of Artificial Sequence: Synthetic oligonucleotide
  Antisense strand to SEQ ID NO: 907498
uaccauacauauuuaccgu

SEQ ID NO: 907500 - RNA, 19 nt, Artificial Sequence
  Description of Artificial Sequence: Synthetic oligonucleotide
  Sense strand starting at position 3983 of SEQ ID NO: 589048
gguaaauauguaugguauu

SEQ ID NO: 907501 - RNA, 19 nt, Artificial Sequence
  Description of Artificial Sequence: Synthetic oligonucleotide
  Antisense strand to SEQ ID NO: 907500
aauaccauacauauuuacc

SEQ ID NO: 907502 - RNA, 19 nt, Artificial Sequence
  Description of Artificial Sequence: Synthetic oligonucleotide
  Sense strand starting at position 200 of SEQ ID NO: 589049
ggauguccugcucaucgau

SEQ ID NO: 907503 - RNA, 19 nt, Artificial Sequence
  Description of Artificial Sequence: Synthetic oligonucleotide
  Antisense strand to SEQ ID NO: 907502
aucgaugagcaggacaucc

SEQ ID NO: 907504 - RNA, 19 nt, Artificial Sequence
  Description of Artificial Sequence: Synthetic oligonucleotide
  Sense strand starting at position 212 of SEQ ID NO: 589049
caucgaucagcguguauuu

SEQ ID NO: 907505 - RNA, 19 nt, Artificial Sequence
  Description of Artificial Sequence: Synthetic oligonucleotide
  Antisense strand to SEQ ID NO: 907504
aaauacacgcugaucgaug

SEQ ID NO: 907506 - RNA, 19 nt, Artificial Sequence
  Description of Artificial Sequence: Synthetic oligonucleotide
  Sense strand starting at position 221 of SEQ ID NO: 589049
gcguguauuuggucuggaa

SEQ ID NO: 907507 - RNA, 19 nt, Artificial Sequence
  Description of Artificial Sequence: Synthetic oligonucleotide
  Antisense strand to SEQ ID NO: 907506
uuccagaccaaauacacgc

SEQ ID NO: 907508 - RNA, 19 nt, Artificial Sequence
  Description of Artificial Sequence: Synthetic oligonucleotide
  Sense strand starting at position 223 of SEQ ID NO: 589049
guguauuuggucuggaagu

SEQ ID NO: 907509 - RNA, 19 nt, Artificial Sequence
  Description of Artificial Sequence: Synthetic oligonucleotide
  Antisense strand to SEQ ID NO: 907508
acuuccagaccaaauacac

SEQ ID NO: 907510 - RNA, 19 nt, Artificial Sequence
  Description of Artificial Sequence: Synthetic oligonucleotide
  Sense strand starting at position 224 of SEQ ID NO: 589049
uguauuuggucuggaaguu

SEQ ID NO: 907511 - RNA, 19 nt, Artificial Sequence
  Description of Artificial Sequence: Synthetic oligonucleotide
  Antisense strand to SEQ ID NO: 907510
aacuuccagaccaaauaca

SEQ ID NO: 907512 - RNA, 19 nt, Artificial Sequence
  Description of Artificial Sequence: Synthetic oligonucleotide
  Sense strand starting at position 264 of SEQ ID NO: 589049
acauuugggaucugcguga

SEQ ID NO: 907513 - RNA, 19 nt, Artificial Sequence
  Description of Artificial Sequence: Synthetic oligonucleotide
  Antisense strand to SEQ ID NO: 907512
ucacgcagaucccaaaugu

SEQ ID NO: 907514 - RNA, 19 nt, Artificial Sequence
  Description of Artificial Sequence: Synthetic oligonucleotide
  Sense strand starting at position 310 of SEQ ID NO: 589049
gcaggagccuguugcauuu

SEQ ID NO: 907515 - RNA, 19 nt, Artificial Sequence
  Description of Artificial Sequence: Synthetic oligonucleotide
  Antisense strand to SEQ ID NO: 907514
aaaugcaacaggcuccugc

SEQ ID NO: 907516 - RNA, 19 nt, Artificial Sequence
  Description of Artificial Sequence: Synthetic oligonucleotide
  Sense strand starting at position 329 of SEQ ID NO: 589049
uccugugaaguggaaagua

SEQ ID NO: 907517 - RNA, 19 nt, Artificial Sequence
  Description of Artificial Sequence: Synthetic oligonucleotide
  Antisense strand to SEQ ID NO: 907516
uacuuuccacuucacagga

SEQ ID NO: 907518 - RNA, 19 nt, Artificial Sequence
  Description of Artificial Sequence: Synthetic oligonucleotide
  Sense strand starting at position 410 of SEQ ID NO: 589049
uggugcagucuacgacaaa

SEQ ID NO: 907519 - RNA, 19 nt, Artificial Sequence
  Description of Artificial Sequence: Synthetic oligonucleotide
  Antisense strand to SEQ ID NO: 907518
uuugucguagacugcacca

SEQ ID NO: 907520 - RNA, 19 nt, Artificial Sequence
  Description of Artificial Sequence: Synthetic oligonucleotide
  Sense strand starting at position 460 of SEQ ID NO: 589049
cacuuuagucugcgccaga

SEQ ID NO: 907521 - RNA, 19 nt, Artificial Sequence
  Description of Artificial Sequence: Synthetic oligonucleotide
  Antisense strand to SEQ ID NO: 907520
ucuggcgcagacuaaagug

SEQ ID NO: 907522 - RNA, 19 nt, Artificial Sequence
  Description of Artificial Sequence: Synthetic oligonucleotide
  Sense strand starting at position 600 of SEQ ID NO: 589049
gcagaagagccagaagguu

SEQ ID NO: 907523 - RNA, 19 nt, Artificial Sequence
  Description of Artificial Sequence: Synthetic oligonucleotide
  Antisense strand to SEQ ID NO: 907522
aaccuucuggcucuucugc

SEQ ID NO: 907524 - RNA, 19 nt, Artificial Sequence
  Description of Artificial Sequence: Synthetic oligonucleotide
  Sense strand starting at position 619 of SEQ ID NO: 589049
uugauuaggguguguuuau

SEQ ID NO: 907525 - RNA, 19 nt, Artificial Sequence
  Description of Artificial Sequence: Synthetic oligonucleotide
  Antisense strand to SEQ ID NO: 907524
auaaacacacccuaaucaa

SEQ ID NO: 907526 - RNA, 19 nt, Artificial Sequence
  Description of Artificial Sequence: Synthetic oligonucleotide
  Sense strand starting at position 620 of SEQ ID NO: 589049
ugauuaggguguguuuauu

SEQ ID NO: 907527 - RNA, 19 nt, Artificial Sequence
  Description of Artificial Sequence: Synthetic oligonucleotide
  Antisense strand to SEQ ID NO: 907526
aauaaacacacccuaauca

SEQ ID NO: 907528 - RNA, 19 nt, Artificial Sequence
  Description of Artificial Sequence: Synthetic oligonucleotide
  Sense strand starting at position 642 of SEQ ID NO: 589049
cugagcuacucacugauua

SEQ ID NO: 907529 - RNA, 19 nt, Artificial Sequence
  Description of Artificial Sequence: Synthetic oligonucleotide
  Antisense strand to SEQ ID NO: 907528
uaaucagugaguagcucag

SEQ ID NO: 907530 - RNA, 19 nt, Artificial Sequence
  Description of Artificial Sequence: Synthetic oligonucleotide
  Sense strand starting at position 643 of SEQ ID NO: 589049
ugagcuacucacugauuac

SEQ ID NO: 907531 - RNA, 19 nt, Artificial Sequence
  Description of Artificial Sequence: Synthetic oligonucleotide
  Antisense strand to SEQ ID NO: 907530
guaaucagugaguagcuca

SEQ ID NO: 907532 - RNA, 19 nt, Artificial Sequence
  Description of Artificial Sequence: Synthetic oligonucleotide
  Sense strand starting at position 702 of SEQ ID NO: 589049
agcuguaagggaugacaau

SEQ ID NO: 907533 - RNA, 19 nt, Artificial Sequence
  Description of Artificial Sequence: Synthetic oligonucleotide
  Antisense strand to SEQ ID NO: 907532
auugucaucccuuacagcu

SEQ ID NO: 907534 - RNA, 19 nt, Artificial Sequence
  Description of Artificial Sequence: Synthetic oligonucleotide
  Sense strand starting at position 720 of SEQ ID NO: 589049
ugccaucauggguggaguu

SEQ ID NO: 907535 - RNA, 19 nt, Artificial Sequence
  Description of Artificial Sequence: Synthetic oligonucleotide
  Antisense strand to SEQ ID NO: 907534
aacuccacccaugauggca

SEQ ID NO: 907536 - RNA, 19 nt, Artificial Sequence
  Description of Artificial Sequence: Synthetic oligonucleotide
  Sense strand starting at position 721 of SEQ ID NO: 589049
gccaucauggguggaguua

SEQ ID NO: 907537 - RNA, 19 nt, Artificial Sequence
  Description of Artificial Sequence: Synthetic oligonucleotide
  Antisense strand to SEQ ID NO: 907536
uaacuccacccaugauggc

SEQ ID NO: 907538 - RNA, 19 nt, Artificial Sequence
  Description of Artificial Sequence: Synthetic oligonucleotide
  Sense strand starting at position 1317 of SEQ ID NO: 589049
cggaaagggcgcuguguuu

SEQ ID NO: 907539 - RNA, 19 nt, Artificial Sequence
  Description of Artificial Sequence: Synthetic oligonucleotide
  Antisense strand to SEQ ID NO: 907538
aaacacagcgcccuuuccg

SEQ ID NO: 907540 - RNA, 19 nt, Artificial Sequence
  Description of Artificial Sequence: Synthetic oligonucleotide
  Sense strand starting at position 2223 of SEQ ID NO: 589049
gucaguuucgcgggaagcu

SEQ ID NO: 907541 - RNA, 19 nt, Artificial Sequence
  Description of Artificial Sequence: Synthetic oligonucleotide
  Antisense strand to SEQ ID NO: 907540
agcuucccgcgaaacugac

SEQ ID NO: 907542 - RNA, 19 nt, Artificial Sequence
  Description of Artificial Sequence: Synthetic oligonucleotide
  Sense strand starting at position 2224 of SEQ ID NO: 589049
ucaguuucgcgggaagcuu

SEQ ID NO: 907543 - RNA, 19 nt, Artificial Sequence
  Description of Artificial Sequence: Synthetic oligonucleotide
  Antisense strand to SEQ ID NO: 907542
aagcuucccgcgaaacuga

SEQ ID NO: 907544 - RNA, 19 nt, Artificial Sequence
  Description of Artificial Sequence: Synthetic oligonucleotide
  Sense strand starting at position 2487 of SEQ ID NO: 589049
gcggguguuucuggagaga

SEQ ID NO: 907545 - RNA, 19 nt, Artificial Sequence
  Description of Artificial Sequence: Synthetic oligonucleotide
  Antisense strand to SEQ ID NO: 907544
ucucuccagaaacacccgc

SEQ ID NO: 907546 - RNA, 19 nt, Artificial Sequence
  Description of Artificial Sequence: Synthetic oligonucleotide
  Sense strand starting at position 2489 of SEQ ID NO: 589049
ggguguuucuggagagaca

SEQ ID NO: 907547 - RNA, 19 nt, Artificial Sequence
  Description of Artificial Sequence: Synthetic oligonucleotide
  Antisense strand to SEQ ID NO: 907546
ugucucuccagaaacaccc

SEQ ID NO: 907548 - RNA, 19 nt, Artificial Sequence
  Description of Artificial Sequence: Synthetic oligonucleotide
  Sense strand starting at position 3076 of SEQ ID NO: 589049
uuuccauauuggccaggau

SEQ ID NO: 907549 - RNA, 19 nt, Artificial Sequence
  Description of Artificial Sequence: Synthetic oligonucleotide
  Antisense strand to SEQ ID NO: 907548
auccuggccaauauggaaa

SEQ ID NO: 907550 - RNA, 19 nt, Artificial Sequence
  Description of Artificial Sequence: Synthetic oligonucleotide
  Sense strand starting at position 3658 of SEQ ID NO: 589049
aucucaaccucauggaguu

SEQ ID NO: 907551 - RNA, 19 nt, Artificial Sequence
  Description of Artificial Sequence: Synthetic oligonucleotide
  Antisense strand to SEQ ID NO: 907550
aacuccaugagguugagau

SEQ ID NO: 907552 - RNA, 19 nt, Artificial Sequence
  Description of Artificial Sequence: Synthetic oligonucleotide
  Sense strand starting at position 3696 of SEQ ID NO: 589049
augagcaacugcuuuguga

SEQ ID NO: 907553 - RNA, 19 nt, Artificial Sequence
  Description of Artificial Sequence: Synthetic oligonucleotide
  Antisense strand to SEQ ID NO: 907552
ucacaaagcaguugcucau

SEQ ID NO: 907554 - RNA, 19 nt, Artificial Sequence
  Description of Artificial Sequence: Synthetic oligonucleotide
  Sense strand starting at position 3698 of SEQ ID NO: 589049
gagcaacugcuuugugaaa

SEQ ID NO: 907555 - RNA, 19 nt, Artificial Sequence
  Description of Artificial Sequence: Synthetic oligonucleotide
  Antisense strand to SEQ ID NO: 907554
uuucacaaagcaguugcuc

SEQ ID NO: 907556 - RNA, 19 nt, Artificial Sequence
  Description of Artificial Sequence: Synthetic oligonucleotide
  Sense strand starting at position 3731 of SEQ ID NO: 589049
gugggugcucccuagggua

SEQ ID NO: 907557 - RNA, 19 nt, Artificial Sequence
  Description of Artificial Sequence: Synthetic oligonucleotide
  Antisense strand to SEQ ID NO: 907556
uacccuagggagcacccac

SEQ ID NO: 907558 - RNA, 19 nt, Artificial Sequence
  Description of Artificial Sequence: Synthetic oligonucleotide
  Sense strand starting at position 3783 of SEQ ID NO: 589049
cccagagguugacuugaaa

SEQ ID NO: 907559 - RNA, 19 nt, Artificial Sequence
  Description of Artificial Sequence: Synthetic oligonucleotide
  Antisense strand to SEQ ID NO: 907558
uuucaagucaaccucuggg

SEQ ID NO: 907560 - RNA, 19 nt, Artificial Sequence
  Description of Artificial Sequence: Synthetic oligonucleotide
  Sense strand starting at position 635 of SEQ ID NO: 589050
gccgacaaucuggauacaa

SEQ ID NO: 907561 - RNA, 19 nt, Artificial Sequence
  Description of Artificial Sequence: Synthetic oligonucleotide
  Antisense strand to SEQ ID NO: 907560
uuguauccagauugucggc

SEQ ID NO: 907562 - RNA, 19 nt, Artificial Sequence
  Description of Artificial Sequence: Synthetic oligonucleotide
  Sense strand starting at position 800 of SEQ ID NO: 589050
cuggaugucuacccacaaa

SEQ ID NO: 907563 - RNA, 19 nt, Artificial Sequence
  Description of Artificial Sequence: Synthetic oligonucleotide
  Antisense strand to SEQ ID NO: 907562
uuuguggguagacauccag

SEQ ID NO: 907564 - RNA, 19 nt, Artificial Sequence
  Description of Artificial Sequence: Synthetic oligonucleotide
  Sense strand starting at position 900 of SEQ ID NO: 589050
uaauaacuggacugagguu

SEQ ID NO: 907565 - RNA, 19 nt, Artificial Sequence
  Description of Artificial Sequence: Synthetic oligonucleotide
  Antisense strand to SEQ ID NO: 907564
aaccucaguccaguuauua

SEQ ID NO: 907566 - RNA, 19 nt, Artificial Sequence
  Description of Artificial Sequence: Synthetic oligonucleotide
  Sense strand starting at position 1417 of SEQ ID NO: 589050
ccgcgugccucccacuaau

SEQ ID NO: 907567 - RNA, 19 nt, Artificial Sequence
  Description of Artificial Sequence: Synthetic oligonucleotide
  Antisense strand to SEQ ID NO: 907566
auuagugggaggcacgcgg

SEQ ID NO: 907568 - RNA, 19 nt, Artificial Sequence
  Description of Artificial Sequence: Synthetic oligonucleotide
  Sense strand starting at position 1438 of SEQ ID NO: 589050
ggaaguuugcuccaaccga

SEQ ID NO: 907569 - RNA, 19 nt, Artificial Sequence
  Description of Artificial Sequence: Synthetic oligonucleotide
  Antisense strand to SEQ ID NO: 907568
ucgguuggagcaaacuucc

SEQ ID NO: 907570 - RNA, 19 nt, Artificial Sequence
  Description of Artificial Sequence: Synthetic oligonucleotide
  Sense strand starting at position 1456 of SEQ ID NO: 589050
aggauaucauguccuccaa

SEQ ID NO: 907571 - RNA, 19 nt, Artificial Sequence
  Description of Artificial Sequence: Synthetic oligonucleotide
  Antisense strand to SEQ ID NO: 907570
uuggaggacaugauauccu

SEQ ID NO: 907572 - RNA, 19 nt, Artificial Sequence
  Description of Artificial Sequence: Synthetic oligonucleotide
  Sense strand starting at position 1542 of SEQ ID NO: 589050
gcaggaugcugucugggua

SEQ ID NO: 907573 - RNA, 19 nt, Artificial Sequence
  Description of Artificial Sequence: Synthetic oligonucleotide
  Antisense strand to SEQ ID NO: 907572
uacccagacagcauccugc

SEQ ID NO: 907574 - RNA, 19 nt, Artificial Sequence
  Description of Artificial Sequence: Synthetic oligonucleotide
  Sense strand starting at position 1887 of SEQ ID NO: 589050
gggcuagcucaccagaacu

SEQ ID NO: 907575 - RNA, 19 nt, Artificial Sequence
  Description of Artificial Sequence: Synthetic oligonucleotide
  Antisense strand to SEQ ID NO: 907574
aguucuggugagcuagccc

SEQ ID NO: 907576 - RNA, 19 nt, Artificial Sequence
  Description of Artificial Sequence: Synthetic oligonucleotide
  Sense strand starting at position 2083 of SEQ ID NO: 589050
cgcagcauccaggagaaau

SEQ ID NO: 907577 - RNA, 19 nt, Artificial Sequence
  Description of Artificial Sequence: Synthetic oligonucleotide
  Antisense strand to SEQ ID NO: 907576
auuucuccuggaugcugcg

SEQ ID NO: 907578 - RNA, 19 nt, Artificial Sequence
  Description of Artificial Sequence: Synthetic oligonucleotide
  Sense strand starting at position 2122 of SEQ ID NO: 589050
aaucuaacuuucgggucua

SEQ ID NO: 907579 - RNA, 19 nt, Artificial Sequence
  Description of Artificial Sequence: Synthetic oligonucleotide
  Antisense strand to SEQ ID NO: 907578
uagacccgaaaguuagauu

SEQ ID NO: 907580 - RNA, 19 nt, Artificial Sequence
  Description of Artificial Sequence: Synthetic oligonucleotide
  Sense strand starting at position 2123 of SEQ ID NO: 589050
aucuaacuuucgggucuau

SEQ ID NO: 907581 - RNA, 19 nt, Artificial Sequence
  Description of Artificial Sequence: Synthetic oligonucleotide
  Antisense strand to SEQ ID NO: 907580
auagacccgaaaguuagau

SEQ ID NO: 907582 - RNA, 19 nt, Artificial Sequence
  Description of Artificial Sequence: Synthetic oligonucleotide
  Sense strand starting at position 2127 of SEQ ID NO: 589050
aacuuucgggucuaugaga

SEQ ID NO: 907583 - RNA, 19 nt, Artificial Sequence
  Description of Artificial Sequence: Synthetic oligonucleotide
  Antisense strand to SEQ ID NO: 907582
ucucauagacccgaaaguu

SEQ ID NO: 907584 - RNA, 19 nt, Artificial Sequence
  Description of Artificial Sequence: Synthetic oligonucleotide
  Sense strand starting at position 2160 of SEQ ID NO: 589050
agcaguaagucuucuuuaa

SEQ ID NO: 907585 - RNA, 19 nt, Artificial Sequence
  Description of Artificial Sequence: Synthetic oligonucleotide
  Antisense strand to SEQ ID NO: 907584
uuaaagaagacuuacugcu

SEQ ID NO: 907586 - RNA, 19 nt, Artificial Sequence
  Description of Artificial Sequence: Synthetic oligonucleotide
  Sense strand starting at position 2164 of SEQ ID NO: 589050
guaagucuucuuuaacuuu

SEQ ID NO: 907587 - RNA, 19 nt, Artificial Sequence
  Description of Artificial Sequence: Synthetic oligonucleotide
  Antisense strand to SEQ ID NO: 907586
aaaguuaaagaagacuuac

SEQ ID NO: 907588 - RNA, 19 nt, Artificial Sequence
  Description of Artificial Sequence: Synthetic oligonucleotide
  Sense strand starting at position 2182 of SEQ ID NO: 589050
uuuauacgguccuucuaau

SEQ ID NO: 907589 - RNA, 19 nt, Artificial Sequence
  Description of Artificial Sequence: Synthetic oligonucleotide
  Antisense strand to SEQ ID NO: 907588
auuagaaggaccguauaaa

SEQ ID NO: 907590 - RNA, 19 nt, Artificial Sequence
  Description of Artificial Sequence: Synthetic oligonucleotide
  Sense strand starting at position 2897 of SEQ ID NO: 589050
gcugccuuucgaguuuauu

SEQ ID NO: 907591 - RNA, 19 nt, Artificial Sequence
  Description of Artificial Sequence: Synthetic oligonucleotide
  Antisense strand to SEQ ID NO: 907590
aauaaacucgaaaggcagc

SEQ ID NO: 907592 - RNA, 19 nt, Artificial Sequence
  Description of Artificial Sequence: Synthetic oligonucleotide
  Sense strand starting at position 2934 of SEQ ID NO: 589050
gguggugagauuggcagua

SEQ ID NO: 907593 - RNA, 19 nt, Artificial Sequence
  Description of Artificial Sequence: Synthetic oligonucleotide
  Antisense strand to SEQ ID NO: 907592
uacugccaaucucaccacc

SEQ ID NO: 907594 - RNA, 19 nt, Artificial Sequence
  Description of Artificial Sequence: Synthetic oligonucleotide
  Sense strand starting at position 2939 of SEQ ID NO: 589050
ugagauuggcaguaacuca

SEQ ID NO: 907595 - RNA, 19 nt, Artificial Sequence
  Description of Artificial Sequence: Synthetic oligonucleotide
  Antisense strand to SEQ ID NO: 907594
ugaguuacugccaaucuca

SEQ ID NO: 907596 - RNA, 19 nt, Artificial Sequence
  Description of Artificial Sequence: Synthetic oligonucleotide
  Sense strand starting at position 2976 of SEQ ID NO: 589050
aggugauucuccucgggcu

SEQ ID NO: 907597 - RNA, 19 nt, Artificial Sequence
  Description of Artificial Sequence: Synthetic oligonucleotide
  Antisense strand to SEQ ID NO: 907596
agcccgaggagaaucaccu

SEQ ID NO: 907598 - RNA, 19 nt, Artificial Sequence
  Description of Artificial Sequence: Synthetic oligonucleotide
  Sense strand starting at position 2977 of SEQ ID NO: 589050
ggugauucuccucgggcua

SEQ ID NO: 907599 - RNA, 19 nt, Artificial Sequence
  Description of Artificial Sequence: Synthetic oligonucleotide
  Antisense strand to SEQ ID NO: 907598
uagcccgaggagaaucacc

SEQ ID NO: 907600 - RNA, 19 nt, Artificial Sequence
  Description of Artificial Sequence: Synthetic oligonucleotide
  Sense strand starting at position 2978 of SEQ ID NO: 589050
gugauucuccucgggcuaa

SEQ ID NO: 907601 - RNA, 19 nt, Artificial Sequence
  Description of Artificial Sequence: Synthetic oligonucleotide
  Antisense strand to SEQ ID NO: 907600
uuagcccgaggagaaucac

SEQ ID NO: 907602 - RNA, 19 nt, Artificial Sequence
  Description of Artificial Sequence: Synthetic oligonucleotide
  Sense strand starting at position 3012 of SEQ ID NO: 589050
ucccuccaugcgugagaau

SEQ ID NO: 907603 - RNA, 19 nt, Artificial Sequence
  Description of Artificial Sequence: Synthetic oligonucleotide
  Antisense strand to SEQ ID NO: 907602
auucucacgcauggaggga

SEQ ID NO: 907604 - RNA, 19 nt, Artificial Sequence
  Description of Artificial Sequence: Synthetic oligonucleotide
  Sense strand starting at position 3021 of SEQ ID NO: 589050
gcgugagaaucagcugugu

SEQ ID NO: 907605 - RNA, 19 nt, Artificial Sequence
  Description of Artificial Sequence: Synthetic oligonucleotide
  Antisense strand to SEQ ID NO: 907604
acacagcugauucucacgc

SEQ ID NO: 907606 - RNA, 19 nt, Artificial Sequence
  Description of Artificial Sequence: Synthetic oligonucleotide
  Sense strand starting at position 3023 of SEQ ID NO: 589050
gugagaaucagcuguguuu

SEQ ID NO: 907607 - RNA, 19 nt, Artificial Sequence
  Description of Artificial Sequence: Synthetic oligonucleotide
  Antisense strand to SEQ ID NO: 907606
aaacacagcugauucucac

SEQ ID NO: 907608 - RNA, 19 nt, Artificial Sequence
  Description of Artificial Sequence: Synthetic oligonucleotide
  Sense strand starting at position 3026 of SEQ ID NO: 589050
agaaucagcuguguuugau

SEQ ID NO: 907609 - RNA, 19 nt, Artificial Sequence
  Description of Artificial Sequence: Synthetic oligonucleotide
  Antisense strand to SEQ ID NO: 907608
aucaaacacagcugauucu

SEQ ID NO: 907610 - RNA, 19 nt, Artificial Sequence
  Description of Artificial Sequence: Synthetic oligonucleotide
  Sense strand starting at position 3032 of SEQ ID NO: 589050
agcuguguuugauccaguu

SEQ ID NO: 907611 - RNA, 19 nt, Artificial Sequence
  Description of Artificial Sequence: Synthetic oligonucleotide
  Antisense strand to SEQ ID NO: 907610
aacuggaucaaacacagcu

SEQ ID NO: 907612 - RNA, 19 nt, Artificial Sequence
  Description of Artificial Sequence: Synthetic oligonucleotide
  Sense strand starting at position 3113 of SEQ ID NO: 589050
gccgucucccaagaacaua

SEQ ID NO: 907613 - RNA, 19 nt, Artificial Sequence
  Description of Artificial Sequence: Synthetic oligonucleotide
  Antisense strand to SEQ ID NO: 907612
uauguucuugggagacggc

SEQ ID NO: 907614 - RNA, 19 nt, Artificial Sequence
  Description of Artificial Sequence: Synthetic oligonucleotide
  Sense strand starting at position 3254 of SEQ ID NO: 589050
gcgagugcuuaccugauuu

SEQ ID NO: 907615 - RNA, 19 nt, Artificial Sequence
  Description of Artificial Sequence: Synthetic oligonucleotide
  Antisense strand to SEQ ID NO: 907614
aaaucagguaagcacucgc

SEQ ID NO: 907616 - RNA, 19 nt, Artificial Sequence
  Description of Artificial Sequence: Synthetic oligonucleotide
  Sense strand starting at position 3391 of SEQ ID NO: 589050
uuuaaaugacaguguguau

SEQ ID NO: 907617 - RNA, 19 nt, Artificial Sequence
  Description of Artificial Sequence: Synthetic oligonucleotide
  Antisense strand to SEQ ID NO: 907616
auacacacugucauuuaaa

SEQ ID NO: 907618 - RNA, 19 nt, Artificial Sequence
  Description of Artificial Sequence: Synthetic oligonucleotide
  Sense strand starting at position 3394 of SEQ ID NO: 589050
aaaugacaguguguaugaa

SEQ ID NO: 907619 - RNA, 19 nt, Artificial Sequence
  Description of Artificial Sequence: Synthetic oligonucleotide
  Antisense strand to SEQ ID NO: 907618
uucauacacacugucauuu

SEQ ID NO: 907620 - RNA, 19 nt, Artificial Sequence
  Description of Artificial Sequence: Synthetic oligonucleotide
  Sense strand starting at position 3395 of SEQ ID NO: 589050
aaugacaguguguaugaau

SEQ ID NO: 907621 - RNA, 19 nt, Artificial Sequence
  Description of Artificial Sequence: Synthetic oligonucleotide
  Antisense strand to SEQ ID NO: 907620
auucauacacacugucauu

SEQ ID NO: 907622 - RNA, 19 nt, Artificial Sequence
  Description of Artificial Sequence: Synthetic oligonucleotide
  Sense strand starting at position 3406 of SEQ ID NO: 589050
guaugaauguacuucuaaa

SEQ ID NO: 907623 - RNA, 19 nt, Artificial Sequence
  Description of Artificial Sequence: Synthetic oligonucleotide
  Antisense strand to SEQ ID NO: 907622
uuuagaaguacauucauac

SEQ ID NO: 907624 - RNA, 19 nt, Artificial Sequence
  Description of Artificial Sequence: Synthetic oligonucleotide
  Sense strand starting at position 3463 of SEQ ID NO: 589050
gaagaagauucugaaguuu

SEQ ID NO: 907625 - RNA, 19 nt, Artificial Sequence
  Description of Artificial Sequence: Synthetic oligonucleotide
  Antisense strand to SEQ ID NO: 907624
aaacuucagaaucuucuuc

SEQ ID NO: 907626 - RNA, 19 nt, Artificial Sequence
  Description of Artificial Sequence: Synthetic oligonucleotide
  Sense strand starting at position 3492 of SEQ ID NO: 589050
uccaauugauuacaagaag

SEQ ID NO: 907627 - RNA, 19 nt, Artificial Sequence
  Description of Artificial Sequence: Synthetic oligonucleotide
  Antisense strand to SEQ ID NO: 907626
cuucuuguaaucaauugga

SEQ ID NO: 907628 - RNA, 19 nt, Artificial Sequence
  Description of Artificial Sequence: Synthetic oligonucleotide
  Sense strand starting at position 3571 of SEQ ID NO: 589050
ugcaaagauuguuuauuag

SEQ ID NO: 907629 - RNA, 19 nt, Artificial Sequence
  Description of Artificial Sequence: Synthetic oligonucleotide
  Antisense strand to SEQ ID NO: 907628
cuaauaaacaaucuuugca

SEQ ID NO: 907630 - RNA, 19 nt, Artificial Sequence
  Description of Artificial Sequence: Synthetic oligonucleotide
  Sense strand starting at position 3837 of SEQ ID NO: 589050
cuuugaacuucccgcagau

SEQ ID NO: 907631 - RNA, 19 nt, Artificial Sequence
  Description of Artificial Sequence: Synthetic oligonucleotide
  Antisense strand to SEQ ID NO: 907630
aucugcgggaaguucaaag

SEQ ID NO: 907632 - RNA, 19 nt, Artificial Sequence
  Description of Artificial Sequence: Synthetic oligonucleotide
  Sense strand starting at position 3894 of SEQ ID NO: 589050
ucaagugaagcauggaguu

SEQ ID NO: 907633 - RNA, 19 nt, Artificial Sequence
  Description of Artificial Sequence: Synthetic oligonucleotide
  Antisense strand to SEQ ID NO: 907632
aacuccaugcuucacuuga

SEQ ID NO: 907634 - RNA, 19 nt, Artificial Sequence
  Description of Artificial Sequence: Synthetic oligonucleotide
  Sense strand starting at position 3934 of SEQ ID NO: 589050
ggaaucugaggaggcauau

SEQ ID NO: 907635 - RNA, 19 nt, Artificial Sequence
  Description of Artificial Sequence: Synthetic oligonucleotide
  Antisense strand to SEQ ID NO: 907634
auaugccuccucagauucc

SEQ ID NO: 907636 - RNA, 19 nt, Artificial Sequence
  Description of Artificial Sequence: Synthetic oligonucleotide
  Sense strand starting at position 3946 of SEQ ID NO: 589050
ggcauaugcaucuagaguu

SEQ ID NO: 907637 - RNA, 19 nt, Artificial Sequence
  Description of Artificial Sequence: Synthetic oligonucleotide
  Antisense strand to SEQ ID NO: 907636
aacucuagaugcauaugcc

SEQ ID NO: 907638 - RNA, 19 nt, Artificial Sequence
  Description of Artificial Sequence: Synthetic oligonucleotide
  Sense strand starting at position 38 of SEQ ID NO: 589051
uuccgaauaacuggucaga

SEQ ID NO: 907639 - RNA, 19 nt, Artificial Sequence
  Description of Artificial Sequence: Synthetic oligonucleotide
  Antisense strand to SEQ ID NO: 907638
ucugaccaguuauucggaa

SEQ ID NO: 907640 - RNA, 19 nt, Artificial Sequence
  Description of Artificial Sequence: Synthetic oligonucleotide
  Sense strand starting at position 40 of SEQ ID NO: 589051
ccgaauaacuggucagaga

SEQ ID NO: 907641 - RNA, 19 nt, Artificial Sequence
  Description of Artificial Sequence: Synthetic oligonucleotide
  Antisense strand to SEQ ID NO: 907640
ucucugaccaguuauucgg

SEQ ID NO: 907642 - RNA, 19 nt, Artificial Sequence
  Description of Artificial Sequence: Synthetic oligonucleotide
  Sense strand starting at position 74 of SEQ ID NO: 589051
uuacgauuugccuguuaug

SEQ ID NO: 907643 - RNA, 19 nt, Artificial Sequence
  Description of Artificial Sequence: Synthetic oligonucleotide
  Antisense strand to SEQ ID NO: 907642
cauaacaggcaaaucguaa

SEQ ID NO: 907644 - RNA, 19 nt, Artificial Sequence
  Description of Artificial Sequence: Synthetic oligonucleotide
  Sense strand starting at position 100 of SEQ ID NO: 589051
ugguaugaucaaugaugua

SEQ ID NO: 907645 - RNA, 19 nt, Artificial Sequence
  Description of Artificial Sequence: Synthetic oligonucleotide
  Antisense strand to SEQ ID NO: 907644
uacaucauugaucauacca

SEQ ID NO: 907646 - RNA, 19 nt, Artificial Sequence
  Description of Artificial Sequence: Synthetic oligonucleotide
  Sense strand starting at position 114 of SEQ ID NO: 589051
auguaaggugcugaguaaa

SEQ ID NO: 907647 - RNA, 19 nt, Artificial Sequence
  Description of Artificial Sequence: Synthetic oligonucleotide
  Antisense strand to SEQ ID NO: 907646
uuuacucagcaccuuacau

SEQ ID NO: 907648 - RNA, 19 nt, Artificial Sequence
  Description of Artificial Sequence: Synthetic oligonucleotide
  Sense strand starting at position 168 of SEQ ID NO: 589051
ugaaguauuaacuggguca

SEQ ID NO: 907649 - RNA, 19 nt, Artificial Sequence
  Description of Artificial Sequence: Synthetic oligonucleotide
  Antisense strand to SEQ ID NO: 907648
ugacccaguuaauacuuca

SEQ ID NO: 907650 - RNA, 19 nt, Artificial Sequence
  Description of Artificial Sequence: Synthetic oligonucleotide
  Sense strand starting at position 170 of SEQ ID NO: 589051
aaguauuaacugggucauc

SEQ ID NO: 907651 - RNA, 19 nt, Artificial Sequence
  Description of Artificial Sequence: Synthetic oligonucleotide
  Antisense strand to SEQ ID NO: 907650
gaugacccaguuaauacuu

SEQ ID NO: 907652 - RNA, 19 nt, Artificial Sequence
  Description of Artificial Sequence: Synthetic oligonucleotide
  Sense strand starting at position 185 of SEQ ID NO: 589051
cauccauggcacgaguuaa

SEQ ID NO: 907653 - RNA, 19 nt, Artificial Sequence
  Description of Artificial Sequence: Synthetic oligonucleotide
  Antisense strand to SEQ ID NO: 907652
uuaacucgugccauggaug

SEQ ID NO: 907654 - RNA, 19 nt, Artificial Sequence
  Description of Artificial Sequence: Synthetic oligonucleotide
  Sense strand starting at position 222 of SEQ ID NO: 589051
ugacaaaguuaugugugaa

SEQ ID NO: 907655 - RNA, 19 nt, Artificial Sequence
  Description of Artificial Sequence: Synthetic oligonucleotide
  Antisense strand to SEQ ID NO: 907654
uucacacauaacuuuguca

SEQ ID NO: 907656 - RNA, 19 nt, Artificial Sequence
  Description of Artificial Sequence: Synthetic oligonucleotide
  Sense strand starting at position 223 of SEQ ID NO: 589051
gacaaaguuaugugugaag

SEQ ID NO: 907657 - RNA, 19 nt, Artificial Sequence
  Description of Artificial Sequence: Synthetic oligonucleotide
  Antisense strand to SEQ ID NO: 907656
cuucacacauaacuuuguc

SEQ ID NO: 907658 - RNA, 19 nt, Artificial Sequence
  Description of Artificial Sequence: Synthetic oligonucleotide
  Sense strand starting at position 225 of SEQ ID NO: 589051
caaaguuaugugugaagga

SEQ ID NO: 907659 - RNA, 19 nt, Artificial Sequence
  Description of Artificial Sequence: Synthetic oligonucleotide
  Antisense strand to SEQ ID NO: 907658
uccuucacacauaacuuug

SEQ ID NO: 907660 - RNA, 19 nt, Artificial Sequence
  Description of Artificial Sequence: Synthetic oligonucleotide
  Sense strand starting at position 627 of SEQ ID NO: 589051
gaaugagauuaugaagaca

SEQ ID NO: 907661 - RNA, 19 nt, Artificial Sequence
  Description of Artificial Sequence: Synthetic oligonucleotide
  Antisense strand to SEQ ID NO: 907660
ugucuucauaaucucauuc

SEQ ID NO: 907662 - RNA, 19 nt, Artificial Sequence
  Description of Artificial Sequence: Synthetic oligonucleotide
  Sense strand starting at position 782 of SEQ ID NO: 589051
cuguuagucugauuucucu

SEQ ID NO: 907663 - RNA, 19 nt, Artificial Sequence
  Description of Artificial Sequence: Synthetic oligonucleotide
  Antisense strand to SEQ ID NO: 907662
agagaaaucagacuaacag

SEQ ID NO: 907664 - RNA, 19 nt, Artificial Sequence
  Description of Artificial Sequence: Synthetic oligonucleotide
  Sense strand starting at position 972 of SEQ ID NO: 589051
cugaaauaguaugauuucu

SEQ ID NO: 907665 - RNA, 19 nt, Artificial Sequence
  Description of Artificial Sequence: Synthetic oligonucleotide
  Antisense strand to SEQ ID NO: 907664
agaaaucauacuauuucag

SEQ ID NO: 907666 - RNA, 19 nt, Artificial Sequence
  Description of Artificial Sequence: Synthetic oligonucleotide
  Sense strand starting at position 983 of SEQ ID NO: 589051
ugauuucuguagucaguuc

SEQ ID NO: 907667 - RNA, 19 nt, Artificial Sequence
  Description of Artificial Sequence: Synthetic oligonucleotide
  Antisense strand to SEQ ID NO: 907666
gaacugacuacagaaauca

SEQ ID NO: 907668 - RNA, 19 nt, Artificial Sequence
  Description of Artificial Sequence: Synthetic oligonucleotide
  Sense strand starting at position 1087 of SEQ ID NO: 589051
cugaaaguuccauauguug

SEQ ID NO: 907669 - RNA, 19 nt, Artificial Sequence
  Description of Artificial Sequence: Synthetic oligonucleotide
  Antisense strand to SEQ ID NO: 907668
caacauauggaacuuucag

SEQ ID NO: 907670 - RNA, 19 nt, Artificial Sequence
  Description of Artificial Sequence: Synthetic oligonucleotide
  Sense strand starting at position 1113 of SEQ ID NO: 589051
cugggaacgaacuguaacu

SEQ ID NO: 907671 - RNA, 19 nt, Artificial Sequence
  Description of Artificial Sequence: Synthetic oligonucleotide
  Antisense strand to SEQ ID NO: 907670
aguuacaguucguucccag

SEQ ID NO: 907672 - RNA, 19 nt, Artificial Sequence
  Description of Artificial Sequence: Synthetic oligonucleotide
  Sense strand starting at position 1119 of SEQ ID NO: 589051
acgaacuguaacugacaga

SEQ ID NO: 907673 - RNA, 19 nt, Artificial Sequence
  Description of Artificial Sequence: Synthetic oligonucleotide
  Antisense strand to SEQ ID NO: 907672
ucugucaguuacaguucgu

SEQ ID NO: 907674 - RNA, 19 nt, Artificial Sequence
  Description of Artificial Sequence: Synthetic oligonucleotide
  Sense strand starting at position 1180 of SEQ ID NO: 589051
uuauuaugcccugagaguu

SEQ ID NO: 907675 - RNA, 19 nt, Artificial Sequence
  Description of Artificial Sequence: Synthetic oligonucleotide
  Antisense strand to SEQ ID NO: 907674
aacucucagggcauaauaa

SEQ ID NO: 907676 - RNA, 19 nt, Artificial Sequence
  Description of Artificial Sequence: Synthetic oligonucleotide
  Sense strand starting at position 2124 of SEQ ID NO: 589051
uacauuucccagcgugcaa

SEQ ID NO: 907677 - RNA, 19 nt, Artificial Sequence
  Description of Artificial Sequence: Synthetic oligonucleotide
  Antisense strand to SEQ ID NO: 907676
uugcacgcugggaaaugua

SEQ ID NO: 907678 - RNA, 19 nt, Artificial Sequence
  Description of Artificial Sequence: Synthetic oligonucleotide
  Sense strand starting at position 2282 of SEQ ID NO: 589051
cgggcauuaccagaagagu

SEQ ID NO: 907679 - RNA, 19 nt, Artificial Sequence
  Description of Artificial Sequence: Synthetic oligonucleotide
  Antisense strand to SEQ ID NO: 907678
acucuucugguaaugcccg

SEQ ID NO: 907680 - RNA, 19 nt, Artificial Sequence
  Description of Artificial Sequence: Synthetic oligonucleotide
  Sense strand starting at position 2285 of SEQ ID NO: 589051
gcauuaccagaagagucuu

SEQ ID NO: 907681 - RNA, 19 nt, Artificial Sequence
  Description of Artificial Sequence: Synthetic oligonucleotide
  Antisense strand to SEQ ID NO: 907680
aagacucuucugguaaugc

SEQ ID NO: 907682 - RNA, 19 nt, Artificial Sequence
  Description of Artificial Sequence: Synthetic oligonucleotide
  Sense strand starting at position 2375 of SEQ ID NO: 589051
gugggucauguucaaggaa

SEQ ID NO: 907683 - RNA, 19 nt, Artificial Sequence
  Description of Artificial Sequence: Synthetic oligonucleotide
  Antisense strand to SEQ ID NO: 907682
uuccuugaacaugacccac

SEQ ID NO: 907684 - RNA, 19 nt, Artificial Sequence
  Description of Artificial Sequence: Synthetic oligonucleotide
  Sense strand starting at position 2378 of SEQ ID NO: 589051
ggucauguucaaggaaagu

SEQ ID NO: 907685 - RNA, 19 nt, Artificial Sequence
  Description of Artificial Sequence: Synthetic oligonucleotide
  Antisense strand to SEQ ID NO: 907684
acuuuccuugaacaugacc

SEQ ID NO: 907686 - RNA, 19 nt, Artificial Sequence
  Description of Artificial Sequence: Synthetic oligonucleotide
  Sense strand starting at position 2424 of SEQ ID NO: 589051
uagaguguuacgccaucgu

SEQ ID NO: 907687 - RNA, 19 nt, Artificial Sequence
  Description of Artificial Sequence: Synthetic oligonucleotide
  Antisense strand to SEQ ID NO: 907686
acgauggcguaacacucua

SEQ ID NO: 907688 - RNA, 19 nt, Artificial Sequence
  Description of Artificial Sequence: Synthetic oligonucleotide
  Sense strand starting at position 2491 of SEQ ID NO: 589051
cgaguugagaagcacucau

SEQ ID NO: 907689 - RNA, 19 nt, Artificial Sequence
  Description of Artificial Sequence: Synthetic oligonucleotide
  Antisense strand to SEQ ID NO: 907688
augagugcuucucaacucg

SEQ ID NO: 907690 - RNA, 19 nt, Artificial Sequence
  Description of Artificial Sequence: Synthetic oligonucleotide
  Sense strand starting at position 2503 of SEQ ID NO: 589051
cacucauugagugguggga

SEQ ID NO: 907691 - RNA, 19 nt, Artificial Sequence
  Description of Artificial Sequence: Synthetic oligonucleotide
  Antisense strand to SEQ ID NO: 907690
ucccaccacucaaugagug

SEQ ID NO: 907692 - RNA, 19 nt, Artificial Sequence
  Description of Artificial Sequence: Synthetic oligonucleotide
  Sense strand starting at position 2805 of SEQ ID NO: 589051
acucuaagcgccuaggaua

SEQ ID NO: 907693 - RNA, 19 nt, Artificial Sequence
  Description of Artificial Sequence: Synthetic oligonucleotide
  Antisense strand to SEQ ID NO: 907692
uauccuaggcgcuuagagu

SEQ ID NO: 907694 - RNA, 19 nt, Artificial Sequence
  Description of Artificial Sequence: Synthetic oligonucleotide
  Sense strand starting at position 3026 of SEQ ID NO: 589051
uaauuugacuuagauagug

SEQ ID NO: 907695 - RNA, 19 nt, Artificial Sequence
  Description of Artificial Sequence: Synthetic oligonucleotide
  Antisense strand to SEQ ID NO: 907694
cacuaucuaagucaaauua

SEQ ID NO: 907696 - RNA, 19 nt, Artificial Sequence
  Description of Artificial Sequence: Synthetic oligonucleotide
  Sense strand starting at position 3034 of SEQ ID NO: 589051
cuuagauaguguuuaggaa

SEQ ID NO: 907697 - RNA, 19 nt, Artificial Sequence
  Description of Artificial Sequence: Synthetic oligonucleotide
  Antisense strand to SEQ ID NO: 907696
uuccuaaacacuaucuaag

SEQ ID NO: 907698 - RNA, 19 nt, Artificial Sequence
  Description of Artificial Sequence: Synthetic oligonucleotide
  Sense strand starting at position 3284 of SEQ ID NO: 589051
guaagaauacagugguuac

SEQ ID NO: 907699 - RNA, 19 nt, Artificial Sequence
  Description of Artificial Sequence: Synthetic oligonucleotide
  Antisense strand to SEQ ID NO: 907698
guaaccacuguauucuuac

SEQ ID NO: 907700 - RNA, 19 nt, Artificial Sequence
  Description of Artificial Sequence: Synthetic oligonucleotide
  Sense strand starting at position 3287 of SEQ ID NO: 589051
agaauacagugguuacuaa

SEQ ID NO: 907701 - RNA, 19 nt, Artificial Sequence
  Description of Artificial Sequence: Synthetic oligonucleotide
  Antisense strand to SEQ ID NO: 907700
uuaguaaccacuguauucu

SEQ ID NO: 907702 - RNA, 19 nt, Artificial Sequence
  Description of Artificial Sequence: Synthetic oligonucleotide
  Sense strand starting at position 3358 of SEQ ID NO: 589051
ugaacaaauguguaaugua

SEQ ID NO: 907703 - RNA, 19 nt, Artificial Sequence
  Description of Artificial Sequence: Synthetic oligonucleotide
  Antisense strand to SEQ ID NO: 907702
uacauuacacauuuguuca

SEQ ID NO: 907704 - RNA, 19 nt, Artificial Sequence
  Description of Artificial Sequence: Synthetic oligonucleotide
  Sense strand starting at position 3485 of SEQ ID NO: 589051
acuugauguugauuauuag

SEQ ID NO: 907705 - RNA, 19 nt, Artificial Sequence
  Description of Artificial Sequence: Synthetic oligonucleotide
  Antisense strand to SEQ ID NO: 907704
cuaauaaucaacaucaagu

SEQ ID NO: 907706 - RNA, 19 nt, Artificial Sequence
  Description of Artificial Sequence: Synthetic oligonucleotide
  Sense strand starting at position 3486 of SEQ ID NO: 589051
cuugauguugauuauuagu

SEQ ID NO: 907707 - RNA, 19 nt, Artificial Sequence
  Description of Artificial Sequence: Synthetic oligonucleotide
  Antisense strand to SEQ ID NO: 907706
acuaauaaucaacaucaag

SEQ ID NO: 907708 - RNA, 19 nt, Artificial Sequence
  Description of Artificial Sequence: Synthetic oligonucleotide
  Sense strand starting at position 3488 of SEQ ID NO: 589051
ugauguugauuauuaguca

SEQ ID NO: 907709 - RNA, 19 nt, Artificial Sequence
  Description of Artificial Sequence: Synthetic oligonucleotide
  Antisense strand to SEQ ID NO: 907708
ugacuaauaaucaacauca

SEQ ID NO: 907710 - RNA, 19 nt, Artificial Sequence
  Description of Artificial Sequence: Synthetic oligonucleotide
  Sense strand starting at position 3491 of SEQ ID NO: 589051
uguugauuauuagucaaga

SEQ ID NO: 907711 - RNA, 19 nt, Artificial Sequence
  Description of Artificial Sequence: Synthetic oligonucleotide
  Antisense strand to SEQ ID NO: 907710
ucuugacuaauaaucaaca

SEQ ID NO: 907712 - RNA, 19 nt, Artificial Sequence
  Description of Artificial Sequence: Synthetic oligonucleotide
  Sense strand starting at position 3492 of SEQ ID NO: 589051
guugauuauuagucaagau

SEQ ID NO: 907713 - RNA, 19 nt, Artificial Sequence
  Description of Artificial Sequence: Synthetic oligonucleotide
  Antisense strand to SEQ ID NO: 907712
aucuugacuaauaaucaac

SEQ ID NO: 907714 - RNA, 19 nt, Artificial Sequence
  Description of Artificial Sequence: Synthetic oligonucleotide
  Sense strand starting at position 3564 of SEQ ID NO: 589051
aggaguucucacuauguug

SEQ ID NO: 907715 - RNA, 19 nt, Artificial Sequence
  Description of Artificial Sequence: Synthetic oligonucleotide
  Antisense strand to SEQ ID NO: 907714
caacauagugagaacuccu

SEQ ID NO: 907716 - RNA, 19 nt, Artificial Sequence
  Description of Artificial Sequence: Synthetic oligonucleotide
  Sense strand starting at position 3776 of SEQ ID NO: 589051
acauuagaucucuggaacu

SEQ ID NO: 907717 - RNA, 19 nt, Artificial Sequence
  Description of Artificial Sequence: Synthetic oligonucleotide
  Antisense strand to SEQ ID NO: 907716
aguuccagagaucuaaugu

SEQ ID NO: 907718 - RNA, 19 nt, Artificial Sequence
  Description of Artificial Sequence: Synthetic oligonucleotide
  Sense strand starting at position 34 of SEQ ID NO: 589052
guuucaagagcugaagugu

SEQ ID NO: 907719 - RNA, 19 nt, Artificial Sequence
  Description of Artificial Sequence: Synthetic oligonucleotide
  Antisense strand to SEQ ID NO: 907718
acacuucagcucuugaaac

SEQ ID NO: 907720 - RNA, 19 nt, Artificial Sequence
  Description of Artificial Sequence: Synthetic oligonucleotide
  Sense strand starting at position 194 of SEQ ID NO: 589052
acauuaugugcugauacag

SEQ ID NO: 907721 - RNA, 19 nt, Artificial Sequence
  Description of Artificial Sequence: Synthetic oligonucleotide
  Antisense strand to SEQ ID NO: 907720
cuguaucagcacauaaugu

SEQ ID NO: 907722 - RNA, 19 nt, Artificial Sequence
  Description of Artificial Sequence: Synthetic oligonucleotide
  Sense strand starting at position 211 of SEQ ID NO: 589052
agaugcaguuauccacuau

SEQ ID NO: 907723 - RNA, 19 nt, Artificial Sequence
  Description of Artificial Sequence: Synthetic oligonucleotide
  Antisense strand to SEQ ID NO: 907722
auaguggauaacugcaucu

SEQ ID NO: 907724 - RNA, 19 nt, Artificial Sequence
  Description of Artificial Sequence: Synthetic oligonucleotide
  Sense strand starting at position 215 of SEQ ID NO: 589052
gcaguuauccacuauguga

SEQ ID NO: 907725 - RNA, 19 nt, Artificial Sequence
  Description of Artificial Sequence: Synthetic oligonucleotide
  Antisense strand to SEQ ID NO: 907724
ucacauaguggauaacugc

SEQ ID NO: 907726 - RNA, 19 nt, Artificial Sequence
  Description of Artificial Sequence: Synthetic oligonucleotide
  Sense strand starting at position 217 of SEQ ID NO: 589052
aguuauccacuaugugauu

SEQ ID NO: 907727 - RNA, 19 nt, Artificial Sequence
  Description of Artificial Sequence: Synthetic oligonucleotide
  Antisense strand to SEQ ID NO: 907726
aaucacauaguggauaacu

SEQ ID NO: 907728 - RNA, 19 nt, Artificial Sequence
  Description of Artificial Sequence: Synthetic oligonucleotide
  Sense strand starting at position 230 of SEQ ID NO: 589052
gugauuuacuuguuaucuc

SEQ ID NO: 907729 - RNA, 19 nt, Artificial Sequence
  Description of Artificial Sequence: Synthetic oligonucleotide
  Antisense strand to SEQ ID NO: 907728
gagauaacaaguaaaucac

SEQ ID NO: 907730 - RNA, 19 nt, Artificial Sequence
  Description of Artificial Sequence: Synthetic oligonucleotide
  Sense strand starting at position 231 of SEQ ID NO: 589052
ugauuuacuuguuaucucu

SEQ ID NO: 907731 - RNA, 19 nt, Artificial Sequence
  Description of Artificial Sequence: Synthetic oligonucleotide
  Antisense strand to SEQ ID NO: 907730
agagauaacaaguaaauca

SEQ ID NO: 907732 - RNA, 19 nt, Artificial Sequence
  Description of Artificial Sequence: Synthetic oligonucleotide
  Sense strand starting at position 384 of SEQ ID NO: 589052
gucauauagucuucuagau

SEQ ID NO: 907733 - RNA, 19 nt, Artificial Sequence
  Description of Artificial Sequence: Synthetic oligonucleotide
  Antisense strand to SEQ ID NO: 907732
aucuagaagacuauaugac

SEQ ID NO: 907734 - RNA, 19 nt, Artificial Sequence
  Description of Artificial Sequence: Synthetic oligonucleotide
  Sense strand starting at position 427 of SEQ ID NO: 589052
gcuuacagucuacagaguu

SEQ ID NO: 907735 - RNA, 19 nt, Artificial Sequence
  Description of Artificial Sequence: Synthetic oligonucleotide
  Antisense strand to SEQ ID NO: 907734
aacucuguagacuguaagc

SEQ ID NO: 907736 - RNA, 19 nt, Artificial Sequence
  Description of Artificial Sequence: Synthetic oligonucleotide
  Sense strand starting at position 446 of SEQ ID NO: 589052
caguauaagucagcagaaa

SEQ ID NO: 907737 - RNA, 19 nt, Artificial Sequence
  Description of Artificial Sequence: Synthetic oligonucleotide
  Antisense strand to SEQ ID NO: 907736
uuucugcugacuuauacug

SEQ ID NO: 907738 - RNA, 19 nt, Artificial Sequence
  Description of Artificial Sequence: Synthetic oligonucleotide
  Sense strand starting at position 630 of SEQ ID NO: 589052
gcuuuaagcagucggagac

SEQ ID NO: 907739 - RNA, 19 nt, Artificial Sequence
  Description of Artificial Sequence: Synthetic oligonucleotide
  Antisense strand to SEQ ID NO: 907738
gucuccgacugcuuaaagc

SEQ ID NO: 907740 - RNA, 19 nt, Artificial Sequence
  Description of Artificial Sequence: Synthetic oligonucleotide
  Sense strand starting at position 699 of SEQ ID NO: 589052
aguaguaugcuggauaaau

SEQ ID NO: 907741 - RNA, 19 nt, Artificial Sequence
  Description of Artificial Sequence: Synthetic oligonucleotide
  Antisense strand to SEQ ID NO: 907740
auuuauccagcauacuacu

SEQ ID NO: 907742 - RNA, 19 nt, Artificial Sequence
  Description of Artificial Sequence: Synthetic oligonucleotide
  Sense strand starting at position 812 of SEQ ID NO: 589052
gagggcgaucugcaguaau

SEQ ID NO: 907743 - RNA, 19 nt, Artificial Sequence
  Description of Artificial Sequence: Synthetic oligonucleotide
  Antisense strand to SEQ ID NO: 907742
auuacugcagaucgcccuc

SEQ ID NO: 907744 - RNA, 19 nt, Artificial Sequence
  Description of Artificial Sequence: Synthetic oligonucleotide
  Sense strand starting at position 815 of SEQ ID NO: 589052
ggcgaucugcaguaaugga

SEQ ID NO: 907745 - RNA, 19 nt, Artificial Sequence
  Description of Artificial Sequence: Synthetic oligonucleotide
  Antisense strand to SEQ ID NO: 907744
uccauuacugcagaucgcc

SEQ ID NO: 907746 - RNA, 19 nt, Artificial Sequence
  Description of Artificial Sequence: Synthetic oligonucleotide
  Sense strand starting at position 1081 of SEQ ID NO: 589052
gcggcagugacgucagcau

SEQ ID NO: 907747 - RNA, 19 nt, Artificial Sequence
  Description of Artificial Sequence: Synthetic oligonucleotide
  Antisense strand to SEQ ID NO: 907746
augcugacgucacugccgc

SEQ ID NO: 907748 - RNA, 19 nt, Artificial Sequence
  Description of Artificial Sequence: Synthetic oligonucleotide
  Sense strand starting at position 1757 of SEQ ID NO: 589052
gacugacguuucccggaau

SEQ ID NO: 907749 - RNA, 19 nt, Artificial Sequence
  Description of Artificial Sequence: Synthetic oligonucleotide
  Antisense strand to SEQ ID NO: 907748
auuccgggaaacgucaguc

SEQ ID NO: 907750 - RNA, 19 nt, Artificial Sequence
  Description of Artificial Sequence: Synthetic oligonucleotide
  Sense strand starting at position 1760 of SEQ ID NO: 589052
ugacguuucccggaauccu

SEQ ID NO: 907751 - RNA, 19 nt, Artificial Sequence
  Description of Artificial Sequence: Synthetic oligonucleotide
  Antisense strand to SEQ ID NO: 907750
aggauuccgggaaacguca

SEQ ID NO: 907752 - RNA, 19 nt, Artificial Sequence
  Description of Artificial Sequence: Synthetic oligonucleotide
  Sense strand starting at position 2564 of SEQ ID NO: 589052
gcgugccugguuucuuaau

SEQ ID NO: 907753 - RNA, 19 nt, Artificial Sequence
  Description of Artificial Sequence: Synthetic oligonucleotide
  Antisense strand to SEQ ID NO: 907752
auuaagaaaccaggcacgc

SEQ ID NO: 907754 - RNA, 19 nt, Artificial Sequence
  Description of Artificial Sequence: Synthetic oligonucleotide
  Sense strand starting at position 2570 of SEQ ID NO: 589052
cugguuucuuaaucgaguu

SEQ ID NO: 907755 - RNA, 19 nt, Artificial Sequence
  Description of Artificial Sequence: Synthetic oligonucleotide
  Antisense strand to SEQ ID NO: 907754
aacucgauuaagaaaccag

SEQ ID NO: 907756 - RNA, 19 nt, Artificial Sequence
  Description of Artificial Sequence: Synthetic oligonucleotide
  Sense strand starting at position 2571 of SEQ ID NO: 589052
ugguuucuuaaucgaguuc

SEQ ID NO: 907757 - RNA, 19 nt, Artificial Sequence
  Description of Artificial Sequence: Synthetic oligonucleotide
  Antisense strand to SEQ ID NO: 907756
gaacucgauuaagaaacca

SEQ ID NO: 907758 - RNA, 19 nt, Artificial Sequence
  Description of Artificial Sequence: Synthetic oligonucleotide
  Sense strand starting at position 3158 of SEQ ID NO: 589052
augaauauccauugguuaa

SEQ ID NO: 907759 - RNA, 19 nt, Artificial Sequence
  Description of Artificial Sequence: Synthetic oligonucleotide
  Antisense strand to SEQ ID NO: 907758
uuaaccaauggauauucau

SEQ ID NO: 907760 - RNA, 19 nt, Artificial Sequence
  Description of Artificial Sequence: Synthetic oligonucleotide
  Sense strand starting at position 3169 of SEQ ID NO: 589052
uugguuaaggguuaggauu

SEQ ID NO: 907761 - RNA, 19 nt, Artificial Sequence
  Description of Artificial Sequence: Synthetic oligonucleotide
  Antisense strand to SEQ ID NO: 907760
aauccuaacccuuaaccaa

SEQ ID NO: 907762 - RNA, 19 nt, Artificial Sequence
  Description of Artificial Sequence: Synthetic oligonucleotide
  Sense strand starting at position 3175 of SEQ ID NO: 589052
aaggguuaggauugguaau

SEQ ID NO: 907763 - RNA, 19 nt, Artificial Sequence
  Description of Artificial Sequence: Synthetic oligonucleotide
  Antisense strand to SEQ ID NO: 907762
auuaccaauccuaacccuu

SEQ ID NO: 907764 - RNA, 19 nt, Artificial Sequence
  Description of Artificial Sequence: Synthetic oligonucleotide
  Sense strand starting at position 3176 of SEQ ID NO: 589052
aggguuaggauugguaauu

SEQ ID NO: 907765 - RNA, 19 nt, Artificial Sequence
  Description of Artificial Sequence: Synthetic oligonucleotide
  Antisense strand to SEQ ID NO: 907764
aauuaccaauccuaacccu

SEQ ID NO: 907766 - RNA, 19 nt, Artificial Sequence
  Description of Artificial Sequence: Synthetic oligonucleotide
  Sense strand starting at position 3177 of SEQ ID NO: 589052
ggguuaggauugguaauua

SEQ ID NO: 907767 - RNA, 19 nt, Artificial Sequence
  Description of Artificial Sequence: Synthetic oligonucleotide
  Antisense strand to SEQ ID NO: 907766
uaauuaccaauccuaaccc

SEQ ID NO: 907768 - RNA, 19 nt, Artificial Sequence
  Description of Artificial Sequence: Synthetic oligonucleotide
  Sense strand starting at position 3181 of SEQ ID NO: 589052
uaggauugguaauuaaguu

SEQ ID NO: 907769 - RNA, 19 nt, Artificial Sequence
  Description of Artificial Sequence: Synthetic oligonucleotide
  Antisense strand to SEQ ID NO: 907768
aacuuaauuaccaauccua

SEQ ID NO: 907770 - RNA, 19 nt, Artificial Sequence
  Description of Artificial Sequence: Synthetic oligonucleotide
  Sense strand starting at position 3198 of SEQ ID NO: 589052
uuagaacacgacuguauaa

SEQ ID NO: 907771 - RNA, 19 nt, Artificial Sequence
  Description of Artificial Sequence: Synthetic oligonucleotide
  Antisense strand to SEQ ID NO: 907770
uuauacagucguguucuaa

SEQ ID NO: 907772 - RNA, 19 nt, Artificial Sequence
  Description of Artificial Sequence: Synthetic oligonucleotide
  Sense strand starting at position 3205 of SEQ ID NO: 589052
acgacuguauaauaacaga

SEQ ID NO: 907773 - RNA, 19 nt, Artificial Sequence
  Description of Artificial Sequence: Synthetic oligonucleotide
  Antisense strand to SEQ ID NO: 907772
ucuguuauuauacagucgu

SEQ ID NO: 907774 - RNA, 19 nt, Artificial Sequence
  Description of Artificial Sequence: Synthetic oligonucleotide
  Sense strand starting at position 3484 of SEQ ID NO: 589052
gaaauuguguggcugggaa

SEQ ID NO: 907775 - RNA, 19 nt, Artificial Sequence
  Description of Artificial Sequence: Synthetic oligonucleotide
  Antisense strand to SEQ ID NO: 907774
uucccagccacacaauuuc

SEQ ID NO: 907776 - RNA, 19 nt, Artificial Sequence
  Description of Artificial Sequence: Synthetic oligonucleotide
  Sense strand starting at position 3486 of SEQ ID NO: 589052
aauuguguggcugggaaca

SEQ ID NO: 907777 - RNA, 19 nt, Artificial Sequence
  Description of Artificial Sequence: Synthetic oligonucleotide
  Antisense strand to SEQ ID NO: 907776
uguucccagccacacaauu

SEQ ID NO: 907778 - RNA, 19 nt, Artificial Sequence
  Description of Artificial Sequence: Synthetic oligonucleotide
  Sense strand starting at position 3684 of SEQ ID NO: 589052
acaauuggguaaggaagau

SEQ ID NO: 907779 - RNA, 19 nt, Artificial Sequence
  Description of Artificial Sequence: Synthetic oligonucleotide
  Antisense strand to SEQ ID NO: 907778
aucuuccuuacccaauugu

SEQ ID NO: 907780 - RNA, 19 nt, Artificial Sequence
  Description of Artificial Sequence: Synthetic oligonucleotide
  Sense strand starting at position 3727 of SEQ ID NO: 589052
aaaguugaggcuuguacaa

SEQ ID NO: 907781 - RNA, 19 nt, Artificial Sequence
  Description of Artificial Sequence: Synthetic oligonucleotide
  Antisense strand to SEQ ID NO: 907780
uuguacaagccucaacuuu

SEQ ID NO: 907782 - RNA, 19 nt, Artificial Sequence
  Description of Artificial Sequence: Synthetic oligonucleotide
  Sense strand starting at position 3734 of SEQ ID NO: 589052
aggcuuguacaagauuaca

SEQ ID NO: 907783 - RNA, 19 nt, Artificial Sequence
  Description of Artificial Sequence: Synthetic oligonucleotide
  Antisense strand to SEQ ID NO: 907782
uguaaucuuguacaagccu

SEQ ID NO: 907784 - RNA, 19 nt, Artificial Sequence
  Description of Artificial Sequence: Synthetic oligonucleotide
  Sense strand starting at position 3755 of SEQ ID NO: 589052
auaaauccuuuggaagaau

SEQ ID NO: 907785 - RNA, 19 nt, Artificial Sequence
  Description of Artificial Sequence: Synthetic oligonucleotide
  Antisense strand to SEQ ID NO: 907784
auucuuccaaaggauuuau

SEQ ID NO: 907786 - RNA, 19 nt, Artificial Sequence
  Description of Artificial Sequence: Synthetic oligonucleotide
  Sense strand starting at position 3767 of SEQ ID NO: 589052
gaagaauaagucuguacug

SEQ ID NO: 907787 - RNA, 19 nt, Artificial Sequence
  Description of Artificial Sequence: Synthetic oligonucleotide
  Antisense strand to SEQ ID NO: 907786
caguacagacuuauucuuc

SEQ ID NO: 907788 - RNA, 19 nt, Artificial Sequence
  Description of Artificial Sequence: Synthetic oligonucleotide
  Sense strand starting at position 3778 of SEQ ID NO: 589052
cuguacugccuguggauua

SEQ ID NO: 907789 - RNA, 19 nt, Artificial Sequence
  Description of Artificial Sequence: Synthetic oligonucleotide
  Antisense strand to SEQ ID NO: 907788
uaauccacaggcaguacag

SEQ ID NO: 907790 - RNA, 19 nt, Artificial Sequence
  Description of Artificial Sequence: Synthetic oligonucleotide
  Sense strand starting at position 3855 of SEQ ID NO: 589052
cucggucccguuucucaua

SEQ ID NO: 907791 - RNA, 19 nt, Artificial Sequence
  Description of Artificial Sequence: Synthetic oligonucleotide
  Antisense strand to SEQ ID NO: 907790
uaugagaaacgggaccgag

SEQ ID NO: 907792 - RNA, 19 nt, Artificial Sequence
  Description of Artificial Sequence: Synthetic oligonucleotide
  Sense strand starting at position 3908 of SEQ ID NO: 589052
uauuguaaugguugaucua

SEQ ID NO: 907793 - RNA, 19 nt, Artificial Sequence
  Description of Artificial Sequence: Synthetic oligonucleotide
  Antisense strand to SEQ ID NO: 907792
uagaucaaccauuacaaua

SEQ ID NO: 907794 - RNA, 19 nt, Artificial Sequence
  Description of Artificial Sequence: Synthetic oligonucleotide
  Sense strand starting at position 3909 of SEQ ID NO: 589052
auuguaaugguugaucuag

SEQ ID NO: 907795 - RNA, 19 nt, Artificial Sequence
  Description of Artificial Sequence: Synthetic oligonucleotide
  Antisense strand to SEQ ID NO: 907794
cuagaucaaccauuacaau

SEQ ID NO: 907796 - RNA, 19 nt, Artificial Sequence
  Description of Artificial Sequence: Synthetic oligonucleotide
  Sense strand starting at position 3911 of SEQ ID NO: 589052
uguaaugguugaucuagaa

SEQ ID NO: 907797 - RNA, 19 nt, Artificial Sequence
  Description of Artificial Sequence: Synthetic oligonucleotide
  Antisense strand to SEQ ID NO: 907796
uucuagaucaaccauuaca

SEQ ID NO: 907798 - RNA, 19 nt, Artificial Sequence
  Description of Artificial Sequence: Synthetic oligonucleotide
  Sense strand starting at position 388 of SEQ ID NO: 589054
aggaaacaguugcuuuaga

SEQ ID NO: 907799 - RNA, 19 nt, Artificial Sequence
  Description of Artificial Sequence: Synthetic oligonucleotide
  Antisense strand to SEQ ID NO: 907798
ucuaaagcaacuguuuccu

SEQ ID NO: 907800 - RNA, 19 nt, Artificial Sequence
  Description of Artificial Sequence: Synthetic oligonucleotide
  Sense strand starting at position 389 of SEQ ID NO: 589054
ggaaacaguugcuuuagau

SEQ ID NO: 907801 - RNA, 19 nt, Artificial Sequence
  Description of Artificial Sequence: Synthetic oligonucleotide
  Antisense strand to SEQ ID NO: 907800
aucuaaagcaacuguuucc

SEQ ID NO: 907802 - RNA, 19 nt, Artificial Sequence
  Description of Artificial Sequence: Synthetic oligonucleotide
  Sense strand starting at position 396 of SEQ ID NO: 589054
guugcuuuagauugaauac

SEQ ID NO: 907803 - RNA, 19 nt, Artificial Sequence
  Description of Artificial Sequence: Synthetic oligonucleotide
  Antisense strand to SEQ ID NO: 907802
guauucaaucuaaagcaac

SEQ ID NO: 907804 - RNA, 19 nt, Artificial Sequence
  Description of Artificial Sequence: Synthetic oligonucleotide
  Sense strand starting at position 642 of SEQ ID NO: 589054
uucugaaacugccuaagua

SEQ ID NO: 907805 - RNA, 19 nt, Artificial Sequence
  Description of Artificial Sequence: Synthetic oligonucleotide
  Antisense strand to SEQ ID NO: 907804
uacuuaggcaguuucagaa

SEQ ID NO: 907806 - RNA, 19 nt, Artificial Sequence
  Description of Artificial Sequence: Synthetic oligonucleotide
  Sense strand starting at position 765 of SEQ ID NO: 589054
acugucucucgauaaaguu

SEQ ID NO: 907807 - RNA, 19 nt, Artificial Sequence
  Description of Artificial Sequence: Synthetic oligonucleotide
  Antisense strand to SEQ ID NO: 907806
aacuuuaucgagagacagu

SEQ ID NO: 907808 - RNA, 19 nt, Artificial Sequence
  Description of Artificial Sequence: Synthetic oligonucleotide
  Sense strand starting at position 793 of SEQ ID NO: 589054
ggaccauggcauugugauc

SEQ ID NO: 907809 - RNA, 19 nt, Artificial Sequence
  Description of Artificial Sequence: Synthetic oligonucleotide
  Antisense strand to SEQ ID NO: 907808
gaucacaaugccauggucc

SEQ ID NO: 907810 - RNA, 19 nt, Artificial Sequence
  Description of Artificial Sequence: Synthetic oligonucleotide
  Sense strand starting at position 798 of SEQ ID NO: 589054
auggcauugugaucuagag

SEQ ID NO: 907811 - RNA, 19 nt, Artificial Sequence
  Description of Artificial Sequence: Synthetic oligonucleotide
  Antisense strand to SEQ ID NO: 907810
cucuagaucacaaugccau

SEQ ID NO: 907812 - RNA, 19 nt, Artificial Sequence
  Description of Artificial Sequence: Synthetic oligonucleotide
  Sense strand starting at position 800 of SEQ ID NO: 589054
ggcauugugaucuagagac

SEQ ID NO: 907813 - RNA, 19 nt, Artificial Sequence
  Description of Artificial Sequence: Synthetic oligonucleotide
  Antisense strand to SEQ ID NO: 907812
gucucuagaucacaaugcc

SEQ ID NO: 907814 - RNA, 19 nt, Artificial Sequence
  Description of Artificial Sequence: Synthetic oligonucleotide
  Sense strand starting at position 812 of SEQ ID NO: 589054
uagagacacugucugauga

SEQ ID NO: 907815 - RNA, 19 nt, Artificial Sequence
  Description of Artificial Sequence: Synthetic oligonucleotide
  Antisense strand to SEQ ID NO: 907814
ucaucagacagugucucua

SEQ ID NO: 907816 - RNA, 19 nt, Artificial Sequence
  Description of Artificial Sequence: Synthetic oligonucleotide
  Sense strand starting at position 1083 of SEQ ID NO: 589054
ucauucuauaagugacgga

SEQ ID NO: 907817 - RNA, 19 nt, Artificial Sequence
  Description of Artificial Sequence: Synthetic oligonucleotide
  Antisense strand to SEQ ID NO: 907816
uccgucacuuauagaauga

SEQ ID NO: 907818 - RNA, 19 nt, Artificial Sequence
  Description of Artificial Sequence: Synthetic oligonucleotide
  Sense strand starting at position 1087 of SEQ ID NO: 589054
ucuauaagugacggagcaa

SEQ ID NO: 907819 - RNA, 19 nt, Artificial Sequence
  Description of Artificial Sequence: Synthetic oligonucleotide
  Antisense strand to SEQ ID NO: 907818
uugcuccgucacuuauaga

SEQ ID NO: 907820 - RNA, 19 nt, Artificial Sequence
  Description of Artificial Sequence: Synthetic oligonucleotide
  Sense strand starting at position 1315 of SEQ ID NO: 589054
gcagcaugacgucauuuau

SEQ ID NO: 907821 - RNA, 19 nt, Artificial Sequence
  Description of Artificial Sequence: Synthetic oligonucleotide
  Antisense strand to SEQ ID NO: 907820
auaaaugacgucaugcugc

SEQ ID NO: 907822 - RNA, 19 nt, Artificial Sequence
  Description of Artificial Sequence: Synthetic oligonucleotide
  Sense strand starting at position 1325 of SEQ ID NO: 589054
gucauuuauuccucugcca

SEQ ID NO: 907823 - RNA, 19 nt, Artificial Sequence
  Description of Artificial Sequence: Synthetic oligonucleotide
  Antisense strand to SEQ ID NO: 907822
uggcagaggaauaaaugac

SEQ ID NO: 907824 - RNA, 19 nt, Artificial Sequence
  Description of Artificial Sequence: Synthetic oligonucleotide
  Sense strand starting at position 1578 of SEQ ID NO: 589054
uguuaucuaacgggcagaa

SEQ ID NO: 907825 - RNA, 19 nt, Artificial Sequence
  Description of Artificial Sequence: Synthetic oligonucleotide
  Antisense strand to SEQ ID NO: 907824
uucugcccguuagauaaca

SEQ ID NO: 907826 - RNA, 19 nt, Artificial Sequence
  Description of Artificial Sequence: Synthetic oligonucleotide
  Sense strand starting at position 2049 of SEQ ID NO: 589054
gaaaguccgcgcuuuccau

SEQ ID NO: 907827 - RNA, 19 nt, Artificial Sequence
  Description of Artificial Sequence: Synthetic oligonucleotide
  Antisense strand to SEQ ID NO: 907826
auggaaagcgcggacuuuc

SEQ ID NO: 907828 - RNA, 19 nt, Artificial Sequence
  Description of Artificial Sequence: Synthetic oligonucleotide
  Sense strand starting at position 2146 of SEQ ID NO: 589054
ggcucagaggccuagaauc

SEQ ID NO: 907829 - RNA, 19 nt, Artificial Sequence
  Description of Artificial Sequence: Synthetic oligonucleotide
  Antisense strand to SEQ ID NO: 907828
gauucuaggccucugagcc

SEQ ID NO: 907830 - RNA, 19 nt, Artificial Sequence
  Description of Artificial Sequence: Synthetic oligonucleotide
  Sense strand starting at position 2152 of SEQ ID NO: 589054
gaggccuagaaucguauga

SEQ ID NO: 907831 - RNA, 19 nt, Artificial Sequence
  Description of Artificial Sequence: Synthetic oligonucleotide
  Antisense strand to SEQ ID NO: 907830
ucauacgauucuaggccuc

SEQ ID NO: 907832 - RNA, 19 nt, Artificial Sequence
  Description of Artificial Sequence: Synthetic oligonucleotide
  Sense strand starting at position 2195 of SEQ ID NO: 589054
ucuguuuaguaaccucaga

SEQ ID NO: 907833 - RNA, 19 nt, Artificial Sequence
  Description of Artificial Sequence: Synthetic oligonucleotide
  Antisense strand to SEQ ID NO: 907832
ucugagguuacuaaacaga

SEQ ID NO: 907834 - RNA, 19 nt, Artificial Sequence
  Description of Artificial Sequence: Synthetic oligonucleotide
  Sense strand starting at position 2279 of SEQ ID NO: 589054
gcauauuaccgaugcauuu

SEQ ID NO: 907835 - RNA, 19 nt, Artificial Sequence
  Description of Artificial Sequence: Synthetic oligonucleotide
  Antisense strand to SEQ ID NO: 907834
aaaugcaucgguaauaugc

SEQ ID NO: 907836 - RNA, 19 nt, Artificial Sequence
  Description of Artificial Sequence: Synthetic oligonucleotide
  Sense strand starting at position 2315 of SEQ ID NO: 589054
augccacaacuugaguuaa

SEQ ID NO: 907837 - RNA, 19 nt, Artificial Sequence
  Description of Artificial Sequence: Synthetic oligonucleotide
  Antisense strand to SEQ ID NO: 907836
uuaacucaaguuguggcau

SEQ ID NO: 907838 - RNA, 19 nt, Artificial Sequence
  Description of Artificial Sequence: Synthetic oligonucleotide
  Sense strand starting at position 2317 of SEQ ID NO: 589054
gccacaacuugaguuaaac

SEQ ID NO: 907839 - RNA, 19 nt, Artificial Sequence
  Description of Artificial Sequence: Synthetic oligonucleotide
  Antisense strand to SEQ ID NO: 907838
guuuaacucaaguuguggc

SEQ ID NO: 907840 - RNA, 19 nt, Artificial Sequence
  Description of Artificial Sequence: Synthetic oligonucleotide
  Sense strand starting at position 2387 of SEQ ID NO: 589054
cauggcucaccuggauuau

SEQ ID NO: 907841 - RNA, 19 nt, Artificial Sequence
  Description of Artificial Sequence: Synthetic oligonucleotide
  Antisense strand to SEQ ID NO: 907840
auaauccaggugagccaug

SEQ ID NO: 907842 - RNA, 19 nt, Artificial Sequence
  Description of Artificial Sequence: Synthetic oligonucleotide
  Sense strand starting at position 2388 of SEQ ID NO: 589054
auggcucaccuggauuauu

SEQ ID NO: 907843 - RNA, 19 nt, Artificial Sequence
  Description of Artificial Sequence: Synthetic oligonucleotide
  Antisense strand to SEQ ID NO: 907842
aauaauccaggugagccau

SEQ ID NO: 907844 - RNA, 19 nt, Artificial Sequence
  Description of Artificial Sequence: Synthetic oligonucleotide
  Sense strand starting at position 2507 of SEQ ID NO: 589054
cugcaaugguuucccauuu

SEQ ID NO: 907845 - RNA, 19 nt, Artificial Sequence
  Description of Artificial Sequence: Synthetic oligonucleotide
  Antisense strand to SEQ ID NO: 907844
aaaugggaaaccauugcag

SEQ ID NO: 907846 - RNA, 19 nt, Artificial Sequence
  Description of Artificial Sequence: Synthetic oligonucleotide
  Sense strand starting at position 2547 of SEQ ID NO: 589054
ucuuuauaguggccuacaa

SEQ ID NO: 907847 - RNA, 19 nt, Artificial Sequence
  Description of Artificial Sequence: Synthetic oligonucleotide
  Antisense strand to SEQ ID NO: 907846
uuguaggccacuauaaaga

SEQ ID NO: 907848 - RNA, 19 nt, Artificial Sequence
  Description of Artificial Sequence: Synthetic oligonucleotide
  Sense strand starting at position 2724 of SEQ ID NO: 589054
aggucuucucaaugaagcu

SEQ ID NO: 907849 - RNA, 19 nt, Artificial Sequence
  Description of Artificial Sequence: Synthetic oligonucleotide
  Antisense strand to SEQ ID NO: 907848
agcuucauugagaagaccu

SEQ ID NO: 907850 - RNA, 19 nt, Artificial Sequence
  Description of Artificial Sequence: Synthetic oligonucleotide
  Sense strand starting at position 2840 of SEQ ID NO: 589054
cgccuucuccaguagaaua

SEQ ID NO: 907851 - RNA, 19 nt, Artificial Sequence
  Description of Artificial Sequence: Synthetic oligonucleotide
  Antisense strand to SEQ ID NO: 907850
uauucuacuggagaaggcg

SEQ ID NO: 907852 - RNA, 19 nt, Artificial Sequence
  Description of Artificial Sequence: Synthetic oligonucleotide
  Sense strand starting at position 3031 of SEQ ID NO: 589054
aauuguuuggaggguucua

SEQ ID NO: 907853 - RNA, 19 nt, Artificial Sequence
  Description of Artificial Sequence: Synthetic oligonucleotide
  Antisense strand to SEQ ID NO: 907852
uagaacccuccaaacaauu

SEQ ID NO: 907854 - RNA, 19 nt, Artificial Sequence
  Description of Artificial Sequence: Synthetic oligonucleotide
  Sense strand starting at position 3043 of SEQ ID NO: 589054
gguucuaauaacuggauga

SEQ ID NO: 907855 - RNA, 19 nt, Artificial Sequence
  Description of Artificial Sequence: Synthetic oligonucleotide
  Antisense strand to SEQ ID NO: 907854
ucauccaguuauuagaacc

SEQ ID NO: 907856 - RNA, 19 nt, Artificial Sequence
  Description of Artificial Sequence: Synthetic oligonucleotide
  Sense strand starting at position 3458 of SEQ ID NO: 589054
ggagguugugaagagcuga

SEQ ID NO: 907857 - RNA, 19 nt, Artificial Sequence
  Description of Artificial Sequence: Synthetic oligonucleotide
  Antisense strand to SEQ ID NO: 907856
ucagcucuucacaaccucc

SEQ ID NO: 907858 - RNA, 19 nt, Artificial Sequence
  Description of Artificial Sequence: Synthetic oligonucleotide
  Sense strand starting at position 3487 of SEQ ID NO: 589054
uugcgcuuuagccugagua

SEQ ID NO: 907859 - RNA, 19 nt, Artificial Sequence
  Description of Artificial Sequence: Synthetic oligonucleotide
  Antisense strand to SEQ ID NO: 907858
uacucaggcuaaagcgcaa

SEQ ID NO: 907860 - RNA, 19 nt, Artificial Sequence
  Description of Artificial Sequence: Synthetic oligonucleotide
  Sense strand starting at position 3499 of SEQ ID NO: 589054
cugaguaacgagugaaacu

SEQ ID NO: 907861 - RNA, 19 nt, Artificial Sequence
  Description of Artificial Sequence: Synthetic oligonucleotide
  Antisense strand to SEQ ID NO: 907860
aguuucacucguuacucag

SEQ ID NO: 907862 - RNA, 19 nt, Artificial Sequence
  Description of Artificial Sequence: Synthetic oligonucleotide
  Sense strand starting at position 3681 of SEQ ID NO: 589054
ugucuauuggcucauuauu

SEQ ID NO: 907863 - RNA, 19 nt, Artificial Sequence
  Description of Artificial Sequence: Synthetic oligonucleotide
  Antisense strand to SEQ ID NO: 907862
aauaaugagccaauagaca

SEQ ID NO: 907864 - RNA, 19 nt, Artificial Sequence
  Description of Artificial Sequence: Synthetic oligonucleotide
  Sense strand starting at position 3708 of SEQ ID NO: 589054
gcaagucagaggcacuuua

SEQ ID NO: 907865 - RNA, 19 nt, Artificial Sequence
  Description of Artificial Sequence: Synthetic oligonucleotide
  Antisense strand to SEQ ID NO: 907864
uaaagugccucugacuugc

SEQ ID NO: 907866 - RNA, 19 nt, Artificial Sequence
  Description of Artificial Sequence: Synthetic oligonucleotide
  Sense strand starting at position 3716 of SEQ ID NO: 589054
gaggcacuuuacuuaguaa

SEQ ID NO: 907867 - RNA, 19 nt, Artificial Sequence
  Description of Artificial Sequence: Synthetic oligonucleotide
  Antisense strand to SEQ ID NO: 907866
uuacuaaguaaagugccuc

SEQ ID NO: 907868 - RNA, 19 nt, Artificial Sequence
  Description of Artificial Sequence: Synthetic oligonucleotide
  Sense strand starting at position 3889 of SEQ ID NO: 589054
augacaugcuaccuaugaa

SEQ ID NO: 907869 - RNA, 19 nt, Artificial Sequence
  Description of Artificial Sequence: Synthetic oligonucleotide
  Antisense strand to SEQ ID NO: 907868
uucauagguagcaugucau

SEQ ID NO: 907870 - RNA, 19 nt, Artificial Sequence
  Description of Artificial Sequence: Synthetic oligonucleotide
  Sense strand starting at position 3904 of SEQ ID NO: 589054
ugaauaaauuaccaggaaa

SEQ ID NO: 907871 - RNA, 19 nt, Artificial Sequence
  Description of Artificial Sequence: Synthetic oligonucleotide
  Antisense strand to SEQ ID NO: 907870
uuuccugguaauuuauuca

SEQ ID NO: 907872 - RNA, 19 nt, Artificial Sequence
  Description of Artificial Sequence: Synthetic oligonucleotide
  Sense strand starting at position 3937 of SEQ ID NO: 589054
uggaacugguagucaaacu

SEQ ID NO: 907873 - RNA, 19 nt, Artificial Sequence
  Description of Artificial Sequence: Synthetic oligonucleotide
  Antisense strand to SEQ ID NO: 907872
aguuugacuaccaguucca

SEQ ID NO: 907874 - RNA, 19 nt, Artificial Sequence
  Description of Artificial Sequence: Synthetic oligonucleotide
  Sense strand starting at position 3945 of SEQ ID NO: 589054
guagucaaacuauaacuuu

SEQ ID NO: 907875 - RNA, 19 nt, Artificial Sequence
  Description of Artificial Sequence: Synthetic oligonucleotide
  Antisense strand to SEQ ID NO: 907874
aaaguuauaguuugacuac

SEQ ID NO: 907876 - RNA, 19 nt, Artificial Sequence
  Description of Artificial Sequence: Synthetic oligonucleotide
  Sense strand starting at position 3981 of SEQ ID NO: 589054
caugguaaggagugaugga

SEQ ID NO: 907877 - RNA, 19 nt, Artificial Sequence
  Description of Artificial Sequence: Synthetic oligonucleotide
  Antisense strand to SEQ ID NO: 907876
uccaucacuccuuaccaug

SEQ ID NO: 907878 - RNA, 19 nt, Artificial Sequence
  Description of Artificial Sequence: Synthetic oligonucleotide
  Sense strand starting at position 427 of SEQ ID NO: 589055
uagguaaucugacacagag

SEQ ID NO: 907879 - RNA, 19 nt, Artificial Sequence
  Description of Artificial Sequence: Synthetic oligonucleotide
  Antisense strand to SEQ ID NO: 907878
cucugugucagauuaccua

SEQ ID NO: 907880 - RNA, 19 nt, Artificial Sequence
  Description of Artificial Sequence: Synthetic oligonucleotide
  Sense strand starting at position 514 of SEQ ID NO: 589055
guggcaaugugaguaucaa

SEQ ID NO: 907881 - RNA, 19 nt, Artificial Sequence
  Description of Artificial Sequence: Synthetic oligonucleotide
  Antisense strand to SEQ ID NO: 907880
uugauacucacauugccac

SEQ ID NO: 907882 - RNA, 19 nt, Artificial Sequence
  Description of Artificial Sequence: Synthetic oligonucleotide
  Sense strand starting at position 515 of SEQ ID NO: 589055
uggcaaugugaguaucaac

SEQ ID NO: 907883 - RNA, 19 nt, Artificial Sequence
  Description of Artificial Sequence: Synthetic oligonucleotide
  Antisense strand to SEQ ID NO: 907882
guugauacucacauugcca

SEQ ID NO: 907884 - RNA, 19 nt, Artificial Sequence
  Description of Artificial Sequence: Synthetic oligonucleotide
  Sense strand starting at position 523 of SEQ ID NO: 589055
ugaguaucaacguggaauu

SEQ ID NO: 907885 - RNA, 19 nt, Artificial Sequence
  Description of Artificial Sequence: Synthetic oligonucleotide
  Antisense strand to SEQ ID NO: 907884
aauuccacguugauacuca

SEQ ID NO: 907886 - RNA, 19 nt, Artificial Sequence
  Description of Artificial Sequence: Synthetic oligonucleotide
  Sense strand starting at position 524 of SEQ ID NO: 589055
gaguaucaacguggaauuc

SEQ ID NO: 907887 - RNA, 19 nt, Artificial Sequence
  Description of Artificial Sequence: Synthetic oligonucleotide
  Antisense strand to SEQ ID NO: 907886
gaauuccacguugauacuc

SEQ ID NO: 907888 - RNA, 19 nt, Artificial Sequence
  Description of Artificial Sequence: Synthetic oligonucleotide
  Sense strand starting at position 533 of SEQ ID NO: 589055
cguggaauucgauguuaaa

SEQ ID NO: 907889 - RNA, 19 nt, Artificial Sequence
  Description of Artificial Sequence: Synthetic oligonucleotide
  Antisense strand to SEQ ID NO: 907888
uuuaacaucgaauuccacg

SEQ ID NO: 907890 - RNA, 19 nt, Artificial Sequence
  Description of Artificial Sequence: Synthetic oligonucleotide
  Sense strand starting at position 562 of SEQ ID NO: 589055
cuuggaauucgauguuaaa

SEQ ID NO: 907891 - RNA, 19 nt, Artificial Sequence
  Description of Artificial Sequence: Synthetic oligonucleotide
  Antisense strand to SEQ ID NO: 907890
uuuaacaucgaauuccaag

SEQ ID NO: 907892 - RNA, 19 nt, Artificial Sequence
  Description of Artificial Sequence: Synthetic oligonucleotide
  Sense strand starting at position 767 of SEQ ID NO: 589055
guaucuccuccagaauaug

SEQ ID NO: 907893 - RNA, 19 nt, Artificial Sequence
  Description of Artificial Sequence: Synthetic oligonucleotide
  Antisense strand to SEQ ID NO: 907892
cauauucuggaggagauac

SEQ ID NO: 907894 - RNA, 19 nt, Artificial Sequence
  Description of Artificial Sequence: Synthetic oligonucleotide
  Sense strand starting at position 1129 of SEQ ID NO: 589055
cccuaaauguaucccgcau

SEQ ID NO: 907895 - RNA, 19 nt, Artificial Sequence
  Description of Artificial Sequence: Synthetic oligonucleotide
  Antisense strand to SEQ ID NO: 907894
augcgggauacauuuaggg

SEQ ID NO: 907896 - RNA, 19 nt, Artificial Sequence
  Description of Artificial Sequence: Synthetic oligonucleotide
  Sense strand starting at position 1362 of SEQ ID NO: 589055
cguaaugauaaaggagcua

SEQ ID NO: 907897 - RNA, 19 nt, Artificial Sequence
  Description of Artificial Sequence: Synthetic oligonucleotide
  Antisense strand to SEQ ID NO: 907896
uagcuccuuuaucauuacg

SEQ ID NO: 907898 - RNA, 19 nt, Artificial Sequence
  Description of Artificial Sequence: Synthetic oligonucleotide
  Sense strand starting at position 1494 of SEQ ID NO: 589055
uaaacagaucgguacguau

SEQ ID NO: 907899 - RNA, 19 nt, Artificial Sequence
  Description of Artificial Sequence: Synthetic oligonucleotide
  Antisense strand to SEQ ID NO: 907898
auacguaccgaucuguuua

SEQ ID NO: 907900 - RNA, 19 nt, Artificial Sequence
  Description of Artificial Sequence: Synthetic oligonucleotide
  Sense strand starting at position 1496 of SEQ ID NO: 589055
aacagaucgguacguauaa

SEQ ID NO: 907901 - RNA, 19 nt, Artificial Sequence
  Description of Artificial Sequence: Synthetic oligonucleotide
  Antisense strand to SEQ ID NO: 907900
uuauacguaccgaucuguu

SEQ ID NO: 907902 - RNA, 19 nt, Artificial Sequence
  Description of Artificial Sequence: Synthetic oligonucleotide
  Sense strand starting at position 1497 of SEQ ID NO: 589055
acagaucgguacguauaaa

SEQ ID NO: 907903 - RNA, 19 nt, Artificial Sequence
  Description of Artificial Sequence: Synthetic oligonucleotide
  Antisense strand to SEQ ID NO: 907902
uuuauacguaccgaucugu

SEQ ID NO: 907904 - RNA, 19 nt, Artificial Sequence
  Description of Artificial Sequence: Synthetic oligonucleotide
  Sense strand starting at position 1801 of SEQ ID NO: 589055
aucagagauucuucuugcu

SEQ ID NO: 907905 - RNA, 19 nt, Artificial Sequence
  Description of Artificial Sequence: Synthetic oligonucleotide
  Antisense strand to SEQ ID NO: 907904
agcaagaagaaucucugau

SEQ ID NO: 907906 - RNA, 19 nt, Artificial Sequence
  Description of Artificial Sequence: Synthetic oligonucleotide
  Sense strand starting at position 1884 of SEQ ID NO: 589055
gucauuugccucgggaggu

SEQ ID NO: 907907 - RNA, 19 nt, Artificial Sequence
  Description of Artificial Sequence: Synthetic oligonucleotide
  Antisense strand to SEQ ID NO: 907906
accucccgaggcaaaugac

SEQ ID NO: 907908 - RNA, 19 nt, Artificial Sequence
  Description of Artificial Sequence: Synthetic oligonucleotide
  Sense strand starting at position 1900 of SEQ ID NO: 589055
ggugacuauagucgcaaga

SEQ ID NO: 907909 - RNA, 19 nt, Artificial Sequence
  Description of Artificial Sequence: Synthetic oligonucleotide
  Antisense strand to SEQ ID NO: 907908
ucuugcgacuauagucacc

SEQ ID NO: 907910 - RNA, 19 nt, Artificial Sequence
  Description of Artificial Sequence: Synthetic oligonucleotide
  Sense strand starting at position 2018 of SEQ ID NO: 589055
gccugaagguugccaguaa

SEQ ID NO: 907911 - RNA, 19 nt, Artificial Sequence
  Description of Artificial Sequence: Synthetic oligonucleotide
  Antisense strand to SEQ ID NO: 907910
uuacuggcaaccuucaggc

SEQ ID NO: 907912 - RNA, 19 nt, Artificial Sequence
  Description of Artificial Sequence: Synthetic oligonucleotide
  Sense strand starting at position 2022 of SEQ ID NO: 589055
gaagguugccaguaaucaa

SEQ ID NO: 907913 - RNA, 19 nt, Artificial Sequence
  Description of Artificial Sequence: Synthetic oligonucleotide
  Antisense strand to SEQ ID NO: 907912
uugauuacuggcaaccuuc

SEQ ID NO: 907914 - RNA, 19 nt, Artificial Sequence
  Description of Artificial Sequence: Synthetic oligonucleotide
  Sense strand starting at position 2025 of SEQ ID NO: 589055
gguugccaguaaucaacau

SEQ ID NO: 907915 - RNA, 19 nt, Artificial Sequence
  Description of Artificial Sequence: Synthetic oligonucleotide
  Antisense strand to SEQ ID NO: 907914
auguugauuacuggcaacc

SEQ ID NO: 907916 - RNA, 19 nt, Artificial Sequence
  Description of Artificial Sequence: Synthetic oligonucleotide
  Sense strand starting at position 2159 of SEQ ID NO: 589055
gaggcugaggguuguccaa

SEQ ID NO: 907917 - RNA, 19 nt, Artificial Sequence
  Description of Artificial Sequence: Synthetic oligonucleotide
  Antisense strand to SEQ ID NO: 907916
uuggacaacccucagccuc

SEQ ID NO: 907918 - RNA, 19 nt, Artificial Sequence
  Description of Artificial Sequence: Synthetic oligonucleotide
  Sense strand starting at position 2233 of SEQ ID NO: 589055
agccuaucaccucagguua

SEQ ID NO: 907919 - RNA, 19 nt, Artificial Sequence
  Description of Artificial Sequence: Synthetic oligonucleotide
  Antisense strand to SEQ ID NO: 907918
uaaccugaggugauaggcu

SEQ ID NO: 907920 - RNA, 19 nt, Artificial Sequence
  Description of Artificial Sequence: Synthetic oligonucleotide
  Sense strand starting at position 2350 of SEQ ID NO: 589055
uuuauucgugucgauggga

SEQ ID NO: 907921 - RNA, 19 nt, Artificial Sequence
  Description of Artificial Sequence: Synthetic oligonucleotide
  Antisense strand to SEQ ID NO: 907920
ucccaucgacacgaauaaa

SEQ ID NO: 907922 - RNA, 19 nt, Artificial Sequence
  Description of Artificial Sequence: Synthetic oligonucleotide
  Sense strand starting at position 2353 of SEQ ID NO: 589055
auucgugucgaugggacau

SEQ ID NO: 907923 - RNA, 19 nt, Artificial Sequence
  Description of Artificial Sequence: Synthetic oligonucleotide
  Antisense strand to SEQ ID NO: 907922
augucccaucgacacgaau

SEQ ID NO: 907924 - RNA, 19 nt, Artificial Sequence
  Description of Artificial Sequence: Synthetic oligonucleotide
  Sense strand starting at position 2364 of SEQ ID NO: 589055
ugggacauuuagcaagaua

SEQ ID NO: 907925 - RNA, 19 nt, Artificial Sequence
  Description of Artificial Sequence: Synthetic oligonucleotide
  Antisense strand to SEQ ID NO: 907924
uaucuugcuaaauguccca

SEQ ID NO: 907926 - RNA, 19 nt, Artificial Sequence
  Description of Artificial Sequence: Synthetic oligonucleotide
  Sense strand starting at position 2383 of SEQ ID NO: 589055
ugaaguaaccugggucaua

SEQ ID NO: 907927 - RNA, 19 nt, Artificial Sequence
  Description of Artificial Sequence: Synthetic oligonucleotide
  Antisense strand to SEQ ID NO: 907926
uaugacccagguuacuuca

SEQ ID NO: 907928 - RNA, 19 nt, Artificial Sequence
  Description of Artificial Sequence: Synthetic oligonucleotide
  Sense strand starting at position 2384 of SEQ ID NO: 589055
gaaguaaccugggucauaa

SEQ ID NO: 907929 - RNA, 19 nt, Artificial Sequence
  Description of Artificial Sequence: Synthetic oligonucleotide
  Antisense strand to SEQ ID NO: 907928
uuaugacccagguuacuuc

SEQ ID NO: 907930 - RNA, 19 nt, Artificial Sequence
  Description of Artificial Sequence: Synthetic oligonucleotide
  Sense strand starting at position 2547 of SEQ ID NO: 589055
gagagaaagucucaaauuu

SEQ ID NO: 907931 - RNA, 19 nt, Artificial Sequence
  Description of Artificial Sequence: Synthetic oligonucleotide
  Antisense strand to SEQ ID NO: 907930
aaauuugagacuuucucuc

SEQ ID NO: 907932 - RNA, 19 nt, Artificial Sequence
  Description of Artificial Sequence: Synthetic oligonucleotide
  Sense strand starting at position 2620 of SEQ ID NO: 589055
ugaaaugaaugacagugaa

SEQ ID NO: 907933 - RNA, 19 nt, Artificial Sequence
  Description of Artificial Sequence: Synthetic oligonucleotide
  Antisense strand to SEQ ID NO: 907932
uucacugucauucauuuca

SEQ ID NO: 907934 - RNA, 19 nt, Artificial Sequence
  Description of Artificial Sequence: Synthetic oligonucleotide
  Sense strand starting at position 2658 of SEQ ID NO: 589055
gugggauguggcuaaauca

SEQ ID NO: 907935 - RNA, 19 nt, Artificial Sequence
  Description of Artificial Sequence: Synthetic oligonucleotide
  Antisense strand to SEQ ID NO: 907934
ugauuuagccacaucccac

SEQ ID NO: 907936 - RNA, 19 nt, Artificial Sequence
  Description of Artificial Sequence: Synthetic oligonucleotide
  Sense strand starting at position 2877 of SEQ ID NO: 589055
aaagcugguucuguaaaug

SEQ ID NO: 907937 - RNA, 19 nt, Artificial Sequence
  Description of Artificial Sequence: Synthetic oligonucleotide
  Antisense strand to SEQ ID NO: 907936
cauuuacagaaccagcuuu

SEQ ID NO: 907938 - RNA, 19 nt, Artificial Sequence
  Description of Artificial Sequence: Synthetic oligonucleotide
  Sense strand starting at position 3097 of SEQ ID NO: 589055
guugaauagcccuagaacu

SEQ ID NO: 907939 - RNA, 19 nt, Artificial Sequence
  Description of Artificial Sequence: Synthetic oligonucleotide
  Antisense strand to SEQ ID NO: 907938
aguucuagggcuauucaac

SEQ ID NO: 907940 - RNA, 19 nt, Artificial Sequence
  Description of Artificial Sequence: Synthetic oligonucleotide
  Sense strand starting at position 3272 of SEQ ID NO: 589055
ucaugaggccaguguuacu

SEQ ID NO: 907941 - RNA, 19 nt, Artificial Sequence
  Description of Artificial Sequence: Synthetic oligonucleotide
  Antisense strand to SEQ ID NO: 907940
aguaacacuggccucauga

SEQ ID NO: 907942 - RNA, 19 nt, Artificial Sequence
  Description of Artificial Sequence: Synthetic oligonucleotide
  Sense strand starting at position 3847 of SEQ ID NO: 589055
gucugugaauugcccaaua

SEQ ID NO: 907943 - RNA, 19 nt, Artificial Sequence
  Description of Artificial Sequence: Synthetic oligonucleotide
  Antisense strand to SEQ ID NO: 907942
uauugggcaauucacagac

SEQ ID NO: 907944 - RNA, 19 nt, Artificial Sequence
  Description of Artificial Sequence: Synthetic oligonucleotide
  Sense strand starting at position 3849 of SEQ ID NO: 589055
cugugaauugcccaauauu

SEQ ID NO: 907945 - RNA, 19 nt, Artificial Sequence
  Description of Artificial Sequence: Synthetic oligonucleotide
  Antisense strand to SEQ ID NO: 907944
aauauugggcaauucacag

SEQ ID NO: 907946 - RNA, 19 nt, Artificial Sequence
  Description of Artificial Sequence: Synthetic oligonucleotide
  Sense strand starting at position 3852 of SEQ ID NO: 589055
ugaauugcccaauauuagu

SEQ ID NO: 907947 - RNA, 19 nt, Artificial Sequence
  Description of Artificial Sequence: Synthetic oligonucleotide
  Antisense strand to SEQ ID NO: 907946
acuaauauugggcaauuca

SEQ ID NO: 907948 - RNA, 19 nt, Artificial Sequence
  Description of Artificial Sequence: Synthetic oligonucleotide
  Sense strand starting at position 3905 of SEQ ID NO: 589055
ccaucuucguaucugauca

SEQ ID NO: 907949 - RNA, 19 nt, Artificial Sequence
  Description of Artificial Sequence: Synthetic oligonucleotide
  Antisense strand to SEQ ID NO: 907948
ugaucagauacgaagaugg

SEQ ID NO: 907950 - RNA, 19 nt, Artificial Sequence
  Description of Artificial Sequence: Synthetic oligonucleotide
  Sense strand starting at position 3909 of SEQ ID NO: 589055
cuucguaucugaucaccau

SEQ ID NO: 907951 - RNA, 19 nt, Artificial Sequence
  Description of Artificial Sequence: Synthetic oligonucleotide
  Antisense strand to SEQ ID NO: 907950
auggugaucagauacgaag

SEQ ID NO: 907952 - RNA, 19 nt, Artificial Sequence
  Description of Artificial Sequence: Synthetic oligonucleotide
  Sense strand starting at position 3910 of SEQ ID NO: 589055
uucguaucugaucaccauu

SEQ ID NO: 907953 - RNA, 19 nt, Artificial Sequence
  Description of Artificial Sequence: Synthetic oligonucleotide
  Antisense strand to SEQ ID NO: 907952
aauggugaucagauacgaa

SEQ ID NO: 907954 - RNA, 19 nt, Artificial Sequence
  Description of Artificial Sequence: Synthetic oligonucleotide
  Sense strand starting at position 3912 of SEQ ID NO: 589055
cguaucugaucaccauuga

SEQ ID NO: 907955 - RNA, 19 nt, Artificial Sequence
  Description of Artificial Sequence: Synthetic oligonucleotide
  Antisense strand to SEQ ID NO: 907954
ucaauggugaucagauacg

SEQ ID NO: 907956 - RNA, 19 nt, Artificial Sequence
  Description of Artificial Sequence: Synthetic oligonucleotide
  Sense strand starting at position 3913 of SEQ ID NO: 589055
guaucugaucaccauugau

SEQ ID NO: 907957 - RNA, 19 nt, Artificial Sequence
  Description of Artificial Sequence: Synthetic oligonucleotide
  Antisense strand to SEQ ID NO: 907956
aucaauggugaucagauac

SEQ ID NO: 907958 - RNA, 19 nt, Artificial Sequence
  Description of Artificial Sequence: Synthetic oligonucleotide
  Sense strand starting at position 323 of SEQ ID NO: 589056
gcuggauaauccucugaca

SEQ ID NO: 907959 - RNA, 19 nt, Artificial Sequence
  Description of Artificial Sequence: Synthetic oligonucleotide
  Antisense strand to SEQ ID NO: 907958
ugucagaggauuauccagc

SEQ ID NO: 907960 - RNA, 19 nt, Artificial Sequence
  Description of Artificial Sequence: Synthetic oligonucleotide
  Sense strand starting at position 325 of SEQ ID NO: 589056
uggauaauccucugacaua

SEQ ID NO: 907961 - RNA, 19 nt, Artificial Sequence
  Description of Artificial Sequence: Synthetic oligonucleotide
  Antisense strand to SEQ ID NO: 907960
uaugucagaggauuaucca

SEQ ID NO: 907962 - RNA, 19 nt, Artificial Sequence
  Description of Artificial Sequence: Synthetic oligonucleotide
  Sense strand starting at position 607 of SEQ ID NO: 589056
guaauuccagcugagauua

SEQ ID NO: 907963 - RNA, 19 nt, Artificial Sequence
  Description of Artificial Sequence: Synthetic oligonucleotide
  Antisense strand to SEQ ID NO: 907962
uaaucucagcuggaauuac

SEQ ID NO: 907964 - RNA, 19 nt, Artificial Sequence
  Description of Artificial Sequence: Synthetic oligonucleotide
  Sense strand starting at position 769 of SEQ ID NO: 589056
uuccaaaguucccuaggga

SEQ ID NO: 907965 - RNA, 19 nt, Artificial Sequence
  Description of Artificial Sequence: Synthetic oligonucleotide
  Antisense strand to SEQ ID NO: 907964
ucccuagggaacuuuggaa

SEQ ID NO: 907966 - RNA, 19 nt, Artificial Sequence
  Description of Artificial Sequence: Synthetic oligonucleotide
  Sense strand starting at position 772 of SEQ ID NO: 589056
caaaguucccuagggagca

SEQ ID NO: 907967 - RNA, 19 nt, Artificial Sequence
  Description of Artificial Sequence: Synthetic oligonucleotide
  Antisense strand to SEQ ID NO: 907966
ugcucccuagggaacuuug

SEQ ID NO: 907968 - RNA, 19 nt, Artificial Sequence
  Description of Artificial Sequence: Synthetic oligonucleotide
  Sense strand starting at position 956 of SEQ ID NO: 589056
accacaguauguucuuaaa

SEQ ID NO: 907969 - RNA, 19 nt, Artificial Sequence
  Description of Artificial Sequence: Synthetic oligonucleotide
  Antisense strand to SEQ ID NO: 907968
uuuaagaacauacuguggu

SEQ ID NO: 907970 - RNA, 19 nt, Artificial Sequence
  Description of Artificial Sequence: Synthetic oligonucleotide
  Sense strand starting at position 1166 of SEQ ID NO: 589056
auacacuugccacauagua

SEQ ID NO: 907971 - RNA, 19 nt, Artificial Sequence
  Description of Artificial Sequence: Synthetic oligonucleotide
  Antisense strand to SEQ ID NO: 907970
uacuauguggcaaguguau

SEQ ID NO: 907972 - RNA, 19 nt, Artificial Sequence
  Description of Artificial Sequence: Synthetic oligonucleotide
  Sense strand starting at position 1182 of SEQ ID NO: 589056
guaagauucuguccacacu

SEQ ID NO: 907973 - RNA, 19 nt, Artificial Sequence
  Description of Artificial Sequence: Synthetic oligonucleotide
  Antisense strand to SEQ ID NO: 907972
aguguggacagaaucuuac

SEQ ID NO: 907974 - RNA, 19 nt, Artificial Sequence
  Description of Artificial Sequence: Synthetic oligonucleotide
  Sense strand starting at position 1230 of SEQ ID NO: 589056
gggacaaucacucagugcu

SEQ ID NO: 907975 - RNA, 19 nt, Artificial Sequence
  Description of Artificial Sequence: Synthetic oligonucleotide
  Antisense strand to SEQ ID NO: 907974
agcacugagugauuguccc

SEQ ID NO: 907976 - RNA, 19 nt, Artificial Sequence
  Description of Artificial Sequence: Synthetic oligonucleotide
  Sense strand starting at position 1305 of SEQ ID NO: 589056
ggaguaaaguguuuaugua

SEQ ID NO: 907977 - RNA, 19 nt, Artificial Sequence
  Description of Artificial Sequence: Synthetic oligonucleotide
  Antisense strand to SEQ ID NO: 907976
uacauaaacacuuuacucc

SEQ ID NO: 907978 - RNA, 19 nt, Artificial Sequence
  Description of Artificial Sequence: Synthetic oligonucleotide
  Sense strand starting at position 1306 of SEQ ID NO: 589056
gaguaaaguguuuauguau

SEQ ID NO: 907979 - RNA, 19 nt, Artificial Sequence
  Description of Artificial Sequence: Synthetic oligonucleotide
  Antisense strand to SEQ ID NO: 907978
auacauaaacacuuuacuc

SEQ ID NO: 907980 - RNA, 19 nt, Artificial Sequence
  Description of Artificial Sequence: Synthetic oligonucleotide
  Sense strand starting at position 1409 of SEQ ID NO: 589056
gguugugagaauuaaacga

SEQ ID NO: 907981 - RNA, 19 nt, Artificial Sequence
  Description of Artificial Sequence: Synthetic oligonucleotide
  Antisense strand to SEQ ID NO: 907980
ucguuuaauucucacaacc

SEQ ID NO: 907982 - RNA, 19 nt, Artificial Sequence
  Description of Artificial Sequence: Synthetic oligonucleotide
  Sense strand starting at position 1442 of SEQ ID NO: 589056
agaacaaagugucuuccaa

SEQ ID NO: 907983 - RNA, 19 nt, Artificial Sequence
  Description of Artificial Sequence: Synthetic oligonucleotide
  Antisense strand to SEQ ID NO: 907982
uuggaagacacuuuguucu

SEQ ID NO: 907984 - RNA, 19 nt, Artificial Sequence
  Description of Artificial Sequence: Synthetic oligonucleotide
  Sense strand starting at position 1527 of SEQ ID NO: 589056
auggcuuaccucugaacga

SEQ ID NO: 907985 - RNA, 19 nt, Artificial Sequence
  Description of Artificial Sequence: Synthetic oligonucleotide
  Antisense strand to SEQ ID NO: 907984
ucguucagagguaagccau

SEQ ID NO: 907986 - RNA, 19 nt, Artificial Sequence
  Description of Artificial Sequence: Synthetic oligonucleotide
  Sense strand starting at position 1744 of SEQ ID NO: 589056
cugcauucuggcgcccaua

SEQ ID NO: 907987 - RNA, 19 nt, Artificial Sequence
  Description of Artificial Sequence: Synthetic oligonucleotide
  Antisense strand to SEQ ID NO: 907986
uaugggcgccagaaugcag

SEQ ID NO: 907988 - RNA, 19 nt, Artificial Sequence
  Description of Artificial Sequence: Synthetic oligonucleotide
  Sense strand starting at position 2245 of SEQ ID NO: 589056
gagguuguggguuagacuu

SEQ ID NO: 907989 - RNA, 19 nt, Artificial Sequence
  Description of Artificial Sequence: Synthetic oligonucleotide
  Antisense strand to SEQ ID NO: 907988
aagucuaacccacaaccuc

SEQ ID NO: 907990 - RNA, 19 nt, Artificial Sequence
  Description of Artificial Sequence: Synthetic oligonucleotide
  Sense strand starting at position 2251 of SEQ ID NO: 589056
guggguuagacuugaugac

SEQ ID NO: 907991 - RNA, 19 nt, Artificial Sequence
  Description of Artificial Sequence: Synthetic oligonucleotide
  Antisense strand to SEQ ID NO: 907990
gucaucaagucuaacccac

SEQ ID NO: 907992 - RNA, 19 nt, Artificial Sequence
  Description of Artificial Sequence: Synthetic oligonucleotide
  Sense strand starting at position 2342 of SEQ ID NO: 589056
uuguauacggacuggaaau

SEQ ID NO: 907993 - RNA, 19 nt, Artificial Sequence
  Description of Artificial Sequence: Synthetic oligonucleotide
  Antisense strand to SEQ ID NO: 907992
auuuccaguccguauacaa

SEQ ID NO: 907994 - RNA, 19 nt, Artificial Sequence
  Description of Artificial Sequence: Synthetic oligonucleotide
  Sense strand starting at position 2343 of SEQ ID NO: 589056
uguauacggacuggaaauu

SEQ ID NO: 907995 - RNA, 19 nt, Artificial Sequence
  Description of Artificial Sequence: Synthetic oligonucleotide
  Antisense strand to SEQ ID NO: 907994
aauuuccaguccguauaca

SEQ ID NO: 907996 - RNA, 19 nt, Artificial Sequence
  Description of Artificial Sequence: Synthetic oligonucleotide
  Sense strand starting at position 2389 of SEQ ID NO: 589056
ugggauuauguagguaauc

SEQ ID NO: 907997 - RNA, 19 nt, Artificial Sequence
  Description of Artificial Sequence: Synthetic oligonucleotide
  Antisense strand to SEQ ID NO: 907996
gauuaccuacauaauccca

SEQ ID NO: 907998 - RNA, 19 nt, Artificial Sequence
  Description of Artificial Sequence: Synthetic oligonucleotide
  Sense strand starting at position 2390 of SEQ ID NO: 589056
gggauuauguagguaaucu

SEQ ID NO: 907999 - RNA, 19 nt, Artificial Sequence
  Description of Artificial Sequence: Synthetic oligonucleotide
  Antisense strand to SEQ ID NO: 907998
agauuaccuacauaauccc

SEQ ID NO: 908000 - RNA, 19 nt, Artificial Sequence
  Description of Artificial Sequence: Synthetic oligonucleotide
  Sense strand starting at position 2391 of SEQ ID NO: 589056
ggauuauguagguaaucuu

SEQ ID NO: 908001 - RNA, 19 nt, Artificial Sequence
  Description of Artificial Sequence: Synthetic oligonucleotide
  Antisense strand to SEQ ID NO: 908000
aagauuaccuacauaaucc

SEQ ID NO: 908002 - RNA, 19 nt, Artificial Sequence
  Description of Artificial Sequence: Synthetic oligonucleotide
  Sense strand starting at position 2421 of SEQ ID NO: 589056
aagagaugucuauguaagu

SEQ ID NO: 908003 - RNA, 19 nt, Artificial Sequence
  Description of Artificial Sequence: Synthetic oligonucleotide
  Antisense strand to SEQ ID NO: 908002
acuuacauagacaucucuu

SEQ ID NO: 908004 - RNA, 19 nt, Artificial Sequence
  Description of Artificial Sequence: Synthetic oligonucleotide
  Sense strand starting at position 2422 of SEQ ID NO: 589056
agagaugucuauguaagua

SEQ ID NO: 908005 - RNA, 19 nt, Artificial Sequence
  Description of Artificial Sequence: Synthetic oligonucleotide
  Antisense strand to SEQ ID NO: 908004
uacuuacauagacaucucu

SEQ ID NO: 908006 - RNA, 19 nt, Artificial Sequence
  Description of Artificial Sequence: Synthetic oligonucleotide
  Sense strand starting at position 2858 of SEQ ID NO: 589056
uggacaugcuuauugacua

SEQ ID NO: 908007 - RNA, 19 nt, Artificial Sequence
  Description of Artificial Sequence: Synthetic oligonucleotide
  Antisense strand to SEQ ID NO: 908006
uagucaauaagcaugucca

SEQ ID NO: 908008 - RNA, 19 nt, Artificial Sequence
  Description of Artificial Sequence: Synthetic oligonucleotide
  Sense strand starting at position 2868 of SEQ ID NO: 589056
uauugacuauguguuggaa

SEQ ID NO: 908009 - RNA, 19 nt, Artificial Sequence
  Description of Artificial Sequence: Synthetic oligonucleotide
  Antisense strand to SEQ ID NO: 908008
uuccaacacauagucaaua

SEQ ID NO: 908010 - RNA, 19 nt, Artificial Sequence
  Description of Artificial Sequence: Synthetic oligonucleotide
  Sense strand starting at position 3182 of SEQ ID NO: 589056
uagagaugagcuugcuuaa

SEQ ID NO: 908011 - RNA, 19 nt, Artificial Sequence
  Description of Artificial Sequence: Synthetic oligonucleotide
  Antisense strand to SEQ ID NO: 908010
uuaagcaagcucaucucua

SEQ ID NO: 908012 - RNA, 19 nt, Artificial Sequence
  Description of Artificial Sequence: Synthetic oligonucleotide
  Sense strand starting at position 3185 of SEQ ID NO: 589056
agaugagcuugcuuaaauc

SEQ ID NO: 908013 - RNA, 19 nt, Artificial Sequence
  Description of Artificial Sequence: Synthetic oligonucleotide
  Antisense strand to SEQ ID NO: 908012
gauuuaagcaagcucaucu

SEQ ID NO: 908014 - RNA, 19 nt, Artificial Sequence
  Description of Artificial Sequence: Synthetic oligonucleotide
  Sense strand starting at position 3196 of SEQ ID NO: 589056
cuuaaaucuuaugugguau

SEQ ID NO: 908015 - RNA, 19 nt, Artificial Sequence
  Description of Artificial Sequence: Synthetic oligonucleotide
  Antisense strand to SEQ ID NO: 908014
auaccacauaagauuuaag

SEQ ID NO: 908016 - RNA, 19 nt, Artificial Sequence
  Description of Artificial Sequence: Synthetic oligonucleotide
  Sense strand starting at position 3302 of SEQ ID NO: 589056
cacgguugauacuuucuaa

SEQ ID NO: 908017 - RNA, 19 nt, Artificial Sequence
  Description of Artificial Sequence: Synthetic oligonucleotide
  Antisense strand to SEQ ID NO: 908016
uuagaaaguaucaaccgug

SEQ ID NO: 908018 - RNA, 19 nt, Artificial Sequence
  Description of Artificial Sequence: Synthetic oligonucleotide
  Sense strand starting at position 3305 of SEQ ID NO: 589056
gguugauacuuucuaacag

SEQ ID NO: 908019 - RNA, 19 nt, Artificial Sequence
  Description of Artificial Sequence: Synthetic oligonucleotide
  Antisense strand to SEQ ID NO: 908018
cuguuagaaaguaucaacc

SEQ ID NO: 908020 - RNA, 19 nt, Artificial Sequence
  Description of Artificial Sequence: Synthetic oligonucleotide
  Sense strand starting at position 3329 of SEQ ID NO: 589056
uuuauauggcaaugauaag

SEQ ID NO: 908021 - RNA, 19 nt, Artificial Sequence
  Description of Artificial Sequence: Synthetic oligonucleotide
  Antisense strand to SEQ ID NO: 908020
cuuaucauugccauauaaa

SEQ ID NO: 908022 - RNA, 19 nt, Artificial Sequence
  Description of Artificial Sequence: Synthetic oligonucleotide
  Sense strand starting at position 3381 of SEQ ID NO: 589056
aguaaacuagugcaguaua

SEQ ID NO: 908023 - RNA, 19 nt, Artificial Sequence
  Description of Artificial Sequence: Synthetic oligonucleotide
  Antisense strand to SEQ ID NO: 908022
uauacugcacuaguuuacu

SEQ ID NO: 908024 - RNA, 19 nt, Artificial Sequence
  Description of Artificial Sequence: Synthetic oligonucleotide
  Sense strand starting at position 3717 of SEQ ID NO: 589056
aagaauguaguauguauca

SEQ ID NO: 908025 - RNA, 19 nt, Artificial Sequence
  Description of Artificial Sequence: Synthetic oligonucleotide
  Antisense strand to SEQ ID NO: 908024
ugauacauacuacauucuu

SEQ ID NO: 908026 - RNA, 19 nt, Artificial Sequence
  Description of Artificial Sequence: Synthetic oligonucleotide
  Sense strand starting at position 3767 of SEQ ID NO: 589056
ucaguaaccuuguuaggac

SEQ ID NO: 908027 - RNA, 19 nt, Artificial Sequence
  Description of Artificial Sequence: Synthetic oligonucleotide
  Antisense strand to SEQ ID NO: 908026
guccuaacaagguuacuga

SEQ ID NO: 908028 - RNA, 19 nt, Artificial Sequence
  Description of Artificial Sequence: Synthetic oligonucleotide
  Sense strand starting at position 3789 of SEQ ID NO: 589056
gagauaggugcugggacaa

SEQ ID NO: 908029 - RNA, 19 nt, Artificial Sequence
  Description of Artificial Sequence: Synthetic oligonucleotide
  Antisense strand to SEQ ID NO: 908028
uugucccagcaccuaucuc

SEQ ID NO: 908030 - RNA, 19 nt, Artificial Sequence
  Description of Artificial Sequence: Synthetic oligonucleotide
  Sense strand starting at position 3808 of SEQ ID NO: 589056
aggacauauccauggcacu

SEQ ID NO: 908031 - RNA, 19 nt, Artificial Sequence
  Description of Artificial Sequence: Synthetic oligonucleotide
  Antisense strand to SEQ ID NO: 908030
agugccauggauauguccu

SEQ ID NO: 908032 - RNA, 19 nt, Artificial Sequence
  Description of Artificial Sequence: Synthetic oligonucleotide
  Sense strand starting at position 3809 of SEQ ID NO: 589056
ggacauauccauggcacua

SEQ ID NO: 908033 - RNA, 19 nt, Artificial Sequence
  Description of Artificial Sequence: Synthetic oligonucleotide
  Antisense strand to SEQ ID NO: 908032
uagugccauggauaugucc

SEQ ID NO: 908034 - RNA, 19 nt, Artificial Sequence
  Description of Artificial Sequence: Synthetic oligonucleotide
  Sense strand starting at position 3924 of SEQ ID NO: 589056
uuaagagaaacagguguuu

SEQ ID NO: 908035 - RNA, 19 nt, Artificial Sequence
  Description of Artificial Sequence: Synthetic oligonucleotide
  Antisense strand to SEQ ID NO: 908034
aaacaccuguuucucuuaa

SEQ ID NO: 908036 - RNA, 19 nt, Artificial Sequence
  Description of Artificial Sequence: Synthetic oligonucleotide
  Sense strand starting at position 3962 of SEQ ID NO: 589056
auuccuuuccaaggaaagu

SEQ ID NO: 908037 - RNA, 19 nt, Artificial Sequence
  Description of Artificial Sequence: Synthetic oligonucleotide
  Antisense strand to SEQ ID NO: 908036
acuuuccuuggaaaggaau

SEQ ID NO: 908038 - RNA, 19 nt, Artificial Sequence
  Description of Artificial Sequence: Synthetic oligonucleotide
  Sense strand starting at position 118 of SEQ ID NO: 589057
gaucaaggcuaauggauuu

SEQ ID NO: 908039 - RNA, 19 nt, Artificial Sequence
  Description of Artificial Sequence: Synthetic oligonucleotide
  Antisense strand to SEQ ID NO: 908038
aaauccauuagccuugauc

SEQ ID NO: 908040 - RNA, 19 nt, Artificial Sequence
  Description of Artificial Sequence: Synthetic oligonucleotide
  Sense strand starting at position 359 of SEQ ID NO: 589057
aaaugagcuucugugaauc

SEQ ID NO: 908041 - RNA, 19 nt, Artificial Sequence
  Description of Artificial Sequence: Synthetic oligonucleotide
  Antisense strand to SEQ ID NO: 908040
gauucacagaagcucauuu

SEQ ID NO: 908042 - RNA, 19 nt, Artificial Sequence
  Description of Artificial Sequence: Synthetic oligonucleotide
  Sense strand starting at position 361 of SEQ ID NO: 589057
augagcuucugugaaucca

SEQ ID NO: 908043 - RNA, 19 nt, Artificial Sequence
  Description of Artificial Sequence: Synthetic oligonucleotide
  Antisense strand to SEQ ID NO: 908042
uggauucacagaagcucau

SEQ ID NO: 908044 - RNA, 19 nt, Artificial Sequence
  Description of Artificial Sequence: Synthetic oligonucleotide
  Sense strand starting at position 369 of SEQ ID NO: 589057
cugugaauccacuguuagu

SEQ ID NO: 908045 - RNA, 19 nt, Artificial Sequence
  Description of Artificial Sequence: Synthetic oligonucleotide
  Antisense strand to SEQ ID NO: 908044
acuaacaguggauucacag

SEQ ID NO: 908046 - RNA, 19 nt, Artificial Sequence
  Description of Artificial Sequence: Synthetic oligonucleotide
  Sense strand starting at position 428 of SEQ ID NO: 589057
ggcggucucuccuacaaau

SEQ ID NO: 908047 - RNA, 19 nt, Artificial Sequence
  Description of Artificial Sequence: Synthetic oligonucleotide
  Antisense strand to SEQ ID NO: 908046
auuuguaggagagaccgcc

SEQ ID NO: 908048 - RNA, 19 nt, Artificial Sequence
  Description of Artificial Sequence: Synthetic oligonucleotide
  Sense strand starting at position 430 of SEQ ID NO: 589057
cggucucuccuacaaaucu

SEQ ID NO: 908049 - RNA, 19 nt, Artificial Sequence
  Description of Artificial Sequence: Synthetic oligonucleotide
  Antisense strand to SEQ ID NO: 908048
agauuuguaggagagaccg

SEQ ID NO: 908050 - RNA, 19 nt, Artificial Sequence
  Description of Artificial Sequence: Synthetic oligonucleotide
  Sense strand starting at position 438 of SEQ ID NO: 589057
ccuacaaaucugugggcua

SEQ ID NO: 908051 - RNA, 19 nt, Artificial Sequence
  Description of Artificial Sequence: Synthetic oligonucleotide
  Antisense strand to SEQ ID NO: 908050
uagcccacagauuuguagg

SEQ ID NO: 908052 - RNA, 19 nt, Artificial Sequence
  Description of Artificial Sequence: Synthetic oligonucleotide
  Sense strand starting at position 443 of SEQ ID NO: 589057
aaaucugugggcuacucaa

SEQ ID NO: 908053 - RNA, 19 nt, Artificial Sequence
  Description of Artificial Sequence: Synthetic oligonucleotide
  Antisense strand to SEQ ID NO: 908052
uugaguagcccacagauuu

SEQ ID NO: 908054 - RNA, 19 nt, Artificial Sequence
  Description of Artificial Sequence: Synthetic oligonucleotide
  Sense strand starting at position 698 of SEQ ID NO: 589057
ucuuuagaaucuuaggauu

SEQ ID NO: 908055 - RNA, 19 nt, Artificial Sequence
  Description of Artificial Sequence: Synthetic oligonucleotide
  Antisense strand to SEQ ID NO: 908054
aauccuaagauucuaaaga

SEQ ID NO: 908056 - RNA, 19 nt, Artificial Sequence
  Description of Artificial Sequence: Synthetic oligonucleotide
  Sense strand starting at position 812 of SEQ ID NO: 589057
aaauccuucguucguggaa

SEQ ID NO: 908057 - RNA, 19 nt, Artificial Sequence
  Description of Artificial Sequence: Synthetic oligonucleotide
  Antisense strand to SEQ ID NO: 908056
uuccacgaacgaaggauuu

SEQ ID NO: 908058 - RNA, 19 nt, Artificial Sequence
  Description of Artificial Sequence: Synthetic oligonucleotide
  Sense strand starting at position 813 of SEQ ID NO: 589057
aauccuucguucguggaaa

SEQ ID NO: 908059 - RNA, 19 nt, Artificial Sequence
  Description of Artificial Sequence: Synthetic oligonucleotide
  Antisense strand to SEQ ID NO: 908058
uuuccacgaacgaaggauu

SEQ ID NO: 908060 - RNA, 19 nt, Artificial Sequence
  Description of Artificial Sequence: Synthetic oligonucleotide
  Sense strand starting at position 814 of SEQ ID NO: 589057
auccuucguucguggaaau

SEQ ID NO: 908061 - RNA, 19 nt, Artificial Sequence
  Description of Artificial Sequence: Synthetic oligonucleotide
  Antisense strand to SEQ ID NO: 908060
auuuccacgaacgaaggau

SEQ ID NO: 908062 - RNA, 19 nt, Artificial Sequence
  Description of Artificial Sequence: Synthetic oligonucleotide
  Sense strand starting at position 815 of SEQ ID NO: 589057
uccuucguucguggaaaua

SEQ ID NO: 908063 - RNA, 19 nt, Artificial Sequence
  Description of Artificial Sequence: Synthetic oligonucleotide
  Antisense strand to SEQ ID NO: 908062
uauuuccacgaacgaagga

SEQ ID NO: 908064 - RNA, 19 nt, Artificial Sequence
  Description of Artificial Sequence: Synthetic oligonucleotide
  Sense strand starting at position 1550 of SEQ ID NO: 589057
augugaauuguccaaacug

SEQ ID NO: 908065 - RNA, 19 nt, Artificial Sequence
  Description of Artificial Sequence: Synthetic oligonucleotide
  Antisense strand to SEQ ID NO: 908064
caguuuggacaauucacau

SEQ ID NO: 908066 - RNA, 19 nt, Artificial Sequence
  Description of Artificial Sequence: Synthetic oligonucleotide
  Sense strand starting at position 2565 of SEQ ID NO: 589057
gcuggcuugcuggaagacu

SEQ ID NO: 908067 - RNA, 19 nt, Artificial Sequence
  Description of Artificial Sequence: Synthetic oligonucleotide
  Antisense strand to SEQ ID NO: 908066
agucuuccagcaagccagc

SEQ ID NO: 908068 - RNA, 19 nt, Artificial Sequence
  Description of Artificial Sequence: Synthetic oligonucleotide
  Sense strand starting at position 2582 of SEQ ID NO: 589057
cuggaaggcuuauugggaa

SEQ ID NO: 908069 - RNA, 19 nt, Artificial Sequence
  Description of Artificial Sequence: Synthetic oligonucleotide
  Antisense strand to SEQ ID NO: 908068
uucccaauaagccuuccag

SEQ ID NO: 908070 - RNA, 19 nt, Artificial Sequence
  Description of Artificial Sequence: Synthetic oligonucleotide
  Sense strand starting at position 2585 of SEQ ID NO: 589057
gaaggcuuauugggaauau

SEQ ID NO: 908071 - RNA, 19 nt, Artificial Sequence
  Description of Artificial Sequence: Synthetic oligonucleotide
  Antisense strand to SEQ ID NO: 908070
auauucccaauaagccuuc

SEQ ID NO: 908072 - RNA, 19 nt, Artificial Sequence
  Description of Artificial Sequence: Synthetic oligonucleotide
  Sense strand starting at position 2586 of SEQ ID NO: 589057
aaggcuuauugggaauauu

SEQ ID NO: 908073 - RNA, 19 nt, Artificial Sequence
  Description of Artificial Sequence: Synthetic oligonucleotide
  Antisense strand to SEQ ID NO: 908072
aauauucccaauaagccuu

SEQ ID NO: 908074 - RNA, 19 nt, Artificial Sequence
  Description of Artificial Sequence: Synthetic oligonucleotide
  Sense strand starting at position 2589 of SEQ ID NO: 589057
gcuuauugggaauauucua

SEQ ID NO: 908075 - RNA, 19 nt, Artificial Sequence
  Description of Artificial Sequence: Synthetic oligonucleotide
  Antisense strand to SEQ ID NO: 908074
uagaauauucccaauaagc

SEQ ID NO: 908076 - RNA, 19 nt, Artificial Sequence
  Description of Artificial Sequence: Synthetic oligonucleotide
  Sense strand starting at position 2673 of SEQ ID NO: 589057
guccgacaagagugguuaa

SEQ ID NO: 908077 - RNA, 19 nt, Artificial Sequence
  Description of Artificial Sequence: Synthetic oligonucleotide
  Antisense strand to SEQ ID NO: 908076
uuaaccacucuugucggac

SEQ ID NO: 908078 - RNA, 19 nt, Artificial Sequence
  Description of Artificial Sequence: Synthetic oligonucleotide
  Sense strand starting at position 2864 of SEQ ID NO: 589057
guuaaagguuaagggauau

SEQ ID NO: 908079 - RNA, 19 nt, Artificial Sequence
  Description of Artificial Sequence: Synthetic oligonucleotide
  Antisense strand to SEQ ID NO: 908078
auaucccuuaaccuuuaac

SEQ ID NO: 908080 - RNA, 19 nt, Artificial Sequence
  Description of Artificial Sequence: Synthetic oligonucleotide
  Sense strand starting at position 2938 of SEQ ID NO: 589057
gagaaacuugcaugugaaa

SEQ ID NO: 908081 - RNA, 19 nt, Artificial Sequence
  Description of Artificial Sequence: Synthetic oligonucleotide
  Antisense strand to SEQ ID NO: 908080
uuucacaugcaaguuucuc

SEQ ID NO: 908082 - RNA, 19 nt, Artificial Sequence
  Description of Artificial Sequence: Synthetic oligonucleotide
  Sense strand starting at position 2959 of SEQ ID NO: 589057
aaacgugaaccaggauauu

SEQ ID NO: 908083 - RNA, 19 nt, Artificial Sequence
  Description of Artificial Sequence: Synthetic oligonucleotide
  Antisense strand to SEQ ID NO: 908082
aauauccugguucacguuu

SEQ ID NO: 908084 - RNA, 19 nt, Artificial Sequence
  Description of Artificial Sequence: Synthetic oligonucleotide
  Sense strand starting at position 3055 of SEQ ID NO: 589057
cuccuugugacuugggaaa

SEQ ID NO: 908085 - RNA, 19 nt, Artificial Sequence
  Description of Artificial Sequence: Synthetic oligonucleotide
  Antisense strand to SEQ ID NO: 908084
uuucccaagucacaaggag

SEQ ID NO: 908086 - RNA, 19 nt, Artificial Sequence
  Description of Artificial Sequence: Synthetic oligonucleotide
  Sense strand starting at position 3057 of SEQ ID NO: 589057
ccuugugacuugggaaagu

SEQ ID NO: 908087 - RNA, 19 nt, Artificial Sequence
  Description of Artificial Sequence: Synthetic oligonucleotide
  Antisense strand to SEQ ID NO: 908086
acuuucccaagucacaagg

SEQ ID NO: 908088 - RNA, 19 nt, Artificial Sequence
  Description of Artificial Sequence: Synthetic oligonucleotide
  Sense strand starting at position 3243 of SEQ ID NO: 589057
auugcucuucuaugagaug

SEQ ID NO: 908089 - RNA, 19 nt, Artificial Sequence
  Description of Artificial Sequence: Synthetic oligonucleotide
  Antisense strand to SEQ ID NO: 908088
caucucauagaagagcaau

SEQ ID NO: 908090 - RNA, 19 nt, Artificial Sequence
  Description of Artificial Sequence: Synthetic oligonucleotide
  Sense strand starting at position 3246 of SEQ ID NO: 589057
gcucuucuaugagaugcaa

SEQ ID NO: 908091 - RNA, 19 nt, Artificial Sequence
  Description of Artificial Sequence: Synthetic oligonucleotide
  Antisense strand to SEQ ID NO: 908090
uugcaucucauagaagagc

SEQ ID NO: 908092 - RNA, 19 nt, Artificial Sequence
  Description of Artificial Sequence: Synthetic oligonucleotide
  Sense strand starting at position 3407 of SEQ ID NO: 589057
guuuaaagaacuggagcaa

SEQ ID NO: 908093 - RNA, 19 nt, Artificial Sequence
  Description of Artificial Sequence: Synthetic oligonucleotide
  Antisense strand to SEQ ID NO: 908092
uugcuccaguucuuuaaac

SEQ ID NO: 908094 - RNA, 19 nt, Artificial Sequence
  Description of Artificial Sequence: Synthetic oligonucleotide
  Sense strand starting at position 3433 of SEQ ID NO: 589057
caggaaagguuacagaaau

SEQ ID NO: 908095 - RNA, 19 nt, Artificial Sequence
  Description of Artificial Sequence: Synthetic oligonucleotide
  Antisense strand to SEQ ID NO: 908094
auuucuguaaccuuuccug

SEQ ID NO: 908096 - RNA, 19 nt, Artificial Sequence
  Description of Artificial Sequence: Synthetic oligonucleotide
  Sense strand starting at position 3534 of SEQ ID NO: 589057
auaaguuaaauugggaguu

SEQ ID NO: 908097 - RNA, 19 nt, Artificial Sequence
  Description of Artificial Sequence: Synthetic oligonucleotide
  Antisense strand to SEQ ID NO: 908096
aacucccaauuuaacuuau

SEQ ID NO: 908098 - RNA, 19 nt, Artificial Sequence
  Description of Artificial Sequence: Synthetic oligonucleotide
  Sense strand starting at position 3535 of SEQ ID NO: 589057
uaaguuaaauugggaguuu

SEQ ID NO: 908099 - RNA, 19 nt, Artificial Sequence
  Description of Artificial Sequence: Synthetic oligonucleotide
  Antisense strand to SEQ ID NO: 908098
aaacucccaauuuaacuua

SEQ ID NO: 908100 - RNA, 19 nt, Artificial Sequence
  Description of Artificial Sequence: Synthetic oligonucleotide
  Sense strand starting at position 3536 of SEQ ID NO: 589057
aaguuaaauugggaguuua

SEQ ID NO: 908101 - RNA, 19 nt, Artificial Sequence
  Description of Artificial Sequence: Synthetic oligonucleotide
  Antisense strand to SEQ ID NO: 908100
uaaacucccaauuuaacuu

SEQ ID NO: 908102 - RNA, 19 nt, Artificial Sequence
  Description of Artificial Sequence: Synthetic oligonucleotide
  Sense strand starting at position 3544 of SEQ ID NO: 589057
uugggaguuuagcccuaua

SEQ ID NO: 908103 - RNA, 19 nt, Artificial Sequence
  Description of Artificial Sequence: Synthetic oligonucleotide
  Antisense strand to SEQ ID NO: 908102
uauagggcuaaacucccaa

SEQ ID NO: 908104 - RNA, 19 nt, Artificial Sequence
  Description of Artificial Sequence: Synthetic oligonucleotide
  Sense strand starting at position 3547 of SEQ ID NO: 589057
ggaguuuagcccuauaugg

SEQ ID NO: 908105 - RNA, 19 nt, Artificial Sequence
  Description of Artificial Sequence: Synthetic oligonucleotide
  Antisense strand to SEQ ID NO: 908104
ccauauagggcuaaacucc

SEQ ID NO: 908106 - RNA, 19 nt, Artificial Sequence
  Description of Artificial Sequence: Synthetic oligonucleotide
  Sense strand starting at position 3549 of SEQ ID NO: 589057
aguuuagcccuauauggga

SEQ ID NO: 908107 - RNA, 19 nt, Artificial Sequence
  Description of Artificial Sequence: Synthetic oligonucleotide
  Antisense strand to SEQ ID NO: 908106
ucccauauagggcuaaacu

SEQ ID NO: 908108 - RNA, 19 nt, Artificial Sequence
  Description of Artificial Sequence: Synthetic oligonucleotide
  Sense strand starting at position 3554 of SEQ ID NO: 589057
agcccuauaugggagacau

SEQ ID NO: 908109 - RNA, 19 nt, Artificial Sequence
  Description of Artificial Sequence: Synthetic oligonucleotide
  Antisense strand to SEQ ID NO: 908108
augucucccauauagggcu

SEQ ID NO: 908110 - RNA, 19 nt, Artificial Sequence
  Description of Artificial Sequence: Synthetic oligonucleotide
  Sense strand starting at position 3635 of SEQ ID NO: 589057
gagucuucuggccgggagu

SEQ ID NO: 908111 - RNA, 19 nt, Artificial Sequence
  Description of Artificial Sequence: Synthetic oligonucleotide
  Antisense strand to SEQ ID NO: 908110
acucccggccagaagacuc

SEQ ID NO: 908112 - RNA, 19 nt, Artificial Sequence
  Description of Artificial Sequence: Synthetic oligonucleotide
  Sense strand starting at position 3651 of SEQ ID NO: 589057
agugguggcucacgcaaau

SEQ ID NO: 908113 - RNA, 19 nt, Artificial Sequence
  Description of Artificial Sequence: Synthetic oligonucleotide
  Antisense strand to SEQ ID NO: 908112
auuugcgugagccaccacu

SEQ ID NO: 908114 - RNA, 19 nt, Artificial Sequence
  Description of Artificial Sequence: Synthetic oligonucleotide
  Sense strand starting at position 3937 of SEQ ID NO: 589057
agaggagucuucuaaccac

SEQ ID NO: 908115 - RNA, 19 nt, Artificial Sequence
  Description of Artificial Sequence: Synthetic oligonucleotide
  Antisense strand to SEQ ID NO: 908114
gugguuagaagacuccucu

SEQ ID NO: 908116 - RNA, 19 nt, Artificial Sequence
  Description of Artificial Sequence: Synthetic oligonucleotide
  Sense strand starting at position 20 of SEQ ID NO: 589058
ccucuacuacccggaaaga

SEQ ID NO: 908117 - RNA, 19 nt, Artificial Sequence
  Description of Artificial Sequence: Synthetic oligonucleotide
  Antisense strand to SEQ ID NO: 908116
ucuuuccggguaguagagg

SEQ ID NO: 908118 - RNA, 19 nt, Artificial Sequence
  Description of Artificial Sequence: Synthetic oligonucleotide
  Sense strand starting at position 74 of SEQ ID NO: 589058
ugaugaacacggugugaga

SEQ ID NO: 908119 - RNA, 19 nt, Artificial Sequence
  Description of Artificial Sequence: Synthetic oligonucleotide
  Antisense strand to SEQ ID NO: 908118
ucucacaccguguucauca

SEQ ID NO: 908120 - RNA, 19 nt, Artificial Sequence
  Description of Artificial Sequence: Synthetic oligonucleotide
  Sense strand starting at position 428 of SEQ ID NO: 589058
agaagaggucucggucaua

SEQ ID NO: 908121 - RNA, 19 nt, Artificial Sequence
  Description of Artificial Sequence: Synthetic oligonucleotide
  Antisense strand to SEQ ID NO: 908120
uaugaccgagaccucuucu

SEQ ID NO: 908122 - RNA, 19 nt, Artificial Sequence
  Description of Artificial Sequence: Synthetic oligonucleotide
  Sense strand starting at position 463 of SEQ ID NO: 589058
ggcaguagucccuaggacu

SEQ ID NO: 908123 - RNA, 19 nt, Artificial Sequence
  Description of Artificial Sequence: Synthetic oligonucleotide
  Antisense strand to SEQ ID NO: 908122
aguccuagggacuacugcc

SEQ ID NO: 908124 - RNA, 19 nt, Artificial Sequence
  Description of Artificial Sequence: Synthetic oligonucleotide
  Sense strand starting at position 623 of SEQ ID NO: 589058
agccaucagccacauagaa

SEQ ID NO: 908125 - RNA, 19 nt, Artificial Sequence
  Description of Artificial Sequence: Synthetic oligonucleotide
  Antisense strand to SEQ ID NO: 908124
uucuauguggcugauggcu

SEQ ID NO: 908126 - RNA, 19 nt, Artificial Sequence
  Description of Artificial Sequence: Synthetic oligonucleotide
  Sense strand starting at position 667 of SEQ ID NO: 589058
gugcuacaagucgaauauu

SEQ ID NO: 908127 - RNA, 19 nt, Artificial Sequence
  Description of Artificial Sequence: Synthetic oligonucleotide
  Antisense strand to SEQ ID NO: 908126
aauauucgacuuguagcac

SEQ ID NO: 908128 - RNA, 19 nt, Artificial Sequence
  Description of Artificial Sequence: Synthetic oligonucleotide
  Sense strand starting at position 677 of SEQ ID NO: 589058
ucgaauauuuaggaaggaa

SEQ ID NO: 908129 - RNA, 19 nt, Artificial Sequence
  Description of Artificial Sequence: Synthetic oligonucleotide
  Antisense strand to SEQ ID NO: 908128
uuccuuccuaaauauucga

SEQ ID NO: 908130 - RNA, 19 nt, Artificial Sequence
  Description of Artificial Sequence: Synthetic oligonucleotide
  Sense strand starting at position 1180 of SEQ ID NO: 589058
ggagccucagccugaauca

SEQ ID NO: 908131 - RNA, 19 nt, Artificial Sequence
  Description of Artificial Sequence: Synthetic oligonucleotide
  Antisense strand to SEQ ID NO: 908130
ugauucaggcugaggcucc

SEQ ID NO: 908132 - RNA, 19 nt, Artificial Sequence
  Description of Artificial Sequence: Synthetic oligonucleotide
  Sense strand starting at position 1205 of SEQ ID NO: 589058
cgacaaaucgcagaaugua

SEQ ID NO: 908133 - RNA, 19 nt, Artificial Sequence
  Description of Artificial Sequence: Synthetic oligonucleotide
  Antisense strand to SEQ ID NO: 908132
uacauucugcgauuugucg

SEQ ID NO: 908134 - RNA, 19 nt, Artificial Sequence
  Description of Artificial Sequence: Synthetic oligonucleotide
  Sense strand starting at position 1233 of SEQ ID NO: 589058
uggugagauucuguccaca

SEQ ID NO: 908135 - RNA, 19 nt, Artificial Sequence
  Description of Artificial Sequence: Synthetic oligonucleotide
  Antisense strand to SEQ ID NO: 908134
uguggacagaaucucacca

SEQ ID NO: 908136 - RNA, 19 nt, Artificial Sequence
  Description of Artificial Sequence: Synthetic oligonucleotide
  Sense strand starting at position 1235 of SEQ ID NO: 589058
gugagauucuguccacauu

SEQ ID NO: 908137 - RNA, 19 nt, Artificial Sequence
  Description of Artificial Sequence: Synthetic oligonucleotide
  Antisense strand to SEQ ID NO: 908136
aauguggacagaaucucac

SEQ ID NO: 908138 - RNA, 19 nt, Artificial Sequence
  Description of Artificial Sequence: Synthetic oligonucleotide
  Sense strand starting at position 1521 of SEQ ID NO: 589058
gagaauaagugucucauaa

SEQ ID NO: 908139 - RNA, 19 nt, Artificial Sequence
  Description of Artificial Sequence: Synthetic oligonucleotide
  Antisense strand to SEQ ID NO: 908138
uuaugagacacuuauucuc

SEQ ID NO: 908140 - RNA, 19 nt, Artificial Sequence
  Description of Artificial Sequence: Synthetic oligonucleotide
  Sense strand starting at position 1529 of SEQ ID NO: 589058
gugucucauaauugugaga

SEQ ID NO: 908141 - RNA, 19 nt, Artificial Sequence
  Description of Artificial Sequence: Synthetic oligonucleotide
  Antisense strand to SEQ ID NO: 908140
ucucacaauuaugagacac

SEQ ID NO: 908142 - RNA, 19 nt, Artificial Sequence
  Description of Artificial Sequence: Synthetic oligonucleotide
  Sense strand starting at position 1631 of SEQ ID NO: 589058
gaacacgaguuacuaguaa

SEQ ID NO: 908143 - RNA, 19 nt, Artificial Sequence
  Description of Artificial Sequence: Synthetic oligonucleotide
  Antisense strand to SEQ ID NO: 908142
uuacuaguaacucguguuc

SEQ ID NO: 908144 - RNA, 19 nt, Artificial Sequence
  Description of Artificial Sequence: Synthetic oligonucleotide
  Sense strand starting at position 2040 of SEQ ID NO: 589058
gcgguaggcgcguuaacau

SEQ ID NO: 908145 - RNA, 19 nt, Artificial Sequence
  Description of Artificial Sequence: Synthetic oligonucleotide
  Antisense strand to SEQ ID NO: 908144
auguuaacgcgccuaccgc

SEQ ID NO: 908146 - RNA, 19 nt, Artificial Sequence
  Description of Artificial Sequence: Synthetic oligonucleotide
  Sense strand starting at position 2097 of SEQ ID NO: 589058
guccgaaggaaguacuaua

SEQ ID NO: 908147 - RNA, 19 nt, Artificial Sequence
  Description of Artificial Sequence: Synthetic oligonucleotide
  Antisense strand to SEQ ID NO: 908146
uauaguacuuccuucggac

SEQ ID NO: 908148 - RNA, 19 nt, Artificial Sequence
  Description of Artificial Sequence: Synthetic oligonucleotide
  Sense strand starting at position 2168 of SEQ ID NO: 589058
ucccaaauucccggagguu

SEQ ID NO: 908149 - RNA, 19 nt, Artificial Sequence
  Description of Artificial Sequence: Synthetic oligonucleotide
  Antisense strand to SEQ ID NO: 908148
aaccuccgggaauuuggga

SEQ ID NO: 908150 - RNA, 19 nt, Artificial Sequence
  Description of Artificial Sequence: Synthetic oligonucleotide
  Sense strand starting at position 2223 of SEQ ID NO: 589058
augcgauccugguuggaga

SEQ ID NO: 908151 - RNA, 19 nt, Artificial Sequence
  Description of Artificial Sequence: Synthetic oligonucleotide
  Antisense strand to SEQ ID NO: 908150
ucuccaaccaggaucgcau

SEQ ID NO: 908152 - RNA, 19 nt, Artificial Sequence
  Description of Artificial Sequence: Synthetic oligonucleotide
  Sense strand starting at position 2225 of SEQ ID NO: 589058
gcgauccugguuggagaaa

SEQ ID NO: 908153 - RNA, 19 nt, Artificial Sequence
  Description of Artificial Sequence: Synthetic oligonucleotide
  Antisense strand to SEQ ID NO: 908152
uuucuccaaccaggaucgc

SEQ ID NO: 908154 - RNA, 19 nt, Artificial Sequence
  Description of Artificial Sequence: Synthetic oligonucleotide
  Sense strand starting at position 2281 of SEQ ID NO: 589058
ugacuaucgacaggacauu

SEQ ID NO: 908155 - RNA, 19 nt, Artificial Sequence
  Description of Artificial Sequence: Synthetic oligonucleotide
  Antisense strand to SEQ ID NO: 908154
aauguccugucgauaguca

SEQ ID NO: 908156 - RNA, 19 nt, Artificial Sequence
  Description of Artificial Sequence: Synthetic oligonucleotide
  Sense strand starting at position 2334 of SEQ ID NO: 589058
auaauagcuagacgaugua

SEQ ID NO: 908157 - RNA, 19 nt, Artificial Sequence
  Description of Artificial Sequence: Synthetic oligonucleotide
  Antisense strand to SEQ ID NO: 908156
uacaucgucuagcuauuau

SEQ ID NO: 908158 - RNA, 19 nt, Artificial Sequence
  Description of Artificial Sequence: Synthetic oligonucleotide
  Sense strand starting at position 2347 of SEQ ID NO: 589058
gauguaggacauuguucuu

SEQ ID NO: 908159 - RNA, 19 nt, Artificial Sequence
  Description of Artificial Sequence: Synthetic oligonucleotide
  Antisense strand to SEQ ID NO: 908158
aagaacaauguccuacauc

SEQ ID NO: 908160 - RNA, 19 nt, Artificial Sequence
  Description of Artificial Sequence: Synthetic oligonucleotide
  Sense strand starting at position 2350 of SEQ ID NO: 589058
guaggacauuguucuuaua

SEQ ID NO: 908161 - RNA, 19 nt, Artificial Sequence
  Description of Artificial Sequence: Synthetic oligonucleotide
  Antisense strand to SEQ ID NO: 908160
uauaagaacaauguccuac

SEQ ID NO: 908162 - RNA, 19 nt, Artificial Sequence
  Description of Artificial Sequence: Synthetic oligonucleotide
  Sense strand starting at position 2352 of SEQ ID NO: 589058
aggacauuguucuuauauu

SEQ ID NO: 908163 - RNA, 19 nt, Artificial Sequence
  Description of Artificial Sequence: Synthetic oligonucleotide
  Antisense strand to SEQ ID NO: 908162
aauauaagaacaauguccu

SEQ ID NO: 908164 - RNA, 19 nt, Artificial Sequence
  Description of Artificial Sequence: Synthetic oligonucleotide
  Sense strand starting at position 2403 of SEQ ID NO: 589058
augcuuguaguuuaauuga

SEQ ID NO: 908165 - RNA, 19 nt, Artificial Sequence
  Description of Artificial Sequence: Synthetic oligonucleotide
  Antisense strand to SEQ ID NO: 908164
ucaauuaaacuacaagcau

SEQ ID NO: 908166 - RNA, 19 nt, Artificial Sequence
  Description of Artificial Sequence: Synthetic oligonucleotide
  Sense strand starting at position 2468 of SEQ ID NO: 589058
agugaagaauuguuaaauc

SEQ ID NO: 908167 - RNA, 19 nt, Artificial Sequence
  Description of Artificial Sequence: Synthetic oligonucleotide
  Antisense strand to SEQ ID NO: 908166
gauuuaacaauucuucacu

SEQ ID NO: 908168 - RNA, 19 nt, Artificial Sequence
  Description of Artificial Sequence: Synthetic oligonucleotide
  Sense strand starting at position 2479 of SEQ ID NO: 589058
guuaaaucuguauaauacg

SEQ ID NO: 908169 - RNA, 19 nt, Artificial Sequence
  Description of Artificial Sequence: Synthetic oligonucleotide
  Antisense strand to SEQ ID NO: 908168
cguauuauacagauuuaac

SEQ ID NO: 908170 - RNA, 19 nt, Artificial Sequence
  Description of Artificial Sequence: Synthetic oligonucleotide
  Sense strand starting at position 2490 of SEQ ID NO: 589058
auaauacgugcuuaugaug

SEQ ID NO: 908171 - RNA, 19 nt, Artificial Sequence
  Description of Artificial Sequence: Synthetic oligonucleotide
  Antisense strand to SEQ ID NO: 908170
caucauaagcacguauuau

SEQ ID NO: 908172 - RNA, 19 nt, Artificial Sequence
  Description of Artificial Sequence: Synthetic oligonucleotide
  Sense strand starting at position 2625 of SEQ ID NO: 589058
gaaguaugccguuaaauuc

SEQ ID NO: 908173 - RNA, 19 nt, Artificial Sequence
  Description of Artificial Sequence: Synthetic oligonucleotide
  Antisense strand to SEQ ID NO: 908172
gaauuuaacggcauacuuc

SEQ ID NO: 908174 - RNA, 19 nt, Artificial Sequence
  Description of Artificial Sequence: Synthetic oligonucleotide
  Sense strand starting at position 2643 of SEQ ID NO: 589058
caaaguugccaagggaagu

SEQ ID NO: 908175 - RNA, 19 nt, Artificial Sequence
  Description of Artificial Sequence: Synthetic oligonucleotide
  Antisense strand to SEQ ID NO: 908174
acuucccuuggcaacuuug

SEQ ID NO: 908176 - RNA, 19 nt, Artificial Sequence
  Description of Artificial Sequence: Synthetic oligonucleotide
  Sense strand starting at position 2677 of SEQ ID NO: 589058
uagcuuuaugaauaagguu

SEQ ID NO: 908177 - RNA, 19 nt, Artificial Sequence
  Description of Artificial Sequence: Synthetic oligonucleotide
  Antisense strand to SEQ ID NO: 908176
aaccuuauucauaaagcua

SEQ ID NO: 908178 - RNA, 19 nt, Artificial Sequence
  Description of Artificial Sequence: Synthetic oligonucleotide
  Sense strand starting at position 2683 of SEQ ID NO: 589058
uaugaauaagguugugaaa

SEQ ID NO: 908179 - RNA, 19 nt, Artificial Sequence
  Description of Artificial Sequence: Synthetic oligonucleotide
  Antisense strand to SEQ ID NO: 908178
uuucacaaccuuauucaua

SEQ ID NO: 908180 - RNA, 19 nt, Artificial Sequence
  Description of Artificial Sequence: Synthetic oligonucleotide
  Sense strand starting at position 2726 of SEQ ID NO: 589058
acgaguaacaucugugauc

SEQ ID NO: 908181 - RNA, 19 nt, Artificial Sequence
  Description of Artificial Sequence: Synthetic oligonucleotide
  Antisense strand to SEQ ID NO: 908180
gaucacagauguuacucgu

SEQ ID NO: 908182 - RNA, 19 nt, Artificial Sequence
  Description of Artificial Sequence: Synthetic oligonucleotide
  Sense strand starting at position 2727 of SEQ ID NO: 589058
cgaguaacaucugugauca

SEQ ID NO: 908183 - RNA, 19 nt, Artificial Sequence
  Description of Artificial Sequence: Synthetic oligonucleotide
  Antisense strand to SEQ ID NO: 908182
ugaucacagauguuacucg

SEQ ID NO: 908184 - RNA, 19 nt, Artificial Sequence
  Description of Artificial Sequence: Synthetic oligonucleotide
  Sense strand starting at position 2735 of SEQ ID NO: 589058
aucugugaucagcaggguu

SEQ ID NO: 908185 - RNA, 19 nt, Artificial Sequence
  Description of Artificial Sequence: Synthetic oligonucleotide
  Antisense strand to SEQ ID NO: 908184
aacccugcugaucacagau

SEQ ID NO: 908186 - RNA, 19 nt, Artificial Sequence
  Description of Artificial Sequence: Synthetic oligonucleotide
  Sense strand starting at position 2767 of SEQ ID NO: 589058
ggaggaagcuagcuguuca

SEQ ID NO: 908187 - RNA, 19 nt, Artificial Sequence
  Description of Artificial Sequence: Synthetic oligonucleotide
  Antisense strand to SEQ ID NO: 908186
ugaacagcuagcuuccucc

SEQ ID NO: 908188 - RNA, 19 nt, Artificial Sequence
  Description of Artificial Sequence: Synthetic oligonucleotide
  Sense strand starting at position 2887 of SEQ ID NO: 589058
auacccaucugacuguuua

SEQ ID NO: 908189 - RNA, 19 nt, Artificial Sequence
  Description of Artificial Sequence: Synthetic oligonucleotide
  Antisense strand to SEQ ID NO: 908188
uaaacagucagauggguau

SEQ ID NO: 908190 - RNA, 19 nt, Artificial Sequence
  Description of Artificial Sequence: Synthetic oligonucleotide
  Sense strand starting at position 2891 of SEQ ID NO: 589058
ccaucugacuguuuaaaga

SEQ ID NO: 908191 - RNA, 19 nt, Artificial Sequence
  Description of Artificial Sequence: Synthetic oligonucleotide
  Antisense strand to SEQ ID NO: 908190
ucuuuaaacagucagaugg

SEQ ID NO: 908192 - RNA, 19 nt, Artificial Sequence
  Description of Artificial Sequence: Synthetic oligonucleotide
  Sense strand starting at position 3654 of SEQ ID NO: 589058
auugcauuaguuuaguaca

SEQ ID NO: 908193 - RNA, 19 nt, Artificial Sequence
  Description of Artificial Sequence: Synthetic oligonucleotide
  Antisense strand to SEQ ID NO: 908192
uguacuaaacuaaugcaau

SEQ ID NO: 908194 - RNA, 19 nt, Artificial Sequence
  Description of Artificial Sequence: Synthetic oligonucleotide
  Sense strand starting at position 3759 of SEQ ID NO: 589058
ccaccaaugcaaugaugua

SEQ ID NO: 908195 - RNA, 19 nt, Artificial Sequence
  Description of Artificial Sequence: Synthetic oligonucleotide
  Antisense strand to SEQ ID NO: 908194
uacaucauugcauuggugg

SEQ ID NO: 908196 - RNA, 19 nt, Artificial Sequence
  Description of Artificial Sequence: Synthetic oligonucleotide
  Sense strand starting at position 63 of SEQ ID NO: 589059
cuacgacaacucugaaaua

SEQ ID NO: 908197 - RNA, 19 nt, Artificial Sequence
  Description of Artificial Sequence: Synthetic oligonucleotide
  Antisense strand to SEQ ID NO: 908196
uauuucagaguugucguag

SEQ ID NO: 908198 - RNA, 19 nt, Artificial Sequence
  Description of Artificial Sequence: Synthetic oligonucleotide
  Sense strand starting at position 354 of SEQ ID NO: 589059
augaccuugucucuacaga

SEQ ID NO: 908199 - RNA, 19 nt, Artificial Sequence
  Description of Artificial Sequence: Synthetic oligonucleotide
  Antisense strand to SEQ ID NO: 908198
ucuguagagacaaggucau

SEQ ID NO: 908200 - RNA, 19 nt, Artificial Sequence
  Description of Artificial Sequence: Synthetic oligonucleotide
  Sense strand starting at position 355 of SEQ ID NO: 589059
ugaccuugucucuacagaa

SEQ ID NO: 908201 - RNA, 19 nt, Artificial Sequence
  Description of Artificial Sequence: Synthetic oligonucleotide
  Antisense strand to SEQ ID NO: 908200
uucuguagagacaagguca

SEQ ID NO: 908202 - RNA, 19 nt, Artificial Sequence
  Description of Artificial Sequence: Synthetic oligonucleotide
  Sense strand starting at position 735 of SEQ ID NO: 589059
uggugacucaccugugaaa

SEQ ID NO: 908203 - RNA, 19 nt, Artificial Sequence
  Description of Artificial Sequence: Synthetic oligonucleotide
  Antisense strand to SEQ ID NO: 908202
uuucacaggugagucacca

SEQ ID NO: 908204 - RNA, 19 nt, Artificial Sequence
  Description of Artificial Sequence: Synthetic oligonucleotide
  Sense strand starting at position 737 of SEQ ID NO: 589059
gugacucaccugugaaaga

SEQ ID NO: 908205 - RNA, 19 nt, Artificial Sequence
  Description of Artificial Sequence: Synthetic oligonucleotide
  Antisense strand to SEQ ID NO: 908204
ucuuucacaggugagucac

SEQ ID NO: 908206 - RNA, 19 nt, Artificial Sequence
  Description of Artificial Sequence: Synthetic oligonucleotide
  Sense strand starting at position 738 of SEQ ID NO: 589059
ugacucaccugugaaagaa

SEQ ID NO: 908207 - RNA, 19 nt, Artificial Sequence
  Description of Artificial Sequence: Synthetic oligonucleotide
  Antisense strand to SEQ ID NO: 908206
uucuuucacaggugaguca

SEQ ID NO: 908208 - RNA, 19 nt, Artificial Sequence
  Description of Artificial Sequence: Synthetic oligonucleotide
  Sense strand starting at position 827 of SEQ ID NO: 589059
gcccaaugucuuuaaagcu

SEQ ID NO: 908209 - RNA, 19 nt, Artificial Sequence
  Description of Artificial Sequence: Synthetic oligonucleotide
  Antisense strand to SEQ ID NO: 908208
agcuuuaaagacauugggc

SEQ ID NO: 908210 - RNA, 19 nt, Artificial Sequence
  Description of Artificial Sequence: Synthetic oligonucleotide
  Sense strand starting at position 887 of SEQ ID NO: 589059
uguaucaucaugcauggga

SEQ ID NO: 908211 - RNA, 19 nt, Artificial Sequence
  Description of Artificial Sequence: Synthetic oligonucleotide
  Antisense strand to SEQ ID NO: 908210
ucccaugcaugaugauaca

SEQ ID NO: 908212 - RNA, 19 nt, Artificial Sequence
  Description of Artificial Sequence: Synthetic oligonucleotide
  Sense strand starting at position 889 of SEQ ID NO: 589059
uaucaucaugcaugggauu

SEQ ID NO: 908213 - RNA, 19 nt, Artificial Sequence
  Description of Artificial Sequence: Synthetic oligonucleotide
  Antisense strand to SEQ ID NO: 908212
aaucccaugcaugaugaua

SEQ ID NO: 908214 - RNA, 19 nt, Artificial Sequence
  Description of Artificial Sequence: Synthetic oligonucleotide
  Sense strand starting at position 900 of SEQ ID NO: 589059
augggauucuaugagguag

SEQ ID NO: 908215 - RNA, 19 nt, Artificial Sequence
  Description of Artificial Sequence: Synthetic oligonucleotide
  Antisense strand to SEQ ID NO: 908214
cuaccucauagaaucccau

SEQ ID NO: 908216 - RNA, 19 nt, Artificial Sequence
  Description of Artificial Sequence: Synthetic oligonucleotide
  Sense strand starting at position 918 of SEQ ID NO: 589059
gggacaaagucuccagugu

SEQ ID NO: 908217 - RNA, 19 nt, Artificial Sequence
  Description of Artificial Sequence: Synthetic oligonucleotide
  Antisense strand to SEQ ID NO: 908216
acacuggagacuuuguccc

SEQ ID NO: 908218 - RNA, 19 nt, Artificial Sequence
  Description of Artificial Sequence: Synthetic oligonucleotide
  Sense strand starting at position 932 of SEQ ID NO: 589059
agugucacauauguuaaca

SEQ ID NO: 908219 - RNA, 19 nt, Artificial Sequence
  Description of Artificial Sequence: Synthetic oligonucleotide
  Antisense strand to SEQ ID NO: 908218
uguuaacauaugugacacu

SEQ ID NO: 908220 - RNA, 19 nt, Artificial Sequence
  Description of Artificial Sequence: Synthetic oligonucleotide
  Sense strand starting at position 1010 of SEQ ID NO: 589059
gggacagaaucuccgguua

SEQ ID NO: 908221 - RNA, 19 nt, Artificial Sequence
  Description of Artificial Sequence: Synthetic oligonucleotide
  Antisense strand to SEQ ID NO: 908220
uaaccggagauucuguccc

SEQ ID NO: 908222 - RNA, 19 nt, Artificial Sequence
  Description of Artificial Sequence: Synthetic oligonucleotide
  Sense strand starting at position 1177 of SEQ ID NO: 589059
uggcucauucugggaagga

SEQ ID NO: 908223 - RNA, 19 nt, Artificial Sequence
  Description of Artificial Sequence: Synthetic oligonucleotide
  Antisense strand to SEQ ID NO: 908222
uccuucccagaaugagcca

SEQ ID NO: 908224 - RNA, 19 nt, Artificial Sequence
  Description of Artificial Sequence: Synthetic oligonucleotide
  Sense strand starting at position 1373 of SEQ ID NO: 589059
ugcgaccugaccugagaaa

SEQ ID NO: 908225 - RNA, 19 nt, Artificial Sequence
  Description of Artificial Sequence: Synthetic oligonucleotide
  Antisense strand to SEQ ID NO: 908224
uuucucaggucaggucgca

SEQ ID NO: 908226 - RNA, 19 nt, Artificial Sequence
  Description of Artificial Sequence: Synthetic oligonucleotide
  Sense strand starting at position 1477 of SEQ ID NO: 589059
gaaccugucugacccaaga

SEQ ID NO: 908227 - RNA, 19 nt, Artificial Sequence
  Description of Artificial Sequence: Synthetic oligonucleotide
  Antisense strand to SEQ ID NO: 908226
ucuugggucagacagguuc

SEQ ID NO: 908228 - RNA, 19 nt, Artificial Sequence
  Description of Artificial Sequence: Synthetic oligonucleotide
  Sense strand starting at position 1553 of SEQ ID NO: 589059
acauccacucccugaguau

SEQ ID NO: 908229 - RNA, 19 nt, Artificial Sequence
  Description of Artificial Sequence: Synthetic oligonucleotide
  Antisense strand to SEQ ID NO: 908228
auacucagggaguggaugu

SEQ ID NO: 908230 - RNA, 19 nt, Artificial Sequence
  Description of Artificial Sequence: Synthetic oligonucleotide
  Sense strand starting at position 1578 of SEQ ID NO: 589059
acaugacauucugcuaagu

SEQ ID NO: 908231 - RNA, 19 nt, Artificial Sequence
  Description of Artificial Sequence: Synthetic oligonucleotide
  Antisense strand to SEQ ID NO: 908230
acuuagcagaaugucaugu

SEQ ID NO: 908232 - RNA, 19 nt, Artificial Sequence
  Description of Artificial Sequence: Synthetic oligonucleotide
  Sense strand starting at position 1633 of SEQ ID NO: 589059
gauauuagcgccugaaacg

SEQ ID NO: 908233 - RNA, 19 nt, Artificial Sequence
  Description of Artificial Sequence: Synthetic oligonucleotide
  Antisense strand to SEQ ID NO: 908232
cguuucaggcgcuaauauc

SEQ ID NO: 908234 - RNA, 19 nt, Artificial Sequence
  Description of Artificial Sequence: Synthetic oligonucleotide
  Sense strand starting at position 1640 of SEQ ID NO: 589059
gcgccugaaacgggaaaua

SEQ ID NO: 908235 - RNA, 19 nt, Artificial Sequence
  Description of Artificial Sequence: Synthetic oligonucleotide
  Antisense strand to SEQ ID NO: 908234
uauuucccguuucaggcgc

SEQ ID NO: 908236 - RNA, 19 nt, Artificial Sequence
  Description of Artificial Sequence: Synthetic oligonucleotide
  Sense strand starting at position 1703 of SEQ ID NO: 589059
ugaccugagccucaguuau

SEQ ID NO: 908237 - RNA, 19 nt, Artificial Sequence
  Description of Artificial Sequence: Synthetic oligonucleotide
  Antisense strand to SEQ ID NO: 908236
auaacugaggcucagguca

SEQ ID NO: 908238 - RNA, 19 nt, Artificial Sequence
  Description of Artificial Sequence: Synthetic oligonucleotide
  Sense strand starting at position 1705 of SEQ ID NO: 589059
accugagccucaguuauau

SEQ ID NO: 908239 - RNA, 19 nt, Artificial Sequence
  Description of Artificial Sequence: Synthetic oligonucleotide
  Antisense strand to SEQ ID NO: 908238
auauaacugaggcucaggu

SEQ ID NO: 908240 - RNA, 19 nt, Artificial Sequence
  Description of Artificial Sequence: Synthetic oligonucleotide
  Sense strand starting at position 1735 of SEQ ID NO: 589059
gugguugugagguauacau

SEQ ID NO: 908241 - RNA, 19 nt, Artificial Sequence
  Description of Artificial Sequence: Synthetic oligonucleotide
  Antisense strand to SEQ ID NO: 908240
auguauaccucacaaccac

SEQ ID NO: 908242 - RNA, 19 nt, Artificial Sequence
  Description of Artificial Sequence: Synthetic oligonucleotide
  Sense strand starting at position 1737 of SEQ ID NO: 589059
gguugugagguauacauag

SEQ ID NO: 908243 - RNA, 19 nt, Artificial Sequence
  Description of Artificial Sequence: Synthetic oligonucleotide
  Antisense strand to SEQ ID NO: 908242
cuauguauaccucacaacc

SEQ ID NO: 908244 - RNA, 19 nt, Artificial Sequence
  Description of Artificial Sequence: Synthetic oligonucleotide
  Sense strand starting at position 1769 of SEQ ID NO: 589059
ggaacaaagugucuucuaa

SEQ ID NO: 908245 - RNA, 19 nt, Artificial Sequence
  Description of Artificial Sequence: Synthetic oligonucleotide
  Antisense strand to SEQ ID NO: 908244
uuagaagacacuuuguucc

SEQ ID NO: 908246 - RNA, 19 nt, Artificial Sequence
  Description of Artificial Sequence: Synthetic oligonucleotide
  Sense strand starting at position 1831 of SEQ ID NO: 589059
ggcuguuugcuuuacaggu

SEQ ID NO: 908247 - RNA, 19 nt, Artificial Sequence
  Description of Artificial Sequence: Synthetic oligonucleotide
  Antisense strand to SEQ ID NO: 908246
accuguaaagcaaacagcc

SEQ ID NO: 908248 - RNA, 19 nt, Artificial Sequence
  Description of Artificial Sequence: Synthetic oligonucleotide
  Sense strand starting at position 1878 of SEQ ID NO: 589059
ugaagcagucauuauuaau

SEQ ID NO: 908249 - RNA, 19 nt, Artificial Sequence
  Description of Artificial Sequence: Synthetic oligonucleotide
  Antisense strand to SEQ ID NO: 908248
auuaauaaugacugcuuca

SEQ ID NO: 908250 - RNA, 19 nt, Artificial Sequence
  Description of Artificial Sequence: Synthetic oligonucleotide
  Sense strand starting at position 1950 of SEQ ID NO: 589059
ucggcuuccaguugacaga

SEQ ID NO: 908251 - RNA, 19 nt, Artificial Sequence
  Description of Artificial Sequence: Synthetic oligonucleotide
  Antisense strand to SEQ ID NO: 908250
ucugucaacuggaagccga

SEQ ID NO: 908252 - RNA, 19 nt, Artificial Sequence
  Description of Artificial Sequence: Synthetic oligonucleotide
  Sense strand starting at position 2227 of SEQ ID NO: 589059
ggucgcauccacugacaca

SEQ ID NO: 908253 - RNA, 19 nt, Artificial Sequence
  Description of Artificial Sequence: Synthetic oligonucleotide
  Antisense strand to SEQ ID NO: 908252
ugugucaguggaugcgacc

SEQ ID NO: 908254 - RNA, 19 nt, Artificial Sequence
  Description of Artificial Sequence: Synthetic oligonucleotide
  Sense strand starting at position 2725 of SEQ ID NO: 589059
uggauugggaauugcaaau

SEQ ID NO: 908255 - RNA, 19 nt, Artificial Sequence
  Description of Artificial Sequence: Synthetic oligonucleotide
  Antisense strand to SEQ ID NO: 908254
auuugcaauucccaaucca

SEQ ID NO: 908256 - RNA, 19 nt, Artificial Sequence
  Description of Artificial Sequence: Synthetic oligonucleotide
  Sense strand starting at position 2833 of SEQ ID NO: 589059
ugaaguauuuagcauugaa

SEQ ID NO: 908257 - RNA, 19 nt, Artificial Sequence
  Description of Artificial Sequence: Synthetic oligonucleotide
  Antisense strand to SEQ ID NO: 908256
uucaaugcuaaauacuuca

SEQ ID NO: 908258 - RNA, 19 nt, Artificial Sequence
  Description of Artificial Sequence: Synthetic oligonucleotide
  Sense strand starting at position 3052 of SEQ ID NO: 589059
cuugccgaauucucuuauu

SEQ ID NO: 908259 - RNA, 19 nt, Artificial Sequence
  Description of Artificial Sequence: Synthetic oligonucleotide
  Antisense strand to SEQ ID NO: 908258
aauaagagaauucggcaag

SEQ ID NO: 908260 - RNA, 19 nt, Artificial Sequence
  Description of Artificial Sequence: Synthetic oligonucleotide
  Sense strand starting at position 3057 of SEQ ID NO: 589059
cgaauucucuuauugauuc

SEQ ID NO: 908261 - RNA, 19 nt, Artificial Sequence
  Description of Artificial Sequence: Synthetic oligonucleotide
  Antisense strand to SEQ ID NO: 908260
gaaucaauaagagaauucg

SEQ ID NO: 908262 - RNA, 19 nt, Artificial Sequence
  Description of Artificial Sequence: Synthetic oligonucleotide
  Sense strand starting at position 3104 of SEQ ID NO: 589059
uuagguuuccaugcgcauu

SEQ ID NO: 908263 - RNA, 19 nt, Artificial Sequence
  Description of Artificial Sequence: Synthetic oligonucleotide
  Antisense strand to SEQ ID NO: 908262
aaugcgcauggaaaccuaa

SEQ ID NO: 908264 - RNA, 19 nt, Artificial Sequence
  Description of Artificial Sequence: Synthetic oligonucleotide
  Sense strand starting at position 3324 of SEQ ID NO: 589059
cccaaagcccauuguguua

SEQ ID NO: 908265 - RNA, 19 nt, Artificial Sequence
  Description of Artificial Sequence: Synthetic oligonucleotide
  Antisense strand to SEQ ID NO: 908264
uaacacaaugggcuuuggg

SEQ ID NO: 908266 - RNA, 19 nt, Artificial Sequence
  Description of Artificial Sequence: Synthetic oligonucleotide
  Sense strand starting at position 3384 of SEQ ID NO: 589059
gagugagaacuacgauguu

SEQ ID NO: 908267 - RNA, 19 nt, Artificial Sequence
  Description of Artificial Sequence: Synthetic oligonucleotide
  Antisense strand to SEQ ID NO: 908266
aacaucguaguucucacuc

SEQ ID NO: 908268 - RNA, 19 nt, Artificial Sequence
  Description of Artificial Sequence: Synthetic oligonucleotide
  Sense strand starting at position 3495 of SEQ ID NO: 589059
ggcuaaguaguauaucauc

SEQ ID NO: 908269 - RNA, 19 nt, Artificial Sequence
  Description of Artificial Sequence: Synthetic oligonucleotide
  Antisense strand to SEQ ID NO: 908268
gaugauauacuacuuagcc

SEQ ID NO: 908270 - RNA, 19 nt, Artificial Sequence
  Description of Artificial Sequence: Synthetic oligonucleotide
  Sense strand starting at position 3500 of SEQ ID NO: 589059
aguaguauaucaucagaua

SEQ ID NO: 908271 - RNA, 19 nt, Artificial Sequence
  Description of Artificial Sequence: Synthetic oligonucleotide
  Antisense strand to SEQ ID NO: 908270
uaucugaugauauacuacu

SEQ ID NO: 908272 - RNA, 19 nt, Artificial Sequence
  Description of Artificial Sequence: Synthetic oligonucleotide
  Sense strand starting at position 3501 of SEQ ID NO: 589059
guaguauaucaucagauac

SEQ ID NO: 908273 - RNA, 19 nt, Artificial Sequence
  Description of Artificial Sequence: Synthetic oligonucleotide
  Antisense strand to SEQ ID NO: 908272
guaucugaugauauacuac

SEQ ID NO: 908274 - RNA, 19 nt, Artificial Sequence
  Description of Artificial Sequence: Synthetic oligonucleotide
  Sense strand starting at position 3875 of SEQ ID NO: 589059
cucuuaucauuagugaugu

SEQ ID NO: 908275 - RNA, 19 nt, Artificial Sequence
  Description of Artificial Sequence: Synthetic oligonucleotide
  Antisense strand to SEQ ID NO: 908274
acaucacuaaugauaagag

SEQ ID NO: 908276 - RNA, 19 nt, Artificial Sequence
  Description of Artificial Sequence: Synthetic oligonucleotide
  Sense strand starting at position 167 of SEQ ID NO: 589060
aauagugaugguugcaaga

SEQ ID NO: 908277 - RNA, 19 nt, Artificial Sequence
  Description of Artificial Sequence: Synthetic oligonucleotide
  Antisense strand to SEQ ID NO: 908276
ucuugcaaccaucacuauu

SEQ ID NO: 908278 - RNA, 19 nt, Artificial Sequence
  Description of Artificial Sequence: Synthetic oligonucleotide
  Sense strand starting at position 177 of SEQ ID NO: 589060
guugcaagacuuugugaaa

SEQ ID NO: 908279 - RNA, 19 nt, Artificial Sequence
  Description of Artificial Sequence: Synthetic oligonucleotide
  Antisense strand to SEQ ID NO: 908278
uuucacaaagucuugcaac

SEQ ID NO: 908280 - RNA, 19 nt, Artificial Sequence
  Description of Artificial Sequence: Synthetic oligonucleotide
  Sense strand starting at position 235 of SEQ ID NO: 589060
auauuaugguaugugaaug

SEQ ID NO: 908281 - RNA, 19 nt, Artificial Sequence
  Description of Artificial Sequence: Synthetic oligonucleotide
  Antisense strand to SEQ ID NO: 908280
cauucacauaccauaauau

SEQ ID NO: 908282 - RNA, 19 nt, Artificial Sequence
  Description of Artificial Sequence: Synthetic oligonucleotide
  Sense strand starting at position 246 of SEQ ID NO: 589060
ugugaaugauaucugaaua

SEQ ID NO: 908283 - RNA, 19 nt, Artificial Sequence
  Description of Artificial Sequence: Synthetic oligonucleotide
  Antisense strand to SEQ ID NO: 908282
uauucagauaucauucaca

SEQ ID NO: 908284 - RNA, 19 nt, Artificial Sequence
  Description of Artificial Sequence: Synthetic oligonucleotide
  Sense strand starting at position 317 of SEQ ID NO: 589060
agaguuaucuaaccugaca

SEQ ID NO: 908285 - RNA, 19 nt, Artificial Sequence
  Description of Artificial Sequence: Synthetic oligonucleotide
  Antisense strand to SEQ ID NO: 908284
ugucagguuagauaacucu

SEQ ID NO: 908286 - RNA, 19 nt, Artificial Sequence
  Description of Artificial Sequence: Synthetic oligonucleotide
  Sense strand starting at position 846 of SEQ ID NO: 589060
auugcacuuguagaguaaa

SEQ ID NO: 908287 - RNA, 19 nt, Artificial Sequence
  Description of Artificial Sequence: Synthetic oligonucleotide
  Antisense strand to SEQ ID NO: 908286
uuuacucuacaagugcaau

SEQ ID NO: 908288 - RNA, 19 nt, Artificial Sequence
  Description of Artificial Sequence: Synthetic oligonucleotide
  Sense strand starting at position 901 of SEQ ID NO: 589060
gguguuggugguuaagacu

SEQ ID NO: 908289 - RNA, 19 nt, Artificial Sequence
  Description of Artificial Sequence: Synthetic oligonucleotide
  Antisense strand to SEQ ID NO: 908288
agucuuaaccaccaacacc

SEQ ID NO: 908290 - RNA, 19 nt, Artificial Sequence
  Description of Artificial Sequence: Synthetic oligonucleotide
  Sense strand starting at position 1040 of SEQ ID NO: 589060
ccuuucuuccauggagaaa

SEQ ID NO: 908291 - RNA, 19 nt, Artificial Sequence
  Description of Artificial Sequence: Synthetic oligonucleotide
  Antisense strand to SEQ ID NO: 908290
uuucuccauggaagaaagg

SEQ ID NO: 908292 - RNA, 19 nt, Artificial Sequence
  Description of Artificial Sequence: Synthetic oligonucleotide
  Sense strand starting at position 1309 of SEQ ID NO: 589060
gugguacaauacucagaaa

SEQ ID NO: 908293 - RNA, 19 nt, Artificial Sequence
  Description of Artificial Sequence: Synthetic oligonucleotide
  Antisense strand to SEQ ID NO: 908292
uuucugaguauuguaccac

SEQ ID NO: 908294 - RNA, 19 nt, Artificial Sequence
  Description of Artificial Sequence: Synthetic oligonucleotide
  Sense strand starting at position 1335 of SEQ ID NO: 589060
gucugagguccucaaacuu

SEQ ID NO: 908295 - RNA, 19 nt, Artificial Sequence
  Description of Artificial Sequence: Synthetic oligonucleotide
  Antisense strand to SEQ ID NO: 908294
aaguuugaggaccucagac

SEQ ID NO: 908296 - RNA, 19 nt, Artificial Sequence
  Description of Artificial Sequence: Synthetic oligonucleotide
  Sense strand starting at position 1421 of SEQ ID NO: 589060
cugugucaugggcaaagaa

SEQ ID NO: 908297 - RNA, 19 nt, Artificial Sequence
  Description of Artificial Sequence: Synthetic oligonucleotide
  Antisense strand to SEQ ID NO: 908296
uucuuugcccaugacacag

SEQ ID NO: 908298 - RNA, 19 nt, Artificial Sequence
  Description of Artificial Sequence: Synthetic oligonucleotide
  Sense strand starting at position 2137 of SEQ ID NO: 589060
guacuucccagagaggcuu

SEQ ID NO: 908299 - RNA, 19 nt, Artificial Sequence
  Description of Artificial Sequence: Synthetic oligonucleotide
  Antisense strand to SEQ ID NO: 908298
aagccucucugggaaguac

SEQ ID NO: 908300 - RNA, 19 nt, Artificial Sequence
  Description of Artificial Sequence: Synthetic oligonucleotide
  Sense strand starting at position 2160 of SEQ ID NO: 589060
cugugcuugcucccggaau

SEQ ID NO: 908301 - RNA, 19 nt, Artificial Sequence
  Description of Artificial Sequence: Synthetic oligonucleotide
  Antisense strand to SEQ ID NO: 908300
auuccgggagcaagcacag

SEQ ID NO: 908302 - RNA, 19 nt, Artificial Sequence
  Description of Artificial Sequence: Synthetic oligonucleotide
  Sense strand starting at position 2210 of SEQ ID NO: 589060
gucuuuaaaguccaccaga

SEQ ID NO: 908303 - RNA, 19 nt, Artificial Sequence
  Description of Artificial Sequence: Synthetic oligonucleotide
  Antisense strand to SEQ ID NO: 908302
ucugguggacuuuaaagac

SEQ ID NO: 908304 - RNA, 19 nt, Artificial Sequence
  Description of Artificial Sequence: Synthetic oligonucleotide
  Sense strand starting at position 2260 of SEQ ID NO: 589060
gagauuuagccgcgaagga

SEQ ID NO: 908305 - RNA, 19 nt, Artificial Sequence
  Description of Artificial Sequence: Synthetic oligonucleotide
  Antisense strand to SEQ ID NO: 908304
uccuucgcggcuaaaucuc

SEQ ID NO: 908306 - RNA, 19 nt, Artificial Sequence
  Description of Artificial Sequence: Synthetic oligonucleotide
  Sense strand starting at position 2282 of SEQ ID NO: 589060
ugggaaugcugggcuuaca

SEQ ID NO: 908307 - RNA, 19 nt, Artificial Sequence
  Description of Artificial Sequence: Synthetic oligonucleotide
  Antisense strand to SEQ ID NO: 908306
uguaagcccagcauuccca

SEQ ID NO: 908308 - RNA, 19 nt, Artificial Sequence
  Description of Artificial Sequence: Synthetic oligonucleotide
  Sense strand starting at position 2419 of SEQ ID NO: 589060
ccucuugagccguacuaaa

SEQ ID NO: 908309 - RNA, 19 nt, Artificial Sequence
  Description of Artificial Sequence: Synthetic oligonucleotide
  Antisense strand to SEQ ID NO: 908308
uuuaguacggcucaagagg

SEQ ID NO: 908310 - RNA, 19 nt, Artificial Sequence
  Description of Artificial Sequence: Synthetic oligonucleotide
  Sense strand starting at position 2462 of SEQ ID NO: 589060
agaagucccucagucugaa

SEQ ID NO: 908311 - RNA, 19 nt, Artificial Sequence
  Description of Artificial Sequence: Synthetic oligonucleotide
  Antisense strand to SEQ ID NO: 908310
uucagacugagggacuucu

SEQ ID NO: 908312 - RNA, 19 nt, Artificial Sequence
  Description of Artificial Sequence: Synthetic oligonucleotide
  Sense strand starting at position 2539 of SEQ ID NO: 589060
cgggaacugcuucagucau

SEQ ID NO: 908313 - RNA, 19 nt, Artificial Sequence
  Description of Artificial Sequence: Synthetic oligonucleotide
  Antisense strand to SEQ ID NO: 908312
augacugaagcaguucccg

SEQ ID NO: 908314 - RNA, 19 nt, Artificial Sequence
  Description of Artificial Sequence: Synthetic oligonucleotide
  Sense strand starting at position 2579 of SEQ ID NO: 589060
gcacuucugcgggaggaga

SEQ ID NO: 908315 - RNA, 19 nt, Artificial Sequence
  Description of Artificial Sequence: Synthetic oligonucleotide
  Antisense strand to SEQ ID NO: 908314
ucuccucccgcagaagugc

SEQ ID NO: 908316 - RNA, 19 nt, Artificial Sequence
  Description of Artificial Sequence: Synthetic oligonucleotide
  Sense strand starting at position 2602 of SEQ ID NO: 589060
ugaauccuguguuccuuaa

SEQ ID NO: 908317 - RNA, 19 nt, Artificial Sequence
  Description of Artificial Sequence: Synthetic oligonucleotide
  Antisense strand to SEQ ID NO: 908316
uuaaggaacacaggauuca

SEQ ID NO: 908318 - RNA, 19 nt, Artificial Sequence
  Description of Artificial Sequence: Synthetic oligonucleotide
  Sense strand starting at position 2663 of SEQ ID NO: 589060
ccucgagcccuuuggaaau

SEQ ID NO: 908319 - RNA, 19 nt, Artificial Sequence
  Description of Artificial Sequence: Synthetic oligonucleotide
  Antisense strand to SEQ ID NO: 908318
auuuccaaagggcucgagg

SEQ ID NO: 908320 - RNA, 19 nt, Artificial Sequence
  Description of Artificial Sequence: Synthetic oligonucleotide
  Sense strand starting at position 2676 of SEQ ID NO: 589060
ggaaauuacuucuuaagca

SEQ ID NO: 908321 - RNA, 19 nt, Artificial Sequence
  Description of Artificial Sequence: Synthetic oligonucleotide
  Antisense strand to SEQ ID NO: 908320
ugcuuaagaaguaauuucc

SEQ ID NO: 908322 - RNA, 19 nt, Artificial Sequence
  Description of Artificial Sequence: Synthetic oligonucleotide
  Sense strand starting at position 2749 of SEQ ID NO: 589060
cuggguuacccaggaaaua

SEQ ID NO: 908323 - RNA, 19 nt, Artificial Sequence
  Description of Artificial Sequence: Synthetic oligonucleotide
  Antisense strand to SEQ ID NO: 908322
uauuuccuggguaacccag

SEQ ID NO: 908324 - RNA, 19 nt, Artificial Sequence
  Description of Artificial Sequence: Synthetic oligonucleotide
  Sense strand starting at position 2758 of SEQ ID NO: 589060
ccaggaaauaagugaguau

SEQ ID NO: 908325 - RNA, 19 nt, Artificial Sequence
  Description of Artificial Sequence: Synthetic oligonucleotide
  Antisense strand to SEQ ID NO: 908324
auacucacuuauuuccugg

SEQ ID NO: 908326 - RNA, 19 nt, Artificial Sequence
  Description of Artificial Sequence: Synthetic oligonucleotide
  Sense strand starting at position 2870 of SEQ ID NO: 589060
ugggucuuccuaugaaucu

SEQ ID NO: 908327 - RNA, 19 nt, Artificial Sequence
  Description of Artificial Sequence: Synthetic oligonucleotide
  Antisense strand to SEQ ID NO: 908326
agauucauaggaagaccca

SEQ ID NO: 908328 - RNA, 19 nt, Artificial Sequence
  Description of Artificial Sequence: Synthetic oligonucleotide
  Sense strand starting at position 2921 of SEQ ID NO: 589060
ucacaaaugucuuugagcu

SEQ ID NO: 908329 - RNA, 19 nt, Artificial Sequence
  Description of Artificial Sequence: Synthetic oligonucleotide
  Antisense strand to SEQ ID NO: 908328
agcucaaagacauuuguga

SEQ ID NO: 908330 - RNA, 19 nt, Artificial Sequence
  Description of Artificial Sequence: Synthetic oligonucleotide
  Sense strand starting at position 2984 of SEQ ID NO: 589060
uuguaagaagucugaagug

SEQ ID NO: 908331 - RNA, 19 nt, Artificial Sequence
  Description of Artificial Sequence: Synthetic oligonucleotide
  Antisense strand to SEQ ID NO: 908330
cacuucagacuucuuacaa

SEQ ID NO: 908332 - RNA, 19 nt, Artificial Sequence
  Description of Artificial Sequence: Synthetic oligonucleotide
  Sense strand starting at position 3383 of SEQ ID NO: 589060
ugguauucugcugaccaca

SEQ ID NO: 908333 - RNA, 19 nt, Artificial Sequence
  Description of Artificial Sequence: Synthetic oligonucleotide
  Antisense strand to SEQ ID NO: 908332
uguggucagcagaauacca

SEQ ID NO: 908334 - RNA, 19 nt, Artificial Sequence
  Description of Artificial Sequence: Synthetic oligonucleotide
  Sense strand starting at position 3473 of SEQ ID NO: 589060
agagguaucccagaccugu

SEQ ID NO: 908335 - RNA, 19 nt, Artificial Sequence
  Description of Artificial Sequence: Synthetic oligonucleotide
  Antisense strand to SEQ ID NO: 908334
acaggucugggauaccucu

SEQ ID NO: 908336 - RNA, 19 nt, Artificial Sequence
  Description of Artificial Sequence: Synthetic oligonucleotide
  Sense strand starting at position 3506 of SEQ ID NO: 589060
gcugcauccagagugcuuu

SEQ ID NO: 908337 - RNA, 19 nt, Artificial Sequence
  Description of Artificial Sequence: Synthetic oligonucleotide
  Antisense strand to SEQ ID NO: 908336
aaagcacucuggaugcagc

SEQ ID NO: 908338 - RNA, 19 nt, Artificial Sequence
  Description of Artificial Sequence: Synthetic oligonucleotide
  Sense strand starting at position 3565 of SEQ ID NO: 589060
ugccguggucguuucagaa

SEQ ID NO: 908339 - RNA, 19 nt, Artificial Sequence
  Description of Artificial Sequence: Synthetic oligonucleotide
  Antisense strand to SEQ ID NO: 908338
uucugaaacgaccacggca

SEQ ID NO: 908340 - RNA, 19 nt, Artificial Sequence
  Description of Artificial Sequence: Synthetic oligonucleotide
  Sense strand starting at position 3580 of SEQ ID NO: 589060
agaauugaauccgugauca

SEQ ID NO: 908341 - RNA, 19 nt, Artificial Sequence
  Description of Artificial Sequence: Synthetic oligonucleotide
  Antisense strand to SEQ ID NO: 908340
ugaucacggauucaauucu

SEQ ID NO: 908342 - RNA, 19 nt, Artificial Sequence
  Description of Artificial Sequence: Synthetic oligonucleotide
  Sense strand starting at position 3584 of SEQ ID NO: 589060
uugaauccgugaucaggaa

SEQ ID NO: 908343 - RNA, 19 nt, Artificial Sequence
  Description of Artificial Sequence: Synthetic oligonucleotide
  Antisense strand to SEQ ID NO: 908342
uuccugaucacggauucaa

SEQ ID NO: 908344 - RNA, 19 nt, Artificial Sequence
  Description of Artificial Sequence: Synthetic oligonucleotide
  Sense strand starting at position 3588 of SEQ ID NO: 589060
auccgugaucaggaaaugu

SEQ ID NO: 908345 - RNA, 19 nt, Artificial Sequence
  Description of Artificial Sequence: Synthetic oligonucleotide
  Antisense strand to SEQ ID NO: 908344
acauuuccugaucacggau

SEQ ID NO: 908346 - RNA, 19 nt, Artificial Sequence
  Description of Artificial Sequence: Synthetic oligonucleotide
  Sense strand starting at position 3597 of SEQ ID NO: 589060
caggaaauguucccagugu

SEQ ID NO: 908347 - RNA, 19 nt, Artificial Sequence
  Description of Artificial Sequence: Synthetic oligonucleotide
  Antisense strand to SEQ ID NO: 908346
acacugggaacauuuccug

SEQ ID NO: 908348 - RNA, 19 nt, Artificial Sequence
  Description of Artificial Sequence: Synthetic oligonucleotide
  Sense strand starting at position 3691 of SEQ ID NO: 589060
gagagaaguuucuugucag

SEQ ID NO: 908349 - RNA, 19 nt, Artificial Sequence
  Description of Artificial Sequence: Synthetic oligonucleotide
  Antisense strand to SEQ ID NO: 908348
cugacaagaaacuucucuc

SEQ ID NO: 908350 - RNA, 19 nt, Artificial Sequence
  Description of Artificial Sequence: Synthetic oligonucleotide
  Sense strand starting at position 3708 of SEQ ID NO: 589060
agagaaaucuugcuaccuu

SEQ ID NO: 908351 - RNA, 19 nt, Artificial Sequence
  Description of Artificial Sequence: Synthetic oligonucleotide
  Antisense strand to SEQ ID NO: 908350
aagguagcaagauuucucu

SEQ ID NO: 908352 - RNA, 19 nt, Artificial Sequence
  Description of Artificial Sequence: Synthetic oligonucleotide
  Sense strand starting at position 3715 of SEQ ID NO: 589060
ucuugcuaccuugaggaga

SEQ ID NO: 908353 - RNA, 19 nt, Artificial Sequence
  Description of Artificial Sequence: Synthetic oligonucleotide
  Antisense strand to SEQ ID NO: 908352
ucuccucaagguagcaaga

SEQ ID NO: 908354 - RNA, 19 nt, Artificial Sequence
  Description of Artificial Sequence: Synthetic oligonucleotide
  Sense strand starting at position 3741 of SEQ ID NO: 589060
uaacuagacugggauggau

SEQ ID NO: 908355 - RNA, 19 nt, Artificial Sequence
  Description of Artificial Sequence: Synthetic oligonucleotide
  Antisense strand to SEQ ID NO: 908354
auccaucccagucuaguua

SEQ ID NO: 908356 - RNA, 19 nt, Artificial Sequence
  Description of Artificial Sequence: Synthetic oligonucleotide
  Sense strand starting at position 14 of SEQ ID NO: 589061
ucuggacagaggugauauu

SEQ ID NO: 908357 - RNA, 19 nt, Artificial Sequence
  Description of Artificial Sequence: Synthetic oligonucleotide
  Antisense strand to SEQ ID NO: 908356
aauaucaccucuguccaga

SEQ ID NO: 908358 - RNA, 19 nt, Artificial Sequence
  Description of Artificial Sequence: Synthetic oligonucleotide
  Sense strand starting at position 108 of SEQ ID NO: 589061
ggcucaagaaaguauguua

SEQ ID NO: 908359 - RNA, 19 nt, Artificial Sequence
  Description of Artificial Sequence: Synthetic oligonucleotide
  Antisense strand to SEQ ID NO: 908358
uaacauacuuucuugagcc

SEQ ID NO: 908360 - RNA, 19 nt, Artificial Sequence
  Description of Artificial Sequence: Synthetic oligonucleotide
  Sense strand starting at position 111 of SEQ ID NO: 589061
ucaagaaaguauguuaucu

SEQ ID NO: 908361 - RNA, 19 nt, Artificial Sequence
  Description of Artificial Sequence: Synthetic oligonucleotide
  Antisense strand to SEQ ID NO: 908360
agauaacauacuuucuuga

SEQ ID NO: 908362 - RNA, 19 nt, Artificial Sequence
  Description of Artificial Sequence: Synthetic oligonucleotide
  Sense strand starting at position 115 of SEQ ID NO: 589061
gaaaguauguuaucuaaag

SEQ ID NO: 908363 - RNA, 19 nt, Artificial Sequence
  Description of Artificial Sequence: Synthetic oligonucleotide
  Antisense strand to SEQ ID NO: 908362
cuuuagauaacauacuuuc

SEQ ID NO: 908364 - RNA, 19 nt, Artificial Sequence
  Description of Artificial Sequence: Synthetic oligonucleotide
  Sense strand starting at position 116 of SEQ ID NO: 589061
aaaguauguuaucuaaagg

SEQ ID NO: 908365 - RNA, 19 nt, Artificial Sequence
  Description of Artificial Sequence: Synthetic oligonucleotide
  Antisense strand to SEQ ID NO: 908364
ccuuuagauaacauacuuu

SEQ ID NO: 908366 - RNA, 19 nt, Artificial Sequence
  Description of Artificial Sequence: Synthetic oligonucleotide
  Sense strand starting at position 123 of SEQ ID NO: 589061
guuaucuaaagguaagagu

SEQ ID NO: 908367 - RNA, 19 nt, Artificial Sequence
  Description of Artificial Sequence: Synthetic oligonucleotide
  Antisense strand to SEQ ID NO: 908366
acucuuaccuuuagauaac

SEQ ID NO: 908368 - RNA, 19 nt, Artificial Sequence
  Description of Artificial Sequence: Synthetic oligonucleotide
  Sense strand starting at position 145 of SEQ ID NO: 589061
augggagaaucuccuguuu

SEQ ID NO: 908369 - RNA, 19 nt, Artificial Sequence
  Description of Artificial Sequence: Synthetic oligonucleotide
  Antisense strand to SEQ ID NO: 908368
aaacaggagauucucccau

SEQ ID NO: 908370 - RNA, 19 nt, Artificial Sequence
  Description of Artificial Sequence: Synthetic oligonucleotide
  Sense strand starting at position 819 of SEQ ID NO: 589061
agcaaauaaugagcaauaa

SEQ ID NO: 908371 - RNA, 19 nt, Artificial Sequence
  Description of Artificial Sequence: Synthetic oligonucleotide
  Antisense strand to SEQ ID NO: 908370
uuauugcucauuauuugcu

SEQ ID NO: 908372 - RNA, 19 nt, Artificial Sequence
  Description of Artificial Sequence: Synthetic oligonucleotide
  Sense strand starting at position 839 of SEQ ID NO: 589061
agagauuaucaagggacgu

SEQ ID NO: 908373 - RNA, 19 nt, Artificial Sequence
  Description of Artificial Sequence: Synthetic oligonucleotide
  Antisense strand to SEQ ID NO: 908372
acgucccuugauaaucucu

SEQ ID NO: 908374 - RNA, 19 nt, Artificial Sequence
  Description of Artificial Sequence: Synthetic oligonucleotide
  Sense strand starting at position 840 of SEQ ID NO: 589061
gagauuaucaagggacguu

SEQ ID NO: 908375 - RNA, 19 nt, Artificial Sequence
  Description of Artificial Sequence: Synthetic oligonucleotide
  Antisense strand to SEQ ID NO: 908374
aacgucccuugauaaucuc

SEQ ID NO: 908376 - RNA, 19 nt, Artificial Sequence
  Description of Artificial Sequence: Synthetic oligonucleotide
  Sense strand starting at position 843 of SEQ ID NO: 589061
auuaucaagggacguuuaa

SEQ ID NO: 908377 - RNA, 19 nt, Artificial Sequence
  Description of Artificial Sequence: Synthetic oligonucleotide
  Antisense strand to SEQ ID NO: 908376
uuaaacgucccuugauaau

SEQ ID NO: 908378 - RNA, 19 nt, Artificial Sequence
  Description of Artificial Sequence: Synthetic oligonucleotide
  Sense strand starting at position 918 of SEQ ID NO: 589061
agguacaaaugccuugaaa

SEQ ID NO: 908379 - RNA, 19 nt, Artificial Sequence
  Description of Artificial Sequence: Synthetic oligonucleotide
  Antisense strand to SEQ ID NO: 908378
uuucaaggcauuuguaccu

SEQ ID NO: 908380 - RNA, 19 nt, Artificial Sequence
  Description of Artificial Sequence: Synthetic oligonucleotide
  Sense strand starting at position 1063 of SEQ ID NO: 589061
ucaggacugucuuuaugag

SEQ ID NO: 908381 - RNA, 19 nt, Artificial Sequence
  Description of Artificial Sequence: Synthetic oligonucleotide
  Antisense strand to SEQ ID NO: 908380
cucauaaagacaguccuga

SEQ ID NO: 908382 - RNA, 19 nt, Artificial Sequence
  Description of Artificial Sequence: Synthetic oligonucleotide
  Sense strand starting at position 1075 of SEQ ID NO: 589061
uuaugagaagccugucuga

SEQ ID NO: 908383 - RNA, 19 nt, Artificial Sequence
  Description of Artificial Sequence: Synthetic oligonucleotide
  Antisense strand to SEQ ID NO: 908382
ucagacaggcuucucauaa

SEQ ID NO: 908384 - RNA, 19 nt, Artificial Sequence
  Description of Artificial Sequence: Synthetic oligonucleotide
  Sense strand starting at position 1078 of SEQ ID NO: 589061
ugagaagccugucugacua

SEQ ID NO: 908385 - RNA, 19 nt, Artificial Sequence
  Description of Artificial Sequence: Synthetic oligonucleotide
  Antisense strand to SEQ ID NO: 908384
uagucagacaggcuucuca

SEQ ID NO: 908386 - RNA, 19 nt, Artificial Sequence
  Description of Artificial Sequence: Synthetic oligonucleotide
  Sense strand starting at position 1086 of SEQ ID NO: 589061
cugucugacuaccuggaua

SEQ ID NO: 908387 - RNA, 19 nt, Artificial Sequence
  Description of Artificial Sequence: Synthetic oligonucleotide
  Antisense strand to SEQ ID NO: 908386
uauccagguagucagacag

SEQ ID NO: 908388 - RNA, 19 nt, Artificial Sequence
  Description of Artificial Sequence: Synthetic oligonucleotide
  Sense strand starting at position 1088 of SEQ ID NO: 589061
gucugacuaccuggauaua

SEQ ID NO: 908389 - RNA, 19 nt, Artificial Sequence
  Description of Artificial Sequence: Synthetic oligonucleotide
  Antisense strand to SEQ ID NO: 908388
uauauccagguagucagac

SEQ ID NO: 908390 - RNA, 19 nt, Artificial Sequence
  Description of Artificial Sequence: Synthetic oligonucleotide
  Sense strand starting at position 1132 of SEQ ID NO: 589061
gaaugaaucuaggaacaga

SEQ ID NO: 908391 - RNA, 19 nt, Artificial Sequence
  Description of Artificial Sequence: Synthetic oligonucleotide
  Antisense strand to SEQ ID NO: 908390
ucuguuccuagauucauuc

SEQ ID NO: 908392 - RNA, 19 nt, Artificial Sequence
  Description of Artificial Sequence: Synthetic oligonucleotide
  Sense strand starting at position 1148 of SEQ ID NO: 589061
agauucuuucccugcagag

SEQ ID NO: 908393 - RNA, 19 nt, Artificial Sequence
  Description of Artificial Sequence: Synthetic oligonucleotide
  Antisense strand to SEQ ID NO: 908392
cucugcagggaaagaaucu

SEQ ID NO: 908394 - RNA, 19 nt, Artificial Sequence
  Description of Artificial Sequence: Synthetic oligonucleotide
  Sense strand starting at position 1150 of SEQ ID NO: 589061
auucuuucccugcagagua

SEQ ID NO: 908395 - RNA, 19 nt, Artificial Sequence
  Description of Artificial Sequence: Synthetic oligonucleotide
  Antisense strand to SEQ ID NO: 908394
uacucugcagggaaagaau

SEQ ID NO: 908396 - RNA, 19 nt, Artificial Sequence
  Description of Artificial Sequence: Synthetic oligonucleotide
  Sense strand starting at position 1288 of SEQ ID NO: 589061
guuuguuaacaauacuugu

SEQ ID NO: 908397 - RNA, 19 nt, Artificial Sequence
  Description of Artificial Sequence: Synthetic oligonucleotide
  Antisense strand to SEQ ID NO: 908396
acaaguauuguuaacaaac

SEQ ID NO: 908398 - RNA, 19 nt, Artificial Sequence
  Description of Artificial Sequence: Synthetic oligonucleotide
  Sense strand starting at position 1399 of SEQ ID NO: 589061
uuccacaguucuuuauaga

SEQ ID NO: 908399 - RNA, 19 nt, Artificial Sequence
  Description of Artificial Sequence: Synthetic oligonucleotide
  Antisense strand to SEQ ID NO: 908398
ucuauaaagaacuguggaa

SEQ ID NO: 908400 - RNA, 19 nt, Artificial Sequence
  Description of Artificial Sequence: Synthetic oligonucleotide
  Sense strand starting at position 1467 of SEQ ID NO: 589061
ggaggugaguuucugagga

SEQ ID NO: 908401 - RNA, 19 nt, Artificial Sequence
  Description of Artificial Sequence: Synthetic oligonucleotide
  Antisense strand to SEQ ID NO: 908400
uccucagaaacucaccucc

SEQ ID NO: 908402 - RNA, 19 nt, Artificial Sequence
  Description of Artificial Sequence: Synthetic oligonucleotide
  Sense strand starting at position 1496 of SEQ ID NO: 589061
acuggaugucgggaaaccu

SEQ ID NO: 908403 - RNA, 19 nt, Artificial Sequence
  Description of Artificial Sequence: Synthetic oligonucleotide
  Antisense strand to SEQ ID NO: 908402
agguuucccgacauccagu

SEQ ID NO: 908404 - RNA, 19 nt, Artificial Sequence
  Description of Artificial Sequence: Synthetic oligonucleotide
  Sense strand starting at position 1702 of SEQ ID NO: 589061
acuguuaaggcugggauga

SEQ ID NO: 908405 - RNA, 19 nt, Artificial Sequence
  Description of Artificial Sequence: Synthetic oligonucleotide
  Antisense strand to SEQ ID NO: 908404
ucaucccagccuuaacagu

SEQ ID NO: 908406 - RNA, 19 nt, Artificial Sequence
  Description of Artificial Sequence: Synthetic oligonucleotide
  Sense strand starting at position 2354 of SEQ ID NO: 589061
uaacgcagugauuaauauu

SEQ ID NO: 908407 - RNA, 19 nt, Artificial Sequence
  Description of Artificial Sequence: Synthetic oligonucleotide
  Antisense strand to SEQ ID NO: 908406
aauauuaaucacugcguua

SEQ ID NO: 908408 - RNA, 19 nt, Artificial Sequence
  Description of Artificial Sequence: Synthetic oligonucleotide
  Sense strand starting at position 2396 of SEQ ID NO: 589061
ucugauuuauagcuagcuu

SEQ ID NO: 908409 - RNA, 19 nt, Artificial Sequence
  Description of Artificial Sequence: Synthetic oligonucleotide
  Antisense strand to SEQ ID NO: 908408
aagcuagcuauaaaucaga

SEQ ID NO: 908410 - RNA, 19 nt, Artificial Sequence
  Description of Artificial Sequence: Synthetic oligonucleotide
  Sense strand starting at position 2621 of SEQ ID NO: 589061
ugaugaacauccuuguaga

SEQ ID NO: 908411 - RNA, 19 nt, Artificial Sequence
  Description of Artificial Sequence: Synthetic oligonucleotide
  Antisense strand to SEQ ID NO: 908410
ucuacaaggauguucauca

SEQ ID NO: 908412 - RNA, 19 nt, Artificial Sequence
  Description of Artificial Sequence: Synthetic oligonucleotide
  Sense strand starting at position 2622 of SEQ ID NO: 589061
gaugaacauccuuguagag

SEQ ID NO: 908413 - RNA, 19 nt, Artificial Sequence
  Description of Artificial Sequence: Synthetic oligonucleotide
  Antisense strand to SEQ ID NO: 908412
cucuacaaggauguucauc

SEQ ID NO: 908414 - RNA, 19 nt, Artificial Sequence
  Description of Artificial Sequence: Synthetic oligonucleotide
  Sense strand starting at position 2940 of SEQ ID NO: 589061
uugagcuaugauugauaua

SEQ ID NO: 908415 - RNA, 19 nt, Artificial Sequence
  Description of Artificial Sequence: Synthetic oligonucleotide
  Antisense strand to SEQ ID NO: 908414
uauaucaaucauagcucaa

SEQ ID NO: 908416 - RNA, 19 nt, Artificial Sequence
  Description of Artificial Sequence: Synthetic oligonucleotide
  Sense strand starting at position 2988 of SEQ ID NO: 589061
uguguuuggagguaaguau

SEQ ID NO: 908417 - RNA, 19 nt, Artificial Sequence
  Description of Artificial Sequence: Synthetic oligonucleotide
  Antisense strand to SEQ ID NO: 908416
auacuuaccuccaaacaca

SEQ ID NO: 908418 - RNA, 19 nt, Artificial Sequence
  Description of Artificial Sequence: Synthetic oligonucleotide
  Sense strand starting at position 3013 of SEQ ID NO: 589061
cugugaaaccauuaagcca

SEQ ID NO: 908419 - RNA, 19 nt, Artificial Sequence
  Description of Artificial Sequence: Synthetic oligonucleotide
  Antisense strand to SEQ ID NO: 908418
uggcuuaaugguuucacag

SEQ ID NO: 908420 - RNA, 19 nt, Artificial Sequence
  Description of Artificial Sequence: Synthetic oligonucleotide
  Sense strand starting at position 3443 of SEQ ID NO: 589061
uguuaauaaggcugaauaa

SEQ ID NO: 908421 - RNA, 19 nt, Artificial Sequence
  Description of Artificial Sequence: Synthetic oligonucleotide
  Antisense strand to SEQ ID NO: 908420
uuauucagccuuauuaaca

SEQ ID NO: 908422 - RNA, 19 nt, Artificial Sequence
  Description of Artificial Sequence: Synthetic oligonucleotide
  Sense strand starting at position 3597 of SEQ ID NO: 589061
uccauuccuccggauauau

SEQ ID NO: 908423 - RNA, 19 nt, Artificial Sequence
  Description of Artificial Sequence: Synthetic oligonucleotide
  Antisense strand to SEQ ID NO: 908422
auauauccggaggaaugga

SEQ ID NO: 908424 - RNA, 19 nt, Artificial Sequence
  Description of Artificial Sequence: Synthetic oligonucleotide
  Sense strand starting at position 3632 of SEQ ID NO: 589061
gcuggaucaaaggguaauu

SEQ ID NO: 908425 - RNA, 19 nt, Artificial Sequence
  Description of Artificial Sequence: Synthetic oligonucleotide
  Antisense strand to SEQ ID NO: 908424
aauuacccuuugauccagc

SEQ ID NO: 908426 - RNA, 19 nt, Artificial Sequence
  Description of Artificial Sequence: Synthetic oligonucleotide
  Sense strand starting at position 3777 of SEQ ID NO: 589061
uuaacagaaguauggugau

SEQ ID NO: 908427 - RNA, 19 nt, Artificial Sequence
  Description of Artificial Sequence: Synthetic oligonucleotide
  Antisense strand to SEQ ID NO: 908426
aucaccauacuucuguuaa

SEQ ID NO: 908428 - RNA, 19 nt, Artificial Sequence
  Description of Artificial Sequence: Synthetic oligonucleotide
  Sense strand starting at position 3940 of SEQ ID NO: 589061
uugccauugaugcauagga

SEQ ID NO: 908429 - RNA, 19 nt, Artificial Sequence
  Description of Artificial Sequence: Synthetic oligonucleotide
  Antisense strand to SEQ ID NO: 908428
uccuaugcaucaauggcaa

SEQ ID NO: 908430 - RNA, 19 nt, Artificial Sequence
  Description of Artificial Sequence: Synthetic oligonucleotide
  Sense strand starting at position 3942 of SEQ ID NO: 589061
gccauugaugcauaggaau

SEQ ID NO: 908431 - RNA, 19 nt, Artificial Sequence
  Description of Artificial Sequence: Synthetic oligonucleotide
  Antisense strand to SEQ ID NO: 908430
auuccuaugcaucaauggc

SEQ ID NO: 908432 - RNA, 19 nt, Artificial Sequence
  Description of Artificial Sequence: Synthetic oligonucleotide
  Sense strand starting at position 3954 of SEQ ID NO: 589061
uaggaauuccuuugucagg

SEQ ID NO: 908433 - RNA, 19 nt, Artificial Sequence
  Description of Artificial Sequence: Synthetic oligonucleotide
  Antisense strand to SEQ ID NO: 908432
ccugacaaaggaauuccua

SEQ ID NO: 908434 - RNA, 19 nt, Artificial Sequence
  Description of Artificial Sequence: Synthetic oligonucleotide
  Sense strand starting at position 3963 of SEQ ID NO: 589061
cuuugucaggcagauauua

SEQ ID NO: 908435 - RNA, 19 nt, Artificial Sequence
  Description of Artificial Sequence: Synthetic oligonucleotide
  Antisense strand to SEQ ID NO: 908434
uaauaucugccugacaaag

SEQ ID NO: 908436 - RNA, 19 nt, Artificial Sequence
  Description of Artificial Sequence: Synthetic oligonucleotide
  Sense strand starting at position 170 of SEQ ID NO: 588091
uaccaauggccugggaguu

SEQ ID NO: 908437 - RNA, 19 nt, Artificial Sequence
  Description of Artificial Sequence: Synthetic oligonucleotide
  Antisense strand to SEQ ID NO: 908436
aacucccaggccauuggua

SEQ ID NO: 908438 - RNA, 19 nt, Artificial Sequence
  Description of Artificial Sequence: Synthetic oligonucleotide
  Sense strand starting at position 568 of SEQ ID NO: 588091
gcagcaacggucuggaaga

SEQ ID NO: 908439 - RNA, 19 nt, Artificial Sequence
  Description of Artificial Sequence: Synthetic oligonucleotide
  Antisense strand to SEQ ID NO: 908438
ucuuccagaccguugcugc

SEQ ID NO: 908440 - RNA, 19 nt, Artificial Sequence
  Description of Artificial Sequence: Synthetic oligonucleotide
  Sense strand starting at position 827 of SEQ ID NO: 588091
guggugacgcgccuguaau

SEQ ID NO: 908441 - RNA, 19 nt, Artificial Sequence
  Description of Artificial Sequence: Synthetic oligonucleotide
  Antisense strand to SEQ ID NO: 908440
auuacaggcgcgucaccac

SEQ ID NO: 908442 - RNA, 19 nt, Artificial Sequence
  Description of Artificial Sequence: Synthetic oligonucleotide
  Sense strand starting at position 828 of SEQ ID NO: 588091
uggugacgcgccuguaauc

SEQ ID NO: 908443 - RNA, 19 nt, Artificial Sequence
  Description of Artificial Sequence: Synthetic oligonucleotide
  Antisense strand to SEQ ID NO: 908442
gauuacaggcgcgucacca

SEQ ID NO: 908444 - RNA, 19 nt, Artificial Sequence
  Description of Artificial Sequence: Synthetic oligonucleotide
  Sense strand starting at position 941 of SEQ ID NO: 588091
gcgacagaccgagacuuaa

SEQ ID NO: 908445 - RNA, 19 nt, Artificial Sequence
  Description of Artificial Sequence: Synthetic oligonucleotide
  Antisense strand to SEQ ID NO: 908444
uuaagucucggucugucgc

SEQ ID NO: 908446 - RNA, 19 nt, Artificial Sequence
  Description of Artificial Sequence: Synthetic oligonucleotide
  Sense strand starting at position 1137 of SEQ ID NO: 588091
acucgaguucccggauuca

SEQ ID NO: 908447 - RNA, 19 nt, Artificial Sequence
  Description of Artificial Sequence: Synthetic oligonucleotide
  Antisense strand to SEQ ID NO: 908446
ugaauccgggaacucgagu

SEQ ID NO: 908448 - RNA, 19 nt, Artificial Sequence
  Description of Artificial Sequence: Synthetic oligonucleotide
  Sense strand starting at position 1195 of SEQ ID NO: 588091
agccaauucccaggucaga

SEQ ID NO: 908449 - RNA, 19 nt, Artificial Sequence
  Description of Artificial Sequence: Synthetic oligonucleotide
  Antisense strand to SEQ ID NO: 908448
ucugaccugggaauuggcu

SEQ ID NO: 908450 - RNA, 19 nt, Artificial Sequence
  Description of Artificial Sequence: Synthetic oligonucleotide
  Sense strand starting at position 1216 of SEQ ID NO: 588091
agaccagcuucuuaagaac

SEQ ID NO: 908451 - RNA, 19 nt, Artificial Sequence
  Description of Artificial Sequence: Synthetic oligonucleotide
  Antisense strand to SEQ ID NO: 908450
guucuuaagaagcuggucu

SEQ ID NO: 908452 - RNA, 19 nt, Artificial Sequence
  Description of Artificial Sequence: Synthetic oligonucleotide
  Sense strand starting at position 1223 of SEQ ID NO: 588091
cuucuuaagaaccgaguga

SEQ ID NO: 908453 - RNA, 19 nt, Artificial Sequence
  Description of Artificial Sequence: Synthetic oligonucleotide
  Antisense strand to SEQ ID NO: 908452
ucacucgguucuuaagaag

SEQ ID NO: 908454 - RNA, 19 nt, Artificial Sequence
  Description of Artificial Sequence: Synthetic oligonucleotide
  Sense strand starting at position 1251 of SEQ ID NO: 588091
gcuggcauuugucuccgua

SEQ ID NO: 908455 - RNA, 19 nt, Artificial Sequence
  Description of Artificial Sequence: Synthetic oligonucleotide
  Antisense strand to SEQ ID NO: 908454
uacggagacaaaugccagc

SEQ ID NO: 908456 - RNA, 19 nt, Artificial Sequence
  Description of Artificial Sequence: Synthetic oligonucleotide
  Sense strand starting at position 1254 of SEQ ID NO: 588091
ggcauuugucuccguaggu

SEQ ID NO: 908457 - RNA, 19 nt, Artificial Sequence
  Description of Artificial Sequence: Synthetic oligonucleotide
  Antisense strand to SEQ ID NO: 908456
accuacggagacaaaugcc

SEQ ID NO: 908458 - RNA, 19 nt, Artificial Sequence
  Description of Artificial Sequence: Synthetic oligonucleotide
  Sense strand starting at position 1255 of SEQ ID NO: 588091
gcauuugucuccguaggua

SEQ ID NO: 908459 - RNA, 19 nt, Artificial Sequence
  Description of Artificial Sequence: Synthetic oligonucleotide
  Antisense strand to SEQ ID NO: 908458
uaccuacggagacaaaugc

SEQ ID NO: 908460 - RNA, 19 nt, Artificial Sequence
  Description of Artificial Sequence: Synthetic oligonucleotide
  Sense strand starting at position 1555 of SEQ ID NO: 588091
ggucccaucugaguugcaa

SEQ ID NO: 908461 - RNA, 19 nt, Artificial Sequence
  Description of Artificial Sequence: Synthetic oligonucleotide
  Antisense strand to SEQ ID NO: 908460
uugcaacucagaugggacc

SEQ ID NO: 908462 - RNA, 19 nt, Artificial Sequence
  Description of Artificial Sequence: Synthetic oligonucleotide
  Sense strand starting at position 1630 of SEQ ID NO: 588091
ccuccuuggccucgaaaca

SEQ ID NO: 908463 - RNA, 19 nt, Artificial Sequence
  Description of Artificial Sequence: Synthetic oligonucleotide
  Antisense strand to SEQ ID NO: 908462
uguuucgaggccaaggagg

SEQ ID NO: 908464 - RNA, 19 nt, Artificial Sequence
  Description of Artificial Sequence: Synthetic oligonucleotide
  Sense strand starting at position 1631 of SEQ ID NO: 588091
cuccuuggccucgaaacaa

SEQ ID NO: 908465 - RNA, 19 nt, Artificial Sequence
  Description of Artificial Sequence: Synthetic oligonucleotide
  Antisense strand to SEQ ID NO: 908464
uuguuucgaggccaaggag

SEQ ID NO: 908466 - RNA, 19 nt, Artificial Sequence
  Description of Artificial Sequence: Synthetic oligonucleotide
  Sense strand starting at position 1661 of SEQ ID NO: 588091
ccaaguaagucacuggaga

SEQ ID NO: 908467 - RNA, 19 nt, Artificial Sequence
  Description of Artificial Sequence: Synthetic oligonucleotide
  Antisense strand to SEQ ID NO: 908466
ucuccagugacuuacuugg

SEQ ID NO: 908468 - RNA, 19 nt, Artificial Sequence
  Description of Artificial Sequence: Synthetic oligonucleotide
  Sense strand starting at position 1890 of SEQ ID NO: 588091
ucacucucgcucgcaauua

SEQ ID NO: 908469 - RNA, 19 nt, Artificial Sequence
  Description of Artificial Sequence: Synthetic oligonucleotide
  Antisense strand to SEQ ID NO: 908468
uaauugcgagcgagaguga

SEQ ID NO: 908470 - RNA, 19 nt, Artificial Sequence
  Description of Artificial Sequence: Synthetic oligonucleotide
  Sense strand starting at position 1962 of SEQ ID NO: 588091
gagguuacuaucggucaaa

SEQ ID NO: 908471 - RNA, 19 nt, Artificial Sequence
  Description of Artificial Sequence: Synthetic oligonucleotide
  Antisense strand to SEQ ID NO: 908470
uuugaccgauaguaaccuc

SEQ ID NO: 908472 - RNA, 19 nt, Artificial Sequence
  Description of Artificial Sequence: Synthetic oligonucleotide
  Sense strand starting at position 1963 of SEQ ID NO: 588091
agguuacuaucggucaaag

SEQ ID NO: 908473 - RNA, 19 nt, Artificial Sequence
  Description of Artificial Sequence: Synthetic oligonucleotide
  Antisense strand to SEQ ID NO: 908472
cuuugaccgauaguaaccu

SEQ ID NO: 908474 - RNA, 19 nt, Artificial Sequence
  Description of Artificial Sequence: Synthetic oligonucleotide
  Sense strand starting at position 2099 of SEQ ID NO: 588091
acgacacaucuagggaguu

SEQ ID NO: 908475 - RNA, 19 nt, Artificial Sequence
  Description of Artificial Sequence: Synthetic oligonucleotide
  Antisense strand to SEQ ID NO: 908474
aacucccuagaugugucgu

SEQ ID NO: 908476 - RNA, 19 nt, Artificial Sequence
  Description of Artificial Sequence: Synthetic oligonucleotide
  Sense strand starting at position 2146 of SEQ ID NO: 588091
ggguacagcaggugucuua

SEQ ID NO: 908477 - RNA, 19 nt, Artificial Sequence
  Description of Artificial Sequence: Synthetic oligonucleotide
  Antisense strand to SEQ ID NO: 908476
uaagacaccugcuguaccc

SEQ ID NO: 908478 - RNA, 19 nt, Artificial Sequence
  Description of Artificial Sequence: Synthetic oligonucleotide
  Sense strand starting at position 2373 of SEQ ID NO: 588091
gagagagcucuaggcugaa

SEQ ID NO: 908479 - RNA, 19 nt, Artificial Sequence
  Description of Artificial Sequence: Synthetic oligonucleotide
  Antisense strand to SEQ ID NO: 908478
uucagccuagagcucucuc

SEQ ID NO: 908480 - RNA, 19 nt, Artificial Sequence
  Description of Artificial Sequence: Synthetic oligonucleotide
  Sense strand starting at position 2467 of SEQ ID NO: 588091
cggacaguccucuggguaa

SEQ ID NO: 908481 - RNA, 19 nt, Artificial Sequence
  Description of Artificial Sequence: Synthetic oligonucleotide
  Antisense strand to SEQ ID NO: 908480
uuacccagaggacuguccg

SEQ ID NO: 908482 - RNA, 19 nt, Artificial Sequence
  Description of Artificial Sequence: Synthetic oligonucleotide
  Sense strand starting at position 2469 of SEQ ID NO: 588091
gacaguccucuggguaaug

SEQ ID NO: 908483 - RNA, 19 nt, Artificial Sequence
  Description of Artificial Sequence: Synthetic oligonucleotide
  Antisense strand to SEQ ID NO: 908482
cauuacccagaggacuguc

SEQ ID NO: 908484 - RNA, 19 nt, Artificial Sequence
  Description of Artificial Sequence: Synthetic oligonucleotide
  Sense strand starting at position 2538 of SEQ ID NO: 588091
gaccuacugccuuggagau

SEQ ID NO: 908485 - RNA, 19 nt, Artificial Sequence
  Description of Artificial Sequence: Synthetic oligonucleotide
  Antisense strand to SEQ ID NO: 908484
aucuccaaggcaguagguc

SEQ ID NO: 908486 - RNA, 19 nt, Artificial Sequence
  Description of Artificial Sequence: Synthetic oligonucleotide
  Sense strand starting at position 2539 of SEQ ID NO: 588091
accuacugccuuggagauu

SEQ ID NO: 908487 - RNA, 19 nt, Artificial Sequence
  Description of Artificial Sequence: Synthetic oligonucleotide
  Antisense strand to SEQ ID NO: 908486
aaucuccaaggcaguaggu

SEQ ID NO: 908488 - RNA, 19 nt, Artificial Sequence
  Description of Artificial Sequence: Synthetic oligonucleotide
  Sense strand starting at position 2717 of SEQ ID NO: 588091
ugaucagccucccugugau

SEQ ID NO: 908489 - RNA, 19 nt, Artificial Sequence
  Description of Artificial Sequence: Synthetic oligonucleotide
  Antisense strand to SEQ ID NO: 908488
aucacagggaggcugauca

SEQ ID NO: 908490 - RNA, 19 nt, Artificial Sequence
  Description of Artificial Sequence: Synthetic oligonucleotide
  Sense strand starting at position 2720 of SEQ ID NO: 588091
ucagccucccugugauaaa

SEQ ID NO: 908491 - RNA, 19 nt, Artificial Sequence
  Description of Artificial Sequence: Synthetic oligonucleotide
  Antisense strand to SEQ ID NO: 908490
uuuaucacagggaggcuga

SEQ ID NO: 908492 - RNA, 19 nt, Artificial Sequence
  Description of Artificial Sequence: Synthetic oligonucleotide
  Sense strand starting at position 2761 of SEQ ID NO: 588091
uguauacauuugugaagug

SEQ ID NO: 908493 - RNA, 19 nt, Artificial Sequence
  Description of Artificial Sequence: Synthetic oligonucleotide
  Antisense strand to SEQ ID NO: 908492
cacuucacaaauguauaca

SEQ ID NO: 908494 - RNA, 19 nt, Artificial Sequence
  Description of Artificial Sequence: Synthetic oligonucleotide
  Sense strand starting at position 2786 of SEQ ID NO: 588091
gagaauugcagucguguaa

SEQ ID NO: 908495 - RNA, 19 nt, Artificial Sequence
  Description of Artificial Sequence: Synthetic oligonucleotide
  Antisense strand to SEQ ID NO: 908494
uuacacgacugcaauucuc

SEQ ID NO: 908496 - RNA, 19 nt, Artificial Sequence
  Description of Artificial Sequence: Synthetic oligonucleotide
  Sense strand starting at position 2997 of SEQ ID NO: 588091
aggucaaacugugaagagu

SEQ ID NO: 908497 - RNA, 19 nt, Artificial Sequence
  Description of Artificial Sequence: Synthetic oligonucleotide
  Antisense strand to SEQ ID NO: 908496
acucuucacaguuugaccu

SEQ ID NO: 908498 - RNA, 19 nt, Artificial Sequence
  Description of Artificial Sequence: Synthetic oligonucleotide
  Sense strand starting at position 3020 of SEQ ID NO: 588091
auaugaaucugcccugaag

SEQ ID NO: 908499 - RNA, 19 nt, Artificial Sequence
  Description of Artificial Sequence: Synthetic oligonucleotide
  Antisense strand to SEQ ID NO: 908498
cuucagggcagauucauau

SEQ ID NO: 908500 - RNA, 19 nt, Artificial Sequence
  Description of Artificial Sequence: Synthetic oligonucleotide
  Sense strand starting at position 3048 of SEQ ID NO: 588091
auagaagacucaggacaga

SEQ ID NO: 908501 - RNA, 19 nt, Artificial Sequence
  Description of Artificial Sequence: Synthetic oligonucleotide
  Antisense strand to SEQ ID NO: 908500
ucuguccugagucuucuau

SEQ ID NO: 908502 - RNA, 19 nt, Artificial Sequence
  Description of Artificial Sequence: Synthetic oligonucleotide
  Sense strand starting at position 3117 of SEQ ID NO: 588091
ggucuccuaccuugacaaa

SEQ ID NO: 908503 - RNA, 19 nt, Artificial Sequence
  Description of Artificial Sequence: Synthetic oligonucleotide
  Antisense strand to SEQ ID NO: 908502
uuugucaagguaggagacc

SEQ ID NO: 908504 - RNA, 19 nt, Artificial Sequence
  Description of Artificial Sequence: Synthetic oligonucleotide
  Sense strand starting at position 3129 of SEQ ID NO: 588091
ugacaaagauaccuuugua

SEQ ID NO: 908505 - RNA, 19 nt, Artificial Sequence
  Description of Artificial Sequence: Synthetic oligonucleotide
  Antisense strand to SEQ ID NO: 908504
uacaaagguaucuuuguca

SEQ ID NO: 908506 - RNA, 19 nt, Artificial Sequence
  Description of Artificial Sequence: Synthetic oligonucleotide
  Sense strand starting at position 3483 of SEQ ID NO: 588091
ucauaacucuggguggcau

SEQ ID NO: 908507 - RNA, 19 nt, Artificial Sequence
  Description of Artificial Sequence: Synthetic oligonucleotide
  Antisense strand to SEQ ID NO: 908506
augccacccagaguuauga

SEQ ID NO: 908508 - RNA, 19 nt, Artificial Sequence
  Description of Artificial Sequence: Synthetic oligonucleotide
  Sense strand starting at position 3517 of SEQ ID NO: 588091
uggacuguuugcccuuaga

SEQ ID NO: 908509 - RNA, 19 nt, Artificial Sequence
  Description of Artificial Sequence: Synthetic oligonucleotide
  Antisense strand to SEQ ID NO: 908508
ucuaagggcaaacagucca

SEQ ID NO: 908510 - RNA, 19 nt, Artificial Sequence
  Description of Artificial Sequence: Synthetic oligonucleotide
  Sense strand starting at position 3520 of SEQ ID NO: 588091
acuguuugcccuuagaaag

SEQ ID NO: 908511 - RNA, 19 nt, Artificial Sequence
  Description of Artificial Sequence: Synthetic oligonucleotide
  Antisense strand to SEQ ID NO: 908510
cuuucuaagggcaaacagu

SEQ ID NO: 908512 - RNA, 19 nt, Artificial Sequence
  Description of Artificial Sequence: Synthetic oligonucleotide
  Sense strand starting at position 3841 of SEQ ID NO: 588091
agggauggaucucagaaag

SEQ ID NO: 908513 - RNA, 19 nt, Artificial Sequence
  Description of Artificial Sequence: Synthetic oligonucleotide
  Antisense strand to SEQ ID NO: 908512
cuuucugagauccaucccu

SEQ ID NO: 908514 - RNA, 19 nt, Artificial Sequence
  Description of Artificial Sequence: Synthetic oligonucleotide
  Sense strand starting at position 3976 of SEQ ID NO: 588091
ugagcaauuuacguaaagu

SEQ ID NO: 908515 - RNA, 19 nt, Artificial Sequence
  Description of Artificial Sequence: Synthetic oligonucleotide
  Antisense strand to SEQ ID NO: 908514
acuuuacguaaauugcuca

SEQ ID NO: 908516 - RNA, 19 nt, Artificial Sequence
  Description of Artificial Sequence: Synthetic oligonucleotide
  Sense strand starting at position 160 of SEQ ID NO: 588103
auauaaugcguuuaccaaa

SEQ ID NO: 908517 - RNA, 19 nt, Artificial Sequence
  Description of Artificial Sequence: Synthetic oligonucleotide
  Antisense strand to SEQ ID NO: 908516
uuugguaaacgcauuauau

SEQ ID NO: 908518 - RNA, 19 nt, Artificial Sequence
  Description of Artificial Sequence: Synthetic oligonucleotide
  Sense strand starting at position 500 of SEQ ID NO: 588103
cuugaaauguaguuuaccu

SEQ ID NO: 908519 - RNA, 19 nt, Artificial Sequence
  Description of Artificial Sequence: Synthetic oligonucleotide
  Antisense strand to SEQ ID NO: 908518
agguaaacuacauuucaag

SEQ ID NO: 908520 - RNA, 19 nt, Artificial Sequence
  Description of Artificial Sequence: Synthetic oligonucleotide
  Sense strand starting at position 502 of SEQ ID NO: 588103
ugaaauguaguuuaccuuu

SEQ ID NO: 908521 - RNA, 19 nt, Artificial Sequence
  Description of Artificial Sequence: Synthetic oligonucleotide
  Antisense strand to SEQ ID NO: 908520
aaagguaaacuacauuuca

SEQ ID NO: 908522 - RNA, 19 nt, Artificial Sequence
  Description of Artificial Sequence: Synthetic oligonucleotide
  Sense strand starting at position 636 of SEQ ID NO: 588103
uugaaucacugucugauua

SEQ ID NO: 908523 - RNA, 19 nt, Artificial Sequence
  Description of Artificial Sequence: Synthetic oligonucleotide
  Antisense strand to SEQ ID NO: 908522
uaaucagacagugauucaa

SEQ ID NO: 908524 - RNA, 19 nt, Artificial Sequence
  Description of Artificial Sequence: Synthetic oligonucleotide
  Sense strand starting at position 643 of SEQ ID NO: 588103
acugucugauuacucuauu

SEQ ID NO: 908525 - RNA, 19 nt, Artificial Sequence
  Description of Artificial Sequence: Synthetic oligonucleotide
  Antisense strand to SEQ ID NO: 908524
aauagaguaaucagacagu

SEQ ID NO: 908526 - RNA, 19 nt, Artificial Sequence
  Description of Artificial Sequence: Synthetic oligonucleotide
  Sense strand starting at position 719 of SEQ ID NO: 588103
aauuauagcgcagaucaga

SEQ ID NO: 908527 - RNA, 19 nt, Artificial Sequence
  Description of Artificial Sequence: Synthetic oligonucleotide
  Antisense strand to SEQ ID NO: 908526
ucugaucugcgcuauaauu

SEQ ID NO: 908528 - RNA, 19 nt, Artificial Sequence
  Description of Artificial Sequence: Synthetic oligonucleotide
  Sense strand starting at position 733 of SEQ ID NO: 588103
ucagauuugucagaauaua

SEQ ID NO: 908529 - RNA, 19 nt, Artificial Sequence
  Description of Artificial Sequence: Synthetic oligonucleotide
  Antisense strand to SEQ ID NO: 908528
uauauucugacaaaucuga

SEQ ID NO: 908530 - RNA, 19 nt, Artificial Sequence
  Description of Artificial Sequence: Synthetic oligonucleotide
  Sense strand starting at position 937 of SEQ ID NO: 588103
agaugagguuuacuaagcu

SEQ ID NO: 908531 - RNA, 19 nt, Artificial Sequence
  Description of Artificial Sequence: Synthetic oligonucleotide
  Antisense strand to SEQ ID NO: 908530
agcuuaguaaaccucaucu

SEQ ID NO: 908532 - RNA, 19 nt, Artificial Sequence
  Description of Artificial Sequence: Synthetic oligonucleotide
  Sense strand starting at position 961 of SEQ ID NO: 588103
cccagaacacucugguuua

SEQ ID NO: 908533 - RNA, 19 nt, Artificial Sequence
  Description of Artificial Sequence: Synthetic oligonucleotide
  Antisense strand to SEQ ID NO: 908532
uaaaccagaguguucuggg

SEQ ID NO: 908534 - RNA, 19 nt, Artificial Sequence
  Description of Artificial Sequence: Synthetic oligonucleotide
  Sense strand starting at position 1129 of SEQ ID NO: 588103
aucuuaucacuaugacugu

SEQ ID NO: 908535 - RNA, 19 nt, Artificial Sequence
  Description of Artificial Sequence: Synthetic oligonucleotide
  Antisense strand to SEQ ID NO: 908534
acagucauagugauaagau

SEQ ID NO: 908536 - RNA, 19 nt, Artificial Sequence
  Description of Artificial Sequence: Synthetic oligonucleotide
  Sense strand starting at position 1135 of SEQ ID NO: 588103
ucacuaugacuguggcaau

SEQ ID NO: 908537 - RNA, 19 nt, Artificial Sequence
  Description of Artificial Sequence: Synthetic oligonucleotide
  Antisense strand to SEQ ID NO: 908536
auugccacagucauaguga

SEQ ID NO: 908538 - RNA, 19 nt, Artificial Sequence
  Description of Artificial Sequence: Synthetic oligonucleotide
  Sense strand starting at position 1148 of SEQ ID NO: 588103
ggcaaucagccguacuaaa

SEQ ID NO: 908539 - RNA, 19 nt, Artificial Sequence
  Description of Artificial Sequence: Synthetic oligonucleotide
  Antisense strand to SEQ ID NO: 908538
uuuaguacggcugauugcc

SEQ ID NO: 908540 - RNA, 19 nt, Artificial Sequence
  Description of Artificial Sequence: Synthetic oligonucleotide
  Sense strand starting at position 1334 of SEQ ID NO: 588103
cauaguacaugugcauaga

SEQ ID NO: 908541 - RNA, 19 nt, Artificial Sequence
  Description of Artificial Sequence: Synthetic oligonucleotide
  Antisense strand to SEQ ID NO: 908540
ucuaugcacauguacuaug

SEQ ID NO: 908542 - RNA, 19 nt, Artificial Sequence
  Description of Artificial Sequence: Synthetic oligonucleotide
  Sense strand starting at position 1335 of SEQ ID NO: 588103
auaguacaugugcauagau

SEQ ID NO: 908543 - RNA, 19 nt, Artificial Sequence
  Description of Artificial Sequence: Synthetic oligonucleotide
  Antisense strand to SEQ ID NO: 908542
aucuaugcacauguacuau

SEQ ID NO: 908544 - RNA, 19 nt, Artificial Sequence
  Description of Artificial Sequence: Synthetic oligonucleotide
  Sense strand starting at position 1343 of SEQ ID NO: 588103
ugugcauagauggaaagua

SEQ ID NO: 908545 - RNA, 19 nt, Artificial Sequence
  Description of Artificial Sequence: Synthetic oligonucleotide
  Antisense strand to SEQ ID NO: 908544
uacuuuccaucuaugcaca

SEQ ID NO: 908546 - RNA, 19 nt, Artificial Sequence
  Description of Artificial Sequence: Synthetic oligonucleotide
  Sense strand starting at position 1425 of SEQ ID NO: 588103
cacagugagugaguuuaau

SEQ ID NO: 908547 - RNA, 19 nt, Artificial Sequence
  Description of Artificial Sequence: Synthetic oligonucleotide
  Antisense strand to SEQ ID NO: 908546
auuaaacucacucacugug

SEQ ID NO: 908548 - RNA, 19 nt, Artificial Sequence
  Description of Artificial Sequence: Synthetic oligonucleotide
  Sense strand starting at position 1547 of SEQ ID NO: 588103
ucaguauuacuguauagca

SEQ ID NO: 908549 - RNA, 19 nt, Artificial Sequence
  Description of Artificial Sequence: Synthetic oligonucleotide
  Antisense strand to SEQ ID NO: 908548
ugcuauacaguaauacuga

SEQ ID NO: 908550 - RNA, 19 nt, Artificial Sequence
  Description of Artificial Sequence: Synthetic oligonucleotide
  Sense strand starting at position 1562 of SEQ ID NO: 588103
agcaguaacuaauuccaga

SEQ ID NO: 908551 - RNA, 19 nt, Artificial Sequence
  Description of Artificial Sequence: Synthetic oligonucleotide
  Antisense strand to SEQ ID NO: 908550
ucuggaauuaguuacugcu

SEQ ID NO: 908552 - RNA, 19 nt, Artificial Sequence
  Description of Artificial Sequence: Synthetic oligonucleotide
  Sense strand starting at position 1579 of SEQ ID NO: 588103
gaaagucuugcagacuuua

SEQ ID NO: 908553 - RNA, 19 nt, Artificial Sequence
  Description of Artificial Sequence: Synthetic oligonucleotide
  Antisense strand to SEQ ID NO: 908552
uaaagucugcaagacuuuc

SEQ ID NO: 908554 - RNA, 19 nt, Artificial Sequence
  Description of Artificial Sequence: Synthetic oligonucleotide
  Sense strand starting at position 1591 of SEQ ID NO: 588103
gacuuuaucuugcuuggga

SEQ ID NO: 908555 - RNA, 19 nt, Artificial Sequence
  Description of Artificial Sequence: Synthetic oligonucleotide
  Antisense strand to SEQ ID NO: 908554
ucccaagcaagauaaaguc

SEQ ID NO: 908556 - RNA, 19 nt, Artificial Sequence
  Description of Artificial Sequence: Synthetic oligonucleotide
  Sense strand starting at position 1592 of SEQ ID NO: 588103
acuuuaucuugcuugggaa

SEQ ID NO: 908557 - RNA, 19 nt, Artificial Sequence
  Description of Artificial Sequence: Synthetic oligonucleotide
  Antisense strand to SEQ ID NO: 908556
uucccaagcaagauaaagu

SEQ ID NO: 908558 - RNA, 19 nt, Artificial Sequence
  Description of Artificial Sequence: Synthetic oligonucleotide
  Sense strand starting at position 1593 of SEQ ID NO: 588103
cuuuaucuugcuugggaag

SEQ ID NO: 908559 - RNA, 19 nt, Artificial Sequence
  Description of Artificial Sequence: Synthetic oligonucleotide
  Antisense strand to SEQ ID NO: 908558
cuucccaagcaagauaaag

SEQ ID NO: 908560 - RNA, 19 nt, Artificial Sequence
  Description of Artificial Sequence: Synthetic oligonucleotide
  Sense strand starting at position 1621 of SEQ ID NO: 588103
aaaguucuagaaggaguau

SEQ ID NO: 908561 - RNA, 19 nt, Artificial Sequence
  Description of Artificial Sequence: Synthetic oligonucleotide
  Antisense strand to SEQ ID NO: 908560
auacuccuucuagaacuuu

SEQ ID NO: 908562 - RNA, 19 nt, Artificial Sequence
  Description of Artificial Sequence: Synthetic oligonucleotide
  Sense strand starting at position 1630 of SEQ ID NO: 588103
gaaggaguauucucucuuu

SEQ ID NO: 908563 - RNA, 19 nt, Artificial Sequence
  Description of Artificial Sequence: Synthetic oligonucleotide
  Antisense strand to SEQ ID NO: 908562
aaagagagaauacuccuuc

SEQ ID NO: 908564 - RNA, 19 nt, Artificial Sequence
  Description of Artificial Sequence: Synthetic oligonucleotide
  Sense strand starting at position 1744 of SEQ ID NO: 588103
acucaauggcaauagcaau

SEQ ID NO: 908565 - RNA, 19 nt, Artificial Sequence
  Description of Artificial Sequence: Synthetic oligonucleotide
  Antisense strand to SEQ ID NO: 908564
auugcuauugccauugagu

SEQ ID NO: 908566 - RNA, 19 nt, Artificial Sequence
  Description of Artificial Sequence: Synthetic oligonucleotide
  Sense strand starting at position 1755 of SEQ ID NO: 588103
auagcaaugcauugaaaug

SEQ ID NO: 908567 - RNA, 19 nt, Artificial Sequence
  Description of Artificial Sequence: Synthetic oligonucleotide
  Antisense strand to SEQ ID NO: 908566
cauuucaaugcauugcuau

SEQ ID NO: 908568 - RNA, 19 nt, Artificial Sequence
  Description of Artificial Sequence: Synthetic oligonucleotide
  Sense strand starting at position 2289 of SEQ ID NO: 588103
ugcugaugucuguugcuuu

SEQ ID NO: 908569 - RNA, 19 nt, Artificial Sequence
  Description of Artificial Sequence: Synthetic oligonucleotide
  Antisense strand to SEQ ID NO: 908568
aaagcaacagacaucagca

SEQ ID NO: 908570 - RNA, 19 nt, Artificial Sequence
  Description of Artificial Sequence: Synthetic oligonucleotide
  Sense strand starting at position 2353 of SEQ ID NO: 588103
agagaaacuuaaucccugu

SEQ ID NO: 908571 - RNA, 19 nt, Artificial Sequence
  Description of Artificial Sequence: Synthetic oligonucleotide
  Antisense strand to SEQ ID NO: 908570
acagggauuaaguuucucu

SEQ ID NO: 908572 - RNA, 19 nt, Artificial Sequence
  Description of Artificial Sequence: Synthetic oligonucleotide
  Sense strand starting at position 2526 of SEQ ID NO: 588103
uucugaagguuccucacua

SEQ ID NO: 908573 - RNA, 19 nt, Artificial Sequence
  Description of Artificial Sequence: Synthetic oligonucleotide
  Antisense strand to SEQ ID NO: 908572
uagugaggaaccuucagaa

SEQ ID NO: 908574 - RNA, 19 nt, Artificial Sequence
  Description of Artificial Sequence: Synthetic oligonucleotide
  Sense strand starting at position 2527 of SEQ ID NO: 588103
ucugaagguuccucacuaa

SEQ ID NO: 908575 - RNA, 19 nt, Artificial Sequence
  Description of Artificial Sequence: Synthetic oligonucleotide
  Antisense strand to SEQ ID NO: 908574
uuagugaggaaccuucaga

SEQ ID NO: 908576 - RNA, 19 nt, Artificial Sequence
  Description of Artificial Sequence: Synthetic oligonucleotide
  Sense strand starting at position 2549 of SEQ ID NO: 588103
uaaacaguggcauaaguua

SEQ ID NO: 908577 - RNA, 19 nt, Artificial Sequence
  Description of Artificial Sequence: Synthetic oligonucleotide
  Antisense strand to SEQ ID NO: 908576
uaacuuaugccacuguuua

SEQ ID NO: 908578 - RNA, 19 nt, Artificial Sequence
  Description of Artificial Sequence: Synthetic oligonucleotide
  Sense strand starting at position 2890 of SEQ ID NO: 588103
acccacguccuuuaucaga

SEQ ID NO: 908579 - RNA, 19 nt, Artificial Sequence
  Description of Artificial Sequence: Synthetic oligonucleotide
  Antisense strand to SEQ ID NO: 908578
ucugauaaaggacgugggu

SEQ ID NO: 908580 - RNA, 19 nt, Artificial Sequence
  Description of Artificial Sequence: Synthetic oligonucleotide
  Sense strand starting at position 2959 of SEQ ID NO: 588103
ccacuauugcaagaggguu

SEQ ID NO: 908581 - RNA, 19 nt, Artificial Sequence
  Description of Artificial Sequence: Synthetic oligonucleotide
  Antisense strand to SEQ ID NO: 908580
aacccucuugcaauagugg

SEQ ID NO: 908582 - RNA, 19 nt, Artificial Sequence
  Description of Artificial Sequence: Synthetic oligonucleotide
  Sense strand starting at position 3007 of SEQ ID NO: 588103
cccugaaggaagugcuaau

SEQ ID NO: 908583 - RNA, 19 nt, Artificial Sequence
  Description of Artificial Sequence: Synthetic oligonucleotide
  Antisense strand to SEQ ID NO: 908582
auuagcacuuccuucaggg

SEQ ID NO: 908584 - RNA, 19 nt, Artificial Sequence
  Description of Artificial Sequence: Synthetic oligonucleotide
  Sense strand starting at position 3110 of SEQ ID NO: 588103
auuugacucuacuagagga

SEQ ID NO: 908585 - RNA, 19 nt, Artificial Sequence
  Description of Artificial Sequence: Synthetic oligonucleotide
  Antisense strand to SEQ ID NO: 908584
uccucuaguagagucaaau

SEQ ID NO: 908586 - RNA, 19 nt, Artificial Sequence
  Description of Artificial Sequence: Synthetic oligonucleotide
  Sense strand starting at position 3249 of SEQ ID NO: 588103
auaggugugucaucaggac

SEQ ID NO: 908587 - RNA, 19 nt, Artificial Sequence
  Description of Artificial Sequence: Synthetic oligonucleotide
  Antisense strand to SEQ ID NO: 908586
guccugaugacacaccuau

SEQ ID NO: 908588 - RNA, 19 nt, Artificial Sequence
  Description of Artificial Sequence: Synthetic oligonucleotide
  Sense strand starting at position 3301 of SEQ ID NO: 588103
aauauaugcaguggaggua

SEQ ID NO: 908589 - RNA, 19 nt, Artificial Sequence
  Description of Artificial Sequence: Synthetic oligonucleotide
  Antisense strand to SEQ ID NO: 908588
uaccuccacugcauauauu

SEQ ID NO: 908590 - RNA, 19 nt, Artificial Sequence
  Description of Artificial Sequence: Synthetic oligonucleotide
  Sense strand starting at position 3411 of SEQ ID NO: 588103
ccauaaugggcaugugaau

SEQ ID NO: 908591 - RNA, 19 nt, Artificial Sequence
  Description of Artificial Sequence: Synthetic oligonucleotide
  Antisense strand to SEQ ID NO: 908590
auucacaugcccauuaugg

SEQ ID NO: 908592 - RNA, 19 nt, Artificial Sequence
  Description of Artificial Sequence: Synthetic oligonucleotide
  Sense strand starting at position 3575 of SEQ ID NO: 588103
uaggaaagucaaggucaua

SEQ ID NO: 908593 - RNA, 19 nt, Artificial Sequence
  Description of Artificial Sequence: Synthetic oligonucleotide
  Antisense strand to SEQ ID NO: 908592
uaugaccuugacuuuccua

SEQ ID NO: 908594 - RNA, 19 nt, Artificial Sequence
  Description of Artificial Sequence: Synthetic oligonucleotide
  Sense strand starting at position 3597 of SEQ ID NO: 588103
agauuauccuuuguucuca

SEQ ID NO: 908595 - RNA, 19 nt, Artificial Sequence
  Description of Artificial Sequence: Synthetic oligonucleotide
  Antisense strand to SEQ ID NO: 908594
ugagaacaaaggauaaucu

SEQ ID NO: 908596 - RNA, 19 nt, Artificial Sequence
  Description of Artificial Sequence: Synthetic oligonucleotide
  Sense strand starting at position 61 of SEQ ID NO: 588115
aggccaagucuuuauguuu

SEQ ID NO: 908597 - RNA, 19 nt, Artificial Sequence
  Description of Artificial Sequence: Synthetic oligonucleotide
  Antisense strand to SEQ ID NO: 908596
aaacauaaagacuuggccu

SEQ ID NO: 908598 - RNA, 19 nt, Artificial Sequence
  Description of Artificial Sequence: Synthetic oligonucleotide
  Sense strand starting at position 64 of SEQ ID NO: 588115
ccaagucuuuauguuuaaa

SEQ ID NO: 908599 - RNA, 19 nt, Artificial Sequence
  Description of Artificial Sequence: Synthetic oligonucleotide
  Antisense strand to SEQ ID NO: 908598
uuuaaacauaaagacuugg

SEQ ID NO: 908600 - RNA, 19 nt, Artificial Sequence
  Description of Artificial Sequence: Synthetic oligonucleotide
  Sense strand starting at position 181 of SEQ ID NO: 588115
aagggaagcuuaguuaaau

SEQ ID NO: 908601 - RNA, 19 nt, Artificial Sequence
  Description of Artificial Sequence: Synthetic oligonucleotide
  Antisense strand to SEQ ID NO: 908600
auuuaacuaagcuucccuu

SEQ ID NO: 908602 - RNA, 19 nt, Artificial Sequence
  Description of Artificial Sequence: Synthetic oligonucleotide
  Sense strand starting at position 182 of SEQ ID NO: 588115
agggaagcuuaguuaaauu

SEQ ID NO: 908603 - RNA, 19 nt, Artificial Sequence
  Description of Artificial Sequence: Synthetic oligonucleotide
  Antisense strand to SEQ ID NO: 908602
aauuuaacuaagcuucccu

SEQ ID NO: 908604 - RNA, 19 nt, Artificial Sequence
  Description of Artificial Sequence: Synthetic oligonucleotide
  Sense strand starting at position 227 of SEQ ID NO: 588115
aagugugaugcuuaaauga

SEQ ID NO: 908605 - RNA, 19 nt, Artificial Sequence
  Description of Artificial Sequence: Synthetic oligonucleotide
  Antisense strand to SEQ ID NO: 908604
ucauuuaagcaucacacuu

SEQ ID NO: 908606 - RNA, 19 nt, Artificial Sequence
  Description of Artificial Sequence: Synthetic oligonucleotide
  Sense strand starting at position 270 of SEQ ID NO: 588115
gaagcaaauucccugggau

SEQ ID NO: 908607 - RNA, 19 nt, Artificial Sequence
  Description of Artificial Sequence: Synthetic oligonucleotide
  Antisense strand to SEQ ID NO: 908606
aucccagggaauuugcuuc

SEQ ID NO: 908608 - RNA, 19 nt, Artificial Sequence
  Description of Artificial Sequence: Synthetic oligonucleotide
  Sense strand starting at position 283 of SEQ ID NO: 588115
ugggaucccaauggugaga

SEQ ID NO: 908609 - RNA, 19 nt, Artificial Sequence
  Description of Artificial Sequence: Synthetic oligonucleotide
  Antisense strand to SEQ ID NO: 908608
ucucaccauugggauccca

SEQ ID NO: 908610 - RNA, 19 nt, Artificial Sequence
  Description of Artificial Sequence: Synthetic oligonucleotide
  Sense strand starting at position 296 of SEQ ID NO: 588115
gugagaggaguuuguauuc

SEQ ID NO: 908611 - RNA, 19 nt, Artificial Sequence
  Description of Artificial Sequence: Synthetic oligonucleotide
  Antisense strand to SEQ ID NO: 908610
gaauacaaacuccucucac

SEQ ID NO: 908612 - RNA, 19 nt, Artificial Sequence
  Description of Artificial Sequence: Synthetic oligonucleotide
  Sense strand starting at position 321 of SEQ ID NO: 588115
ucuccaggagccugugaaa

SEQ ID NO: 908613 - RNA, 19 nt, Artificial Sequence
  Description of Artificial Sequence: Synthetic oligonucleotide
  Antisense strand to SEQ ID NO: 908612
uuucacaggcuccuggaga

SEQ ID NO: 908614 - RNA, 19 nt, Artificial Sequence
  Description of Artificial Sequence: Synthetic oligonucleotide
  Sense strand starting at position 359 of SEQ ID NO: 588115
gcgcuucccgggagacaug

SEQ ID NO: 908615 - RNA, 19 nt, Artificial Sequence
  Description of Artificial Sequence: Synthetic oligonucleotide
  Antisense strand to SEQ ID NO: 908614
caugucucccgggaagcgc

SEQ ID NO: 908616 - RNA, 19 nt, Artificial Sequence
  Description of Artificial Sequence: Synthetic oligonucleotide
  Sense strand starting at position 415 of SEQ ID NO: 588115
gguguauagacguaugagu

SEQ ID NO: 908617 - RNA, 19 nt, Artificial Sequence
  Description of Artificial Sequence: Synthetic oligonucleotide
  Antisense strand to SEQ ID NO: 908616
acucauacgucuauacacc

SEQ ID NO: 908618 - RNA, 19 nt, Artificial Sequence
  Description of Artificial Sequence: Synthetic oligonucleotide
  Sense strand starting at position 423 of SEQ ID NO: 588115
gacguaugaguaggugaag

SEQ ID NO: 908619 - RNA, 19 nt, Artificial Sequence
  Description of Artificial Sequence: Synthetic oligonucleotide
  Antisense strand to SEQ ID NO: 908618
cuucaccuacucauacguc

SEQ ID NO: 908620 - RNA, 19 nt, Artificial Sequence
  Description of Artificial Sequence: Synthetic oligonucleotide
  Sense strand starting at position 426 of SEQ ID NO: 588115
guaugaguaggugaaguuu

SEQ ID NO: 908621 - RNA, 19 nt, Artificial Sequence
  Description of Artificial Sequence: Synthetic oligonucleotide
  Antisense strand to SEQ ID NO: 908620
aaacuucaccuacucauac

SEQ ID NO: 908622 - RNA, 19 nt, Artificial Sequence
  Description of Artificial Sequence: Synthetic oligonucleotide
  Sense strand starting at position 488 of SEQ ID NO: 588115
ucaccugugcugcauuuaa

SEQ ID NO: 908623 - RNA, 19 nt, Artificial Sequence
  Description of Artificial Sequence: Synthetic oligonucleotide
  Antisense strand to SEQ ID NO: 908622
uuaaaugcagcacagguga

SEQ ID NO: 908624 - RNA, 19 nt, Artificial Sequence
  Description of Artificial Sequence: Synthetic oligonucleotide
  Sense strand starting at position 521 of SEQ ID NO: 588115
aggguagugauaugucaaa

SEQ ID NO: 908625 - RNA, 19 nt, Artificial Sequence
  Description of Artificial Sequence: Synthetic oligonucleotide
  Antisense strand to SEQ ID NO: 908624
uuugacauaucacuacccu

SEQ ID NO: 908626 - RNA, 19 nt, Artificial Sequence
  Description of Artificial Sequence: Synthetic oligonucleotide
  Sense strand starting at position 1444 of SEQ ID NO: 588115
cggaguccugcguuuaguu

SEQ ID NO: 908627 - RNA, 19 nt, Artificial Sequence
  Description of Artificial Sequence: Synthetic oligonucleotide
  Antisense strand to SEQ ID NO: 908626
aacuaaacgcaggacuccg

SEQ ID NO: 908628 - RNA, 19 nt, Artificial Sequence
  Description of Artificial Sequence: Synthetic oligonucleotide
  Sense strand starting at position 1445 of SEQ ID NO: 588115
ggaguccugcguuuaguuu

SEQ ID NO: 908629 - RNA, 19 nt, Artificial Sequence
  Description of Artificial Sequence: Synthetic oligonucleotide
  Antisense strand to SEQ ID NO: 908628
aaacuaaacgcaggacucc

SEQ ID NO: 908630 - RNA, 19 nt, Artificial Sequence
  Description of Artificial Sequence: Synthetic oligonucleotide
  Sense strand starting at position 2069 of SEQ ID NO: 588115
uggcuucggcggaaucgau

SEQ ID NO: 908631 - RNA, 19 nt, Artificial Sequence
  Description of Artificial Sequence: Synthetic oligonucleotide
  Antisense strand to SEQ ID NO: 908630
aucgauuccgccgaagcca

SEQ ID NO: 908632 - RNA, 19 nt, Artificial Sequence
  Description of Artificial Sequence: Synthetic oligonucleotide
  Sense strand starting at position 2153 of SEQ ID NO: 588115
cgggcaaagcugaguguuu

SEQ ID NO: 908633 - RNA, 19 nt, Artificial Sequence
  Description of Artificial Sequence: Synthetic oligonucleotide
  Antisense strand to SEQ ID NO: 908632
aaacacucagcuuugcccg

SEQ ID NO: 908634 - RNA, 19 nt, Artificial Sequence
  Description of Artificial Sequence: Synthetic oligonucleotide
  Sense strand starting at position 2158 of SEQ ID NO: 588115
aaagcugaguguuuccuaa

SEQ ID NO: 908635 - RNA, 19 nt, Artificial Sequence
  Description of Artificial Sequence: Synthetic oligonucleotide
  Antisense strand to SEQ ID NO: 908634
uuaggaaacacucagcuuu

SEQ ID NO: 908636 - RNA, 19 nt, Artificial Sequence
  Description of Artificial Sequence: Synthetic oligonucleotide
  Sense strand starting at position 2322 of SEQ ID NO: 588115
gccugugugcgcucaaaug

SEQ ID NO: 908637 - RNA, 19 nt, Artificial Sequence
  Description of Artificial Sequence: Synthetic oligonucleotide
  Antisense strand to SEQ ID NO: 908636
cauuugagcgcacacaggc

SEQ ID NO: 908638 - RNA, 19 nt, Artificial Sequence
  Description of Artificial Sequence: Synthetic oligonucleotide
  Sense strand starting at position 2404 of SEQ ID NO: 588115
gacuguccucagggucaga

SEQ ID NO: 908639 - RNA, 19 nt, Artificial Sequence
  Description of Artificial Sequence: Synthetic oligonucleotide
  Antisense strand to SEQ ID NO: 908638
ucugacccugaggacaguc

SEQ ID NO: 908640 - RNA, 19 nt, Artificial Sequence
  Description of Artificial Sequence: Synthetic oligonucleotide
  Sense strand starting at position 2440 of SEQ ID NO: 588115
uugcgaagugcgucuuugu

SEQ ID NO: 908641 - RNA, 19 nt, Artificial Sequence
  Description of Artificial Sequence: Synthetic oligonucleotide
  Antisense strand to SEQ ID NO: 908640
acaaagacgcacuucgcaa

SEQ ID NO: 908642 - RNA, 19 nt, Artificial Sequence
  Description of Artificial Sequence: Synthetic oligonucleotide
  Sense strand starting at position 2448 of SEQ ID NO: 588115
ugcgucuuuguggcaguaa

SEQ ID NO: 908643 - RNA, 19 nt, Artificial Sequence
  Description of Artificial Sequence: Synthetic oligonucleotide
  Antisense strand to SEQ ID NO: 908642
uuacugccacaaagacgca

SEQ ID NO: 908644 - RNA, 19 nt, Artificial Sequence
  Description of Artificial Sequence: Synthetic oligonucleotide
  Sense strand starting at position 2695 of SEQ ID NO: 588115
ucuugagaugucugaaauu

SEQ ID NO: 908645 - RNA, 19 nt, Artificial Sequence
  Description of Artificial Sequence: Synthetic oligonucleotide
  Antisense strand to SEQ ID NO: 908644
aauuucagacaucucaaga

SEQ ID NO: 908646 - RNA, 19 nt, Artificial Sequence
  Description of Artificial Sequence: Synthetic oligonucleotide
  Sense strand starting at position 2784 of SEQ ID NO: 588115
uagaaauccugagagagga

SEQ ID NO: 908647 - RNA, 19 nt, Artificial Sequence
  Description of Artificial Sequence: Synthetic oligonucleotide
  Antisense strand to SEQ ID NO: 908646
uccucucucaggauuucua

SEQ ID NO: 908648 - RNA, 19 nt, Artificial Sequence
  Description of Artificial Sequence: Synthetic oligonucleotide
  Sense strand starting at position 3059 of SEQ ID NO: 588115
cugggaugcucuucuggga

SEQ ID NO: 908649 - RNA, 19 nt, Artificial Sequence
  Description of Artificial Sequence: Synthetic oligonucleotide
  Antisense strand to SEQ ID NO: 908648
ucccagaagagcaucccag

SEQ ID NO: 908650 - RNA, 19 nt, Artificial Sequence
  Description of Artificial Sequence: Synthetic oligonucleotide
  Sense strand starting at position 3063 of SEQ ID NO: 588115
gaugcucuucugggaguca

SEQ ID NO: 908651 - RNA, 19 nt, Artificial Sequence
  Description of Artificial Sequence: Synthetic oligonucleotide
  Antisense strand to SEQ ID NO: 908650
ugacucccagaagagcauc

SEQ ID NO: 908652 - RNA, 19 nt, Artificial Sequence
  Description of Artificial Sequence: Synthetic oligonucleotide
  Sense strand starting at position 3115 of SEQ ID NO: 588115
uagccauggccugauucua

SEQ ID NO: 908653 - RNA, 19 nt, Artificial Sequence
  Description of Artificial Sequence: Synthetic oligonucleotide
  Antisense strand to SEQ ID NO: 908652
uagaaucaggccauggcua

SEQ ID NO: 908654 - RNA, 19 nt, Artificial Sequence
  Description of Artificial Sequence: Synthetic oligonucleotide
  Sense strand starting at position 3212 of SEQ ID NO: 588115
ggccaagggcaccauaaau

SEQ ID NO: 908655 - RNA, 19 nt, Artificial Sequence
  Description of Artificial Sequence: Synthetic oligonucleotide
  Antisense strand to SEQ ID NO: 908654
auuuauggugcccuuggcc

SEQ ID NO: 908656 - RNA, 19 nt, Artificial Sequence
  Description of Artificial Sequence: Synthetic oligonucleotide
  Sense strand starting at position 3330 of SEQ ID NO: 588115
aggguuccugaaugucaau

SEQ ID NO: 908657 - RNA, 19 nt, Artificial Sequence
  Description of Artificial Sequence: Synthetic oligonucleotide
  Antisense strand to SEQ ID NO: 908656
auugacauucaggaacccu

SEQ ID NO: 908658 - RNA, 19 nt, Artificial Sequence
  Description of Artificial Sequence: Synthetic oligonucleotide
  Sense strand starting at position 3352 of SEQ ID NO: 588115
cuccuuuaucuugguauuu

SEQ ID NO: 908659 - RNA, 19 nt, Artificial Sequence
  Description of Artificial Sequence: Synthetic oligonucleotide
  Antisense strand to SEQ ID NO: 908658
aaauaccaagauaaaggag

SEQ ID NO: 908660 - RNA, 19 nt, Artificial Sequence
  Description of Artificial Sequence: Synthetic oligonucleotide
  Sense strand starting at position 3435 of SEQ ID NO: 588115
acugaccagugguuagaga

SEQ ID NO: 908661 - RNA, 19 nt, Artificial Sequence
  Description of Artificial Sequence: Synthetic oligonucleotide
  Antisense strand to SEQ ID NO: 908660
ucucuaaccacuggucagu

SEQ ID NO: 908662 - RNA, 19 nt, Artificial Sequence
  Description of Artificial Sequence: Synthetic oligonucleotide
  Sense strand starting at position 3436 of SEQ ID NO: 588115
cugaccagugguuagagau

SEQ ID NO: 908663 - RNA, 19 nt, Artificial Sequence
  Description of Artificial Sequence: Synthetic oligonucleotide
  Antisense strand to SEQ ID NO: 908662
aucucuaaccacuggucag

SEQ ID NO: 908664 - RNA, 19 nt, Artificial Sequence
  Description of Artificial Sequence: Synthetic oligonucleotide
  Sense strand starting at position 3442 of SEQ ID NO: 588115
agugguuagagaugccaga

SEQ ID NO: 908665 - RNA, 19 nt, Artificial Sequence
  Description of Artificial Sequence: Synthetic oligonucleotide
  Antisense strand to SEQ ID NO: 908664
ucuggcaucucuaaccacu

SEQ ID NO: 908666 - RNA, 19 nt, Artificial Sequence
  Description of Artificial Sequence: Synthetic oligonucleotide
  Sense strand starting at position 3534 of SEQ ID NO: 588115
uccucaugucuccgauuua

SEQ ID NO: 908667 - RNA, 19 nt, Artificial Sequence
  Description of Artificial Sequence: Synthetic oligonucleotide
  Antisense strand to SEQ ID NO: 908666
uaaaucggagacaugagga

SEQ ID NO: 908668 - RNA, 19 nt, Artificial Sequence
  Description of Artificial Sequence: Synthetic oligonucleotide
  Sense strand starting at position 3554 of SEQ ID NO: 588115
ggaauuaaaugcuuggaug

SEQ ID NO: 908669 - RNA, 19 nt, Artificial Sequence
  Description of Artificial Sequence: Synthetic oligonucleotide
  Antisense strand to SEQ ID NO: 908668
cauccaagcauuuaauucc

SEQ ID NO: 908670 - RNA, 19 nt, Artificial Sequence
  Description of Artificial Sequence: Synthetic oligonucleotide
  Sense strand starting at position 3628 of SEQ ID NO: 588115
aaaugagugugcuuggaua

SEQ ID NO: 908671 - RNA, 19 nt, Artificial Sequence
  Description of Artificial Sequence: Synthetic oligonucleotide
  Antisense strand to SEQ ID NO: 908670
uauccaagcacacucauuu

SEQ ID NO: 908672 - RNA, 19 nt, Artificial Sequence
  Description of Artificial Sequence: Synthetic oligonucleotide
  Sense strand starting at position 3698 of SEQ ID NO: 588115
uuacaucagaugugagaug

SEQ ID NO: 908673 - RNA, 19 nt, Artificial Sequence
  Description of Artificial Sequence: Synthetic oligonucleotide
  Antisense strand to SEQ ID NO: 908672
caucucacaucugauguaa

SEQ ID NO: 908674 - RNA, 19 nt, Artificial Sequence
  Description of Artificial Sequence: Synthetic oligonucleotide
  Sense strand starting at position 3703 of SEQ ID NO: 588115
ucagaugugagauguuaua

SEQ ID NO: 908675 - RNA, 19 nt, Artificial Sequence
  Description of Artificial Sequence: Synthetic oligonucleotide
  Antisense strand to SEQ ID NO: 908674
uauaacaucucacaucuga

SEQ ID NO: 908676 - RNA, 19 nt, Artificial Sequence
  Description of Artificial Sequence: Synthetic oligonucleotide
  Sense strand starting at position 23 of SEQ ID NO: 588127
ccucacuggcuguaacaaa

SEQ ID NO: 908677 - RNA, 19 nt, Artificial Sequence
  Description of Artificial Sequence: Synthetic oligonucleotide
  Antisense strand to SEQ ID NO: 908676
uuuguuacagccagugagg

SEQ ID NO: 908678 - RNA, 19 nt, Artificial Sequence
  Description of Artificial Sequence: Synthetic oligonucleotide
  Sense strand starting at position 143 of SEQ ID NO: 588127
agugcauguaucuguauuu

SEQ ID NO: 908679 - RNA, 19 nt, Artificial Sequence
  Description of Artificial Sequence: Synthetic oligonucleotide
  Antisense strand to SEQ ID NO: 908678
aaauacagauacaugcacu

SEQ ID NO: 908680 - RNA, 19 nt, Artificial Sequence
  Description of Artificial Sequence: Synthetic oligonucleotide
  Sense strand starting at position 181 of SEQ ID NO: 588127
aauggaguugauggguaaa

SEQ ID NO: 908681 - RNA, 19 nt, Artificial Sequence
  Description of Artificial Sequence: Synthetic oligonucleotide
  Antisense strand to SEQ ID NO: 908680
uuuacccaucaacuccauu

SEQ ID NO: 908682 - RNA, 19 nt, Artificial Sequence
  Description of Artificial Sequence: Synthetic oligonucleotide
  Sense strand starting at position 351 of SEQ ID NO: 588127
cuuaaauucucuuaggaga

SEQ ID NO: 908683 - RNA, 19 nt, Artificial Sequence
  Description of Artificial Sequence: Synthetic oligonucleotide
  Antisense strand to SEQ ID NO: 908682
ucuccuaagagaauuuaag

SEQ ID NO: 908684 - RNA, 19 nt, Artificial Sequence
  Description of Artificial Sequence: Synthetic oligonucleotide
  Sense strand starting at position 426 of SEQ ID NO: 588127
uuugcucacuguuagaguu

SEQ ID NO: 908685 - RNA, 19 nt, Artificial Sequence
  Description of Artificial Sequence: Synthetic oligonucleotide
  Antisense strand to SEQ ID NO: 908684
aacucuaacagugagcaaa

SEQ ID NO: 908686 - RNA, 19 nt, Artificial Sequence
  Description of Artificial Sequence: Synthetic oligonucleotide
  Sense strand starting at position 600 of SEQ ID NO: 588127
gaauaaauucccuguagga

SEQ ID NO: 908687 - RNA, 19 nt, Artificial Sequence
  Description of Artificial Sequence: Synthetic oligonucleotide
  Antisense strand to SEQ ID NO: 908686
uccuacagggaauuuauuc

SEQ ID NO: 908688 - RNA, 19 nt, Artificial Sequence
  Description of Artificial Sequence: Synthetic oligonucleotide
  Sense strand starting at position 767 of SEQ ID NO: 588127
gccugcuugugaggucauu

SEQ ID NO: 908689 - RNA, 19 nt, Artificial Sequence
  Description of Artificial Sequence: Synthetic oligonucleotide
  Antisense strand to SEQ ID NO: 908688
aaugaccucacaagcaggc

SEQ ID NO: 908690 - RNA, 19 nt, Artificial Sequence
  Description of Artificial Sequence: Synthetic oligonucleotide
  Sense strand starting at position 1071 of SEQ ID NO: 588127
uguguuuguagcuguuagu

SEQ ID NO: 908691 - RNA, 19 nt, Artificial Sequence
  Description of Artificial Sequence: Synthetic oligonucleotide
  Antisense strand to SEQ ID NO: 908690
acuaacagcuacaaacaca

SEQ ID NO: 908692 - RNA, 19 nt, Artificial Sequence
  Description of Artificial Sequence: Synthetic oligonucleotide
  Sense strand starting at position 1072 of SEQ ID NO: 588127
guguuuguagcuguuagua

SEQ ID NO: 908693 - RNA, 19 nt, Artificial Sequence
  Description of Artificial Sequence: Synthetic oligonucleotide
  Antisense strand to SEQ ID NO: 908692
uacuaacagcuacaaacac

SEQ ID NO: 908694 - RNA, 19 nt, Artificial Sequence
  Description of Artificial Sequence: Synthetic oligonucleotide
  Sense strand starting at position 1074 of SEQ ID NO: 588127
guuuguagcuguuaguaaa

SEQ ID NO: 908695 - RNA, 19 nt, Artificial Sequence
  Description of Artificial Sequence: Synthetic oligonucleotide
  Antisense strand to SEQ ID NO: 908694
uuuacuaacagcuacaaac

SEQ ID NO: 908696 - RNA, 19 nt, Artificial Sequence
  Description of Artificial Sequence: Synthetic oligonucleotide
  Sense strand starting at position 1077 of SEQ ID NO: 588127
uguagcuguuaguaaauaa

SEQ ID NO: 908697 - RNA, 19 nt, Artificial Sequence
  Description of Artificial Sequence: Synthetic oligonucleotide
  Antisense strand to SEQ ID NO: 908696
uuauuuacuaacagcuaca

SEQ ID NO: 908698 - RNA, 19 nt, Artificial Sequence
  Description of Artificial Sequence: Synthetic oligonucleotide
  Sense strand starting at position 1104 of SEQ ID NO: 588127
gggaauuaauagcacguuu

SEQ ID NO: 908699 - RNA, 19 nt, Artificial Sequence
  Description of Artificial Sequence: Synthetic oligonucleotide
  Antisense strand to SEQ ID NO: 908698
aaacgugcuauuaauuccc

SEQ ID NO: 908700 - RNA, 19 nt, Artificial Sequence
  Description of Artificial Sequence: Synthetic oligonucleotide
  Sense strand starting at position 1173 of SEQ ID NO: 588127
augucaucacaaugguaag

SEQ ID NO: 908701 - RNA, 19 nt, Artificial Sequence
  Description of Artificial Sequence: Synthetic oligonucleotide
  Antisense strand to SEQ ID NO: 908700
cuuaccauugugaugacau

SEQ ID NO: 908702 - RNA, 19 nt, Artificial Sequence
  Description of Artificial Sequence: Synthetic oligonucleotide
  Sense strand starting at position 1176 of SEQ ID NO: 588127
ucaucacaaugguaagaca

SEQ ID NO: 908703 - RNA, 19 nt, Artificial Sequence
  Description of Artificial Sequence: Synthetic oligonucleotide
  Antisense strand to SEQ ID NO: 908702
ugucuuaccauugugauga

SEQ ID NO: 908704 - RNA, 19 nt, Artificial Sequence
  Description of Artificial Sequence: Synthetic oligonucleotide
  Sense strand starting at position 1408 of SEQ ID NO: 588127
cugagaacucuucgccuac

SEQ ID NO: 908705 - RNA, 19 nt, Artificial Sequence
  Description of Artificial Sequence: Synthetic oligonucleotide
  Antisense strand to SEQ ID NO: 908704
guaggcgaagaguucucag

SEQ ID NO: 908706 - RNA, 19 nt, Artificial Sequence
  Description of Artificial Sequence: Synthetic oligonucleotide
  Sense strand starting at position 1488 of SEQ ID NO: 588127
uguauauggcuccauguuu

SEQ ID NO: 908707 - RNA, 19 nt, Artificial Sequence
  Description of Artificial Sequence: Synthetic oligonucleotide
  Antisense strand to SEQ ID NO: 908706
aaacauggagccauauaca

SEQ ID NO: 908708 - RNA, 19 nt, Artificial Sequence
  Description of Artificial Sequence: Synthetic oligonucleotide
  Sense strand starting at position 1511 of SEQ ID NO: 588127
cguagauaugcuuaacuuu

SEQ ID NO: 908709 - RNA, 19 nt, Artificial Sequence
  Description of Artificial Sequence: Synthetic oligonucleotide
  Antisense strand to SEQ ID NO: 908708
aaaguuaagcauaucuacg

SEQ ID NO: 908710 - RNA, 19 nt, Artificial Sequence
  Description of Artificial Sequence: Synthetic oligonucleotide
  Sense strand starting at position 1569 of SEQ ID NO: 588127
gcgggaaauucccagcgau

SEQ ID NO: 908711 - RNA, 19 nt, Artificial Sequence
  Description of Artificial Sequence: Synthetic oligonucleotide
  Antisense strand to SEQ ID NO: 908710
aucgcugggaauuucccgc

SEQ ID NO: 908712 - RNA, 19 nt, Artificial Sequence
  Description of Artificial Sequence: Synthetic oligonucleotide
  Sense strand starting at position 1572 of SEQ ID NO: 588127
ggaaauucccagcgaugga

SEQ ID NO: 908713 - RNA, 19 nt, Artificial Sequence
  Description of Artificial Sequence: Synthetic oligonucleotide
  Antisense strand to SEQ ID NO: 908712
uccaucgcugggaauuucc

SEQ ID NO: 908714 - RNA, 19 nt, Artificial Sequence
  Description of Artificial Sequence: Synthetic oligonucleotide
  Sense strand starting at position 3057 of SEQ ID NO: 588127
acuauucugugagguaauu

SEQ ID NO: 908715 - RNA, 19 nt, Artificial Sequence
  Description of Artificial Sequence: Synthetic oligonucleotide
  Antisense strand to SEQ ID NO: 908714
aauuaccucacagaauagu

SEQ ID NO: 908716 - RNA, 19 nt, Artificial Sequence
  Description of Artificial Sequence: Synthetic oligonucleotide
  Sense strand starting at position 3109 of SEQ ID NO: 588127
ucagaaugugcauauaaac

SEQ ID NO: 908717 - RNA, 19 nt, Artificial Sequence
  Description of Artificial Sequence: Synthetic oligonucleotide
  Antisense strand to SEQ ID NO: 908716
guuuauaugcacauucuga

SEQ ID NO: 908718 - RNA, 19 nt, Artificial Sequence
  Description of Artificial Sequence: Synthetic oligonucleotide
  Sense strand starting at position 3380 of SEQ ID NO: 588127
ucaaguuauguggaacuuu

SEQ ID NO: 908719 - RNA, 19 nt, Artificial Sequence
  Description of Artificial Sequence: Synthetic oligonucleotide
  Antisense strand to SEQ ID NO: 908718
aaaguuccacauaacuuga

SEQ ID NO: 908720 - RNA, 19 nt, Artificial Sequence
  Description of Artificial Sequence: Synthetic oligonucleotide
  Sense strand starting at position 3388 of SEQ ID NO: 588127
uguggaacuuucucuagga

SEQ ID NO: 908721 - RNA, 19 nt, Artificial Sequence
  Description of Artificial Sequence: Synthetic oligonucleotide
  Antisense strand to SEQ ID NO: 908720
uccuagagaaaguuccaca

SEQ ID NO: 908722 - RNA, 19 nt, Artificial Sequence
  Description of Artificial Sequence: Synthetic oligonucleotide
  Sense strand starting at position 3389 of SEQ ID NO: 588127
guggaacuuucucuaggau

SEQ ID NO: 908723 - RNA, 19 nt, Artificial Sequence
  Description of Artificial Sequence: Synthetic oligonucleotide
  Antisense strand to SEQ ID NO: 908722
auccuagagaaaguuccac

SEQ ID NO: 908724 - RNA, 19 nt, Artificial Sequence
  Description of Artificial Sequence: Synthetic oligonucleotide
  Sense strand starting at position 3850 of SEQ ID NO: 588127
guuggagagcaguagaaua

SEQ ID NO: 908725 - RNA, 19 nt, Artificial Sequence
  Description of Artificial Sequence: Synthetic oligonucleotide
  Antisense strand to SEQ ID NO: 908724
uauucuacugcucuccaac

SEQ ID NO: 908726 - RNA, 19 nt, Artificial Sequence
  Description of Artificial Sequence: Synthetic oligonucleotide
  Sense strand starting at position 58 of SEQ ID NO: 588156
uguccuaucucaucaggaa

SEQ ID NO: 908727 - RNA, 19 nt, Artificial Sequence
  Description of Artificial Sequence: Synthetic oligonucleotide
  Antisense strand to SEQ ID NO: 908726
uuccugaugagauaggaca

SEQ ID NO: 908728 - RNA, 19 nt, Artificial Sequence
  Description of Artificial Sequence: Synthetic oligonucleotide
  Sense strand starting at position 183 of SEQ ID NO: 588156
cuuaaagucuguccagaca

SEQ ID NO: 908729 - RNA, 19 nt, Artificial Sequence
  Description of Artificial Sequence: Synthetic oligonucleotide
  Antisense strand to SEQ ID NO: 908728
ugucuggacagacuuuaag

SEQ ID NO: 908730 - RNA, 19 nt, Artificial Sequence
  Description of Artificial Sequence: Synthetic oligonucleotide
  Sense strand starting at position 253 of SEQ ID NO: 588156
uagaauauggugcauauua

SEQ ID NO: 908731 - RNA, 19 nt, Artificial Sequence
  Description of Artificial Sequence: Synthetic oligonucleotide
  Antisense strand to SEQ ID NO: 908730
uaauaugcaccauauucua

SEQ ID NO: 908732 - RNA, 19 nt, Artificial Sequence
  Description of Artificial Sequence: Synthetic oligonucleotide
  Sense strand starting at position 255 of SEQ ID NO: 588156
gaauauggugcauauuagu

SEQ ID NO: 908733 - RNA, 19 nt, Artificial Sequence
  Description of Artificial Sequence: Synthetic oligonucleotide
  Antisense strand to SEQ ID NO: 908732
acuaauaugcaccauauuc

SEQ ID NO: 908734 - RNA, 19 nt, Artificial Sequence
  Description of Artificial Sequence: Synthetic oligonucleotide
  Sense strand starting at position 508 of SEQ ID NO: 588156
ugucucugucuggaauaau

SEQ ID NO: 908735 - RNA, 19 nt, Artificial Sequence
  Description of Artificial Sequence: Synthetic oligonucleotide
  Antisense strand to SEQ ID NO: 908734
auuauuccagacagagaca

SEQ ID NO: 908736 - RNA, 19 nt, Artificial Sequence
  Description of Artificial Sequence: Synthetic oligonucleotide
  Sense strand starting at position 657 of SEQ ID NO: 588156
ugagauaagucugcccaag

SEQ ID NO: 908737 - RNA, 19 nt, Artificial Sequence
  Description of Artificial Sequence: Synthetic oligonucleotide
  Antisense strand to SEQ ID NO: 908736
cuugggcagacuuaucuca

SEQ ID NO: 908738 - RNA, 19 nt, Artificial Sequence
  Description of Artificial Sequence: Synthetic oligonucleotide
  Sense strand starting at position 659 of SEQ ID NO: 588156
agauaagucugcccaagaa

SEQ ID NO: 908739 - RNA, 19 nt, Artificial Sequence
  Description of Artificial Sequence: Synthetic oligonucleotide
  Antisense strand to SEQ ID NO: 908738
uucuugggcagacuuaucu

SEQ ID NO: 908740 - RNA, 19 nt, Artificial Sequence
  Description of Artificial Sequence: Synthetic oligonucleotide
  Sense strand starting at position 771 of SEQ ID NO: 588156
uuaccaugccuugaaaguu

SEQ ID NO: 908741 - RNA, 19 nt, Artificial Sequence
  Description of Artificial Sequence: Synthetic oligonucleotide
  Antisense strand to SEQ ID NO: 908740
aacuuucaaggcaugguaa

SEQ ID NO: 908742 - RNA, 19 nt, Artificial Sequence
  Description of Artificial Sequence: Synthetic oligonucleotide
  Sense strand starting at position 863 of SEQ ID NO: 588156
ugcuuaacagauuauaggu

SEQ ID NO: 908743 - RNA, 19 nt, Artificial Sequence
  Description of Artificial Sequence: Synthetic oligonucleotide
  Antisense strand to SEQ ID NO: 908742
accuauaaucuguuaagca

SEQ ID NO: 908744 - RNA, 19 nt, Artificial Sequence
  Description of Artificial Sequence: Synthetic oligonucleotide
  Sense strand starting at position 872 of SEQ ID NO: 588156
gauuauaggugcucaacaa

SEQ ID NO: 908745 - RNA, 19 nt, Artificial Sequence
  Description of Artificial Sequence: Synthetic oligonucleotide
  Antisense strand to SEQ ID NO: 908744
uuguugagcaccuauaauc

SEQ ID NO: 908746 - RNA, 19 nt, Artificial Sequence
  Description of Artificial Sequence: Synthetic oligonucleotide
  Sense strand starting at position 873 of SEQ ID NO: 588156
auuauaggugcucaacaaa

SEQ ID NO: 908747 - RNA, 19 nt, Artificial Sequence
  Description of Artificial Sequence: Synthetic oligonucleotide
  Antisense strand to SEQ ID NO: 908746
uuuguugagcaccuauaau

SEQ ID NO: 908748 - RNA, 19 nt, Artificial Sequence
  Description of Artificial Sequence: Synthetic oligonucleotide
  Sense strand starting at position 921 of SEQ ID NO: 588156
uggcuuaacccggagguua

SEQ ID NO: 908749 - RNA, 19 nt, Artificial Sequence
  Description of Artificial Sequence: Synthetic oligonucleotide
  Antisense strand to SEQ ID NO: 908748
uaaccuccggguuaagcca

SEQ ID NO: 908750 - RNA, 19 nt, Artificial Sequence
  Description of Artificial Sequence: Synthetic oligonucleotide
  Sense strand starting at position 1004 of SEQ ID NO: 588156
ggaacugagcuguaacagu

SEQ ID NO: 908751 - RNA, 19 nt, Artificial Sequence
  Description of Artificial Sequence: Synthetic oligonucleotide
  Antisense strand to SEQ ID NO: 908750
acuguuacagcucaguucc

SEQ ID NO: 908752 - RNA, 19 nt, Artificial Sequence
  Description of Artificial Sequence: Synthetic oligonucleotide
  Sense strand starting at position 1015 of SEQ ID NO: 588156
guaacaguauucccuagga

SEQ ID NO: 908753 - RNA, 19 nt, Artificial Sequence
  Description of Artificial Sequence: Synthetic oligonucleotide
  Antisense strand to SEQ ID NO: 908752
uccuagggaauacuguuac

SEQ ID NO: 908754 - RNA, 19 nt, Artificial Sequence
  Description of Artificial Sequence: Synthetic oligonucleotide
  Sense strand starting at position 1177 of SEQ ID NO: 588156
guuuaaaugaaguggaaca

SEQ ID NO: 908755 - RNA, 19 nt, Artificial Sequence
  Description of Artificial Sequence: Synthetic oligonucleotide
  Antisense strand to SEQ ID NO: 908754
uguuccacuucauuuaaac

SEQ ID NO: 908756 - RNA, 19 nt, Artificial Sequence
  Description of Artificial Sequence: Synthetic oligonucleotide
  Sense strand starting at position 1188 of SEQ ID NO: 588156
guggaacagucccucaaga

SEQ ID NO: 908757 - RNA, 19 nt, Artificial Sequence
  Description of Artificial Sequence: Synthetic oligonucleotide
  Antisense strand to SEQ ID NO: 908756
ucuugagggacuguuccac

SEQ ID NO: 908758 - RNA, 19 nt, Artificial Sequence
  Description of Artificial Sequence: Synthetic oligonucleotide
  Sense strand starting at position 1267 of SEQ ID NO: 588156
uuaagauucuccguaauaa

SEQ ID NO: 908759 - RNA, 19 nt, Artificial Sequence
  Description of Artificial Sequence: Synthetic oligonucleotide
  Antisense strand to SEQ ID NO: 908758
uuauuacggagaaucuuaa

SEQ ID NO: 908760 - RNA, 19 nt, Artificial Sequence
  Description of Artificial Sequence: Synthetic oligonucleotide
  Sense strand starting at position 1321 of SEQ ID NO: 588156
ccacuaauagcugaguuua

SEQ ID NO: 908761 - RNA, 19 nt, Artificial Sequence
  Description of Artificial Sequence: Synthetic oligonucleotide
  Antisense strand to SEQ ID NO: 908760
uaaacucagcuauuagugg

SEQ ID NO: 908762 - RNA, 19 nt, Artificial Sequence
  Description of Artificial Sequence: Synthetic oligonucleotide
  Sense strand starting at position 1323 of SEQ ID NO: 588156
acuaauagcugaguuuaca

SEQ ID NO: 908763 - RNA, 19 nt, Artificial Sequence
  Description of Artificial Sequence: Synthetic oligonucleotide
  Antisense strand to SEQ ID NO: 908762
uguaaacucagcuauuagu

SEQ ID NO: 908764 - RNA, 19 nt, Artificial Sequence
  Description of Artificial Sequence: Synthetic oligonucleotide
  Sense strand starting at position 1455 of SEQ ID NO: 588156
cgcugaaugcggucacuuu

SEQ ID NO: 908765 - RNA, 19 nt, Artificial Sequence
  Description of Artificial Sequence: Synthetic oligonucleotide
  Antisense strand to SEQ ID NO: 908764
aaagugaccgcauucagcg

SEQ ID NO: 908766 - RNA, 19 nt, Artificial Sequence
  Description of Artificial Sequence: Synthetic oligonucleotide
  Sense strand starting at position 1495 of SEQ ID NO: 588156
acacguuuagguuauuaaa

SEQ ID NO: 908767 - RNA, 19 nt, Artificial Sequence
  Description of Artificial Sequence: Synthetic oligonucleotide
  Antisense strand to SEQ ID NO: 908766
uuuaauaaccuaaacgugu

SEQ ID NO: 908768 - RNA, 19 nt, Artificial Sequence
  Description of Artificial Sequence: Synthetic oligonucleotide
  Sense strand starting at position 1515 of SEQ ID NO: 588156
gcaagaaauaggugcacaa

SEQ ID NO: 908769 - RNA, 19 nt, Artificial Sequence
  Description of Artificial Sequence: Synthetic oligonucleotide
  Antisense strand to SEQ ID NO: 908768
uugugcaccuauuucuugc

SEQ ID NO: 908770 - RNA, 19 nt, Artificial Sequence
  Description of Artificial Sequence: Synthetic oligonucleotide
  Sense strand starting at position 2161 of SEQ ID NO: 588156
uuggaugguuuguccaaua

SEQ ID NO: 908771 - RNA, 19 nt, Artificial Sequence
  Description of Artificial Sequence: Synthetic oligonucleotide
  Antisense strand to SEQ ID NO: 908770
uauuggacaaaccauccaa

SEQ ID NO: 908772 - RNA, 19 nt, Artificial Sequence
  Description of Artificial Sequence: Synthetic oligonucleotide
  Sense strand starting at position 2285 of SEQ ID NO: 588156
cccugcgguccuguguuaa

SEQ ID NO: 908773 - RNA, 19 nt, Artificial Sequence
  Description of Artificial Sequence: Synthetic oligonucleotide
  Antisense strand to SEQ ID NO: 908772
uuaacacaggaccgcaggg

SEQ ID NO: 908774 - RNA, 19 nt, Artificial Sequence
  Description of Artificial Sequence: Synthetic oligonucleotide
  Sense strand starting at position 2288 of SEQ ID NO: 588156
ugcgguccuguguuaagua

SEQ ID NO: 908775 - RNA, 19 nt, Artificial Sequence
  Description of Artificial Sequence: Synthetic oligonucleotide
  Antisense strand to SEQ ID NO: 908774
uacuuaacacaggaccgca

SEQ ID NO: 908776 - RNA, 19 nt, Artificial Sequence
  Description of Artificial Sequence: Synthetic oligonucleotide
  Sense strand starting at position 2403 of SEQ ID NO: 588156
guugguuuagcgucccuga

SEQ ID NO: 908777 - RNA, 19 nt, Artificial Sequence
  Description of Artificial Sequence: Synthetic oligonucleotide
  Antisense strand to SEQ ID NO: 908776
ucagggacgcuaaaccaac

SEQ ID NO: 908778 - RNA, 19 nt, Artificial Sequence
  Description of Artificial Sequence: Synthetic oligonucleotide
  Sense strand starting at position 2598 of SEQ ID NO: 588156
guagcucuuccagaaacuc

SEQ ID NO: 908779 - RNA, 19 nt, Artificial Sequence
  Description of Artificial Sequence: Synthetic oligonucleotide
  Antisense strand to SEQ ID NO: 908778
gaguuucuggaagagcuac

SEQ ID NO: 908780 - RNA, 19 nt, Artificial Sequence
  Description of Artificial Sequence: Synthetic oligonucleotide
  Sense strand starting at position 2604 of SEQ ID NO: 588156
cuuccagaaacucgggaua

SEQ ID NO: 908781 - RNA, 19 nt, Artificial Sequence
  Description of Artificial Sequence: Synthetic oligonucleotide
  Antisense strand to SEQ ID NO: 908780
uaucccgaguuucuggaag

SEQ ID NO: 908782 - RNA, 19 nt, Artificial Sequence
  Description of Artificial Sequence: Synthetic oligonucleotide
  Sense strand starting at position 2623 of SEQ ID NO: 588156
ucaauuuaguguguaggua

SEQ ID NO: 908783 - RNA, 19 nt, Artificial Sequence
  Description of Artificial Sequence: Synthetic oligonucleotide
  Antisense strand to SEQ ID NO: 908782
uaccuacacacuaaauuga

SEQ ID NO: 908784 - RNA, 19 nt, Artificial Sequence
  Description of Artificial Sequence: Synthetic oligonucleotide
  Sense strand starting at position 2632 of SEQ ID NO: 588156
uguguagguacucaucaaa

SEQ ID NO: 908785 - RNA, 19 nt, Artificial Sequence
  Description of Artificial Sequence: Synthetic oligonucleotide
  Antisense strand to SEQ ID NO: 908784
uuugaugaguaccuacaca

SEQ ID NO: 908786 - RNA, 19 nt, Artificial Sequence
  Description of Artificial Sequence: Synthetic oligonucleotide
  Sense strand starting at position 2635 of SEQ ID NO: 588156
guagguacucaucaaagca

SEQ ID NO: 908787 - RNA, 19 nt, Artificial Sequence
  Description of Artificial Sequence: Synthetic oligonucleotide
  Antisense strand to SEQ ID NO: 908786
ugcuuugaugaguaccuac

SEQ ID NO: 908788 - RNA, 19 nt, Artificial Sequence
  Description of Artificial Sequence: Synthetic oligonucleotide
  Sense strand starting at position 3306 of SEQ ID NO: 588156
gcaucucaggcucaaauga

SEQ ID NO: 908789 - RNA, 19 nt, Artificial Sequence
  Description of Artificial Sequence: Synthetic oligonucleotide
  Antisense strand to SEQ ID NO: 908788
ucauuugagccugagaugc

SEQ ID NO: 908790 - RNA, 19 nt, Artificial Sequence
  Description of Artificial Sequence: Synthetic oligonucleotide
  Sense strand starting at position 3403 of SEQ ID NO: 588156
agagauggguguuucuaug

SEQ ID NO: 908791 - RNA, 19 nt, Artificial Sequence
  Description of Artificial Sequence: Synthetic oligonucleotide
  Antisense strand to SEQ ID NO: 908790
cauagaaacacccaucucu

SEQ ID NO: 908792 - RNA, 19 nt, Artificial Sequence
  Description of Artificial Sequence: Synthetic oligonucleotide
  Sense strand starting at position 3682 of SEQ ID NO: 588156
uggucuuguggucaccaga

SEQ ID NO: 908793 - RNA, 19 nt, Artificial Sequence
  Description of Artificial Sequence: Synthetic oligonucleotide
  Antisense strand to SEQ ID NO: 908792
ucuggugaccacaagacca

SEQ ID NO: 908794 - RNA, 19 nt, Artificial Sequence
  Description of Artificial Sequence: Synthetic oligonucleotide
  Sense strand starting at position 3706 of SEQ ID NO: 588156
gguaaaucuggaggugaca

SEQ ID NO: 908795 - RNA, 19 nt, Artificial Sequence
  Description of Artificial Sequence: Synthetic oligonucleotide
  Antisense strand to SEQ ID NO: 908794
ugucaccuccagauuuacc

SEQ ID NO: 908796 - RNA, 19 nt, Artificial Sequence
  Description of Artificial Sequence: Synthetic oligonucleotide
  Sense strand starting at position 3795 of SEQ ID NO: 588156
cguguuacccaagcaguuu

SEQ ID NO: 908797 - RNA, 19 nt, Artificial Sequence
  Description of Artificial Sequence: Synthetic oligonucleotide
  Antisense strand to SEQ ID NO: 908796
aaacugcuuggguaacacg

SEQ ID NO: 908798 - RNA, 19 nt, Artificial Sequence
  Description of Artificial Sequence: Synthetic oligonucleotide
  Sense strand starting at position 3819 of SEQ ID NO: 588156
ggaaguucuaauuggugag

SEQ ID NO: 908799 - RNA, 19 nt, Artificial Sequence
  Description of Artificial Sequence: Synthetic oligonucleotide
  Antisense strand to SEQ ID NO: 908798
cucaccaauuagaacuucc

SEQ ID NO: 908800 - RNA, 19 nt, Artificial Sequence
  Description of Artificial Sequence: Synthetic oligonucleotide
  Sense strand starting at position 3823 of SEQ ID NO: 588156
guucuaauuggugaguuua

SEQ ID NO: 908801 - RNA, 19 nt, Artificial Sequence
  Description of Artificial Sequence: Synthetic oligonucleotide
  Antisense strand to SEQ ID NO: 908800
uaaacucaccaauuagaac

SEQ ID NO: 908802 - RNA, 19 nt, Artificial Sequence
  Description of Artificial Sequence: Synthetic oligonucleotide
  Sense strand starting at position 3825 of SEQ ID NO: 588156
ucuaauuggugaguuuaga

SEQ ID NO: 908803 - RNA, 19 nt, Artificial Sequence
  Description of Artificial Sequence: Synthetic oligonucleotide
  Antisense strand to SEQ ID NO: 908802
ucuaaacucaccaauuaga

SEQ ID NO: 908804 - RNA, 19 nt, Artificial Sequence
  Description of Artificial Sequence: Synthetic oligonucleotide
  Sense strand starting at position 3955 of SEQ ID NO: 588156
gcauuuaccugucccauag

SEQ ID NO: 908805 - RNA, 19 nt, Artificial Sequence
  Description of Artificial Sequence: Synthetic oligonucleotide
  Antisense strand to SEQ ID NO: 908804
cuaugggacagguaaaugc

SEQ ID NO: 908806 - RNA, 19 nt, Artificial Sequence
  Description of Artificial Sequence: Synthetic oligonucleotide
  Sense strand starting at position 34 of SEQ ID NO: 588164
aguaaauguucuguuaacu

SEQ ID NO: 908807 - RNA, 19 nt, Artificial Sequence
  Description of Artificial Sequence: Synthetic oligonucleotide
  Antisense strand to SEQ ID NO: 908806
aguuaacagaacauuuacu

SEQ ID NO: 908808 - RNA, 19 nt, Artificial Sequence
  Description of Artificial Sequence: Synthetic oligonucleotide
  Sense strand starting at position 100 of SEQ ID NO: 588164
aguaacgugccagaaauaa

SEQ ID NO: 908809 - RNA, 19 nt, Artificial Sequence
  Description of Artificial Sequence: Synthetic oligonucleotide
  Antisense strand to SEQ ID NO: 908808
uuauuucuggcacguuacu

SEQ ID NO: 908810 - RNA, 19 nt, Artificial Sequence
  Description of Artificial Sequence: Synthetic oligonucleotide
  Sense strand starting at position 135 of SEQ ID NO: 588164
gcauguaugcguguggaca

SEQ ID NO: 908811 - RNA, 19 nt, Artificial Sequence
  Description of Artificial Sequence: Synthetic oligonucleotide
  Antisense strand to SEQ ID NO: 908810
uguccacacgcauacaugc

SEQ ID NO: 908812 - RNA, 19 nt, Artificial Sequence
  Description of Artificial Sequence: Synthetic oligonucleotide
  Sense strand starting at position 139 of SEQ ID NO: 588164
guaugcguguggacaguaa

SEQ ID NO: 908813 - RNA, 19 nt, Artificial Sequence
  Description of Artificial Sequence: Synthetic oligonucleotide
  Antisense strand to SEQ ID NO: 908812
uuacuguccacacgcauac

SEQ ID NO: 908814 - RNA, 19 nt, Artificial Sequence
  Description of Artificial Sequence: Synthetic oligonucleotide
  Sense strand starting at position 148 of SEQ ID NO: 588164
uggacaguaacacgugaaa

SEQ ID NO: 908815 - RNA, 19 nt, Artificial Sequence
  Description of Artificial Sequence: Synthetic oligonucleotide
  Antisense strand to SEQ ID NO: 908814
uuucacguguuacugucca

SEQ ID NO: 908816 - RNA, 19 nt, Artificial Sequence
  Description of Artificial Sequence: Synthetic oligonucleotide
  Sense strand starting at position 151 of SEQ ID NO: 588164
acaguaacacgugaaauug

SEQ ID NO: 908817 - RNA, 19 nt, Artificial Sequence
  Description of Artificial Sequence: Synthetic oligonucleotide
  Antisense strand to SEQ ID NO: 908816
caauuucacguguuacugu

SEQ ID NO: 908818 - RNA, 19 nt, Artificial Sequence
  Description of Artificial Sequence: Synthetic oligonucleotide
  Sense strand starting at position 160 of SEQ ID NO: 588164
cgugaaauugcagaauaca

SEQ ID NO: 908819 - RNA, 19 nt, Artificial Sequence
  Description of Artificial Sequence: Synthetic oligonucleotide
  Antisense strand to SEQ ID NO: 908818
uguauucugcaauuucacg

SEQ ID NO: 908820 - RNA, 19 nt, Artificial Sequence
  Description of Artificial Sequence: Synthetic oligonucleotide
  Sense strand starting at position 213 of SEQ ID NO: 588164
caaagucauuaggauauag

SEQ ID NO: 908821 - RNA, 19 nt, Artificial Sequence
  Description of Artificial Sequence: Synthetic oligonucleotide
  Antisense strand to SEQ ID NO: 908820
cuauauccuaaugacuuug

SEQ ID NO: 908822 - RNA, 19 nt, Artificial Sequence
  Description of Artificial Sequence: Synthetic oligonucleotide
  Sense strand starting at position 230 of SEQ ID NO: 588164
aggaauacauguguagaca

SEQ ID NO: 908823 - RNA, 19 nt, Artificial Sequence
  Description of Artificial Sequence: Synthetic oligonucleotide
  Antisense strand to SEQ ID NO: 908822
ugucuacacauguauuccu

SEQ ID NO: 908824 - RNA, 19 nt, Artificial Sequence
  Description of Artificial Sequence: Synthetic oligonucleotide
  Sense strand starting at position 242 of SEQ ID NO: 588164
guagacaaauaguuaacau

SEQ ID NO: 908825 - RNA, 19 nt, Artificial Sequence
  Description of Artificial Sequence: Synthetic oligonucleotide
  Antisense strand to SEQ ID NO: 908824
auguuaacuauuugucuac

SEQ ID NO: 908826 - RNA, 19 nt, Artificial Sequence
  Description of Artificial Sequence: Synthetic oligonucleotide
  Sense strand starting at position 303 of SEQ ID NO: 588164
uuuacaguguucuugugua

SEQ ID NO: 908827 - RNA, 19 nt, Artificial Sequence
  Description of Artificial Sequence: Synthetic oligonucleotide
  Antisense strand to SEQ ID NO: 908826
uacacaagaacacuguaaa

SEQ ID NO: 908828 - RNA, 19 nt, Artificial Sequence
  Description of Artificial Sequence: Synthetic oligonucleotide
  Sense strand starting at position 377 of SEQ ID NO: 588164
ugugaugucucacuuaaac

SEQ ID NO: 908829 - RNA, 19 nt, Artificial Sequence
  Description of Artificial Sequence: Synthetic oligonucleotide
  Antisense strand to SEQ ID NO: 908828
guuuaagugagacaucaca

SEQ ID NO: 908830 - RNA, 19 nt, Artificial Sequence
  Description of Artificial Sequence: Synthetic oligonucleotide
  Sense strand starting at position 412 of SEQ ID NO: 588164
ccaaguguccacgaaguau

SEQ ID NO: 908831 - RNA, 19 nt, Artificial Sequence
  Description of Artificial Sequence: Synthetic oligonucleotide
  Antisense strand to SEQ ID NO: 908830
auacuucguggacacuugg

SEQ ID NO: 908832 - RNA, 19 nt, Artificial Sequence
  Description of Artificial Sequence: Synthetic oligonucleotide
  Sense strand starting at position 416 of SEQ ID NO: 588164
guguccacgaaguauauaa

SEQ ID NO: 908833 - RNA, 19 nt, Artificial Sequence
  Description of Artificial Sequence: Synthetic oligonucleotide
  Antisense strand to SEQ ID NO: 908832
uuauauacuucguggacac

SEQ ID NO: 908834 - RNA, 19 nt, Artificial Sequence
  Description of Artificial Sequence: Synthetic oligonucleotide
  Sense strand starting at position 459 of SEQ ID NO: 588164
acuuuaauccuggguacac

SEQ ID NO: 908835 - RNA, 19 nt, Artificial Sequence
  Description of Artificial Sequence: Synthetic oligonucleotide
  Antisense strand to SEQ ID NO: 908834
guguacccaggauuaaagu

SEQ ID NO: 908836 - RNA, 19 nt, Artificial Sequence
  Description of Artificial Sequence: Synthetic oligonucleotide
  Sense strand starting at position 460 of SEQ ID NO: 588164
cuuuaauccuggguacaca

SEQ ID NO: 908837 - RNA, 19 nt, Artificial Sequence
  Description of Artificial Sequence: Synthetic oligonucleotide
  Antisense strand to SEQ ID NO: 908836
uguguacccaggauuaaag

SEQ ID NO: 908838 - RNA, 19 nt, Artificial Sequence
  Description of Artificial Sequence: Synthetic oligonucleotide
  Sense strand starting at position 580 of SEQ ID NO: 588164
aauuucugucagcguuacu

SEQ ID NO: 908839 - RNA, 19 nt, Artificial Sequence
  Description of Artificial Sequence: Synthetic oligonucleotide
  Antisense strand to SEQ ID NO: 908838
aguaacgcugacagaaauu

SEQ ID NO: 908840 - RNA, 19 nt, Artificial Sequence
  Description of Artificial Sequence: Synthetic oligonucleotide
  Sense strand starting at position 686 of SEQ ID NO: 588164
uugugacuuugaucacuga

SEQ ID NO: 908841 - RNA, 19 nt, Artificial Sequence
  Description of Artificial Sequence: Synthetic oligonucleotide
  Antisense strand to SEQ ID NO: 908840
ucagugaucaaagucacaa

SEQ ID NO: 908842 - RNA, 19 nt, Artificial Sequence
  Description of Artificial Sequence: Synthetic oligonucleotide
  Sense strand starting at position 793 of SEQ ID NO: 588164
cggaauacaccaugucaga

SEQ ID NO: 908843 - RNA, 19 nt, Artificial Sequence
  Description of Artificial Sequence: Synthetic oligonucleotide
  Antisense strand to SEQ ID NO: 908842
ucugacaugguguauuccg

SEQ ID NO: 908844 - RNA, 19 nt, Artificial Sequence
  Description of Artificial Sequence: Synthetic oligonucleotide
  Sense strand starting at position 947 of SEQ ID NO: 588164
gcuuccucgcugcaaagaa

SEQ ID NO: 908845 - RNA, 19 nt, Artificial Sequence
  Description of Artificial Sequence: Synthetic oligonucleotide
  Antisense strand to SEQ ID NO: 908844
uucuuugcagcgaggaagc

SEQ ID NO: 908846 - RNA, 19 nt, Artificial Sequence
  Description of Artificial Sequence: Synthetic oligonucleotide
  Sense strand starting at position 962 of SEQ ID NO: 588164
agaagucgcuucucguaga

SEQ ID NO: 908847 - RNA, 19 nt, Artificial Sequence
  Description of Artificial Sequence: Synthetic oligonucleotide
  Antisense strand to SEQ ID NO: 908846
ucuacgagaagcgacuucu

SEQ ID NO: 908848 - RNA, 19 nt, Artificial Sequence
  Description of Artificial Sequence: Synthetic oligonucleotide
  Sense strand starting at position 991 of SEQ ID NO: 588164
uggagucucgcuuggcaaa

SEQ ID NO: 908849 - RNA, 19 nt, Artificial Sequence
  Description of Artificial Sequence: Synthetic oligonucleotide
  Antisense strand to SEQ ID NO: 908848
uuugccaagcgagacucca

SEQ ID NO: 908850 - RNA, 19 nt, Artificial Sequence
  Description of Artificial Sequence: Synthetic oligonucleotide
  Sense strand starting at position 1148 of SEQ ID NO: 588164
ccagucaacgugcaaguaa

SEQ ID NO: 908851 - RNA, 19 nt, Artificial Sequence
  Description of Artificial Sequence: Synthetic oligonucleotide
  Antisense strand to SEQ ID NO: 908850
uuacuugcacguugacugg

SEQ ID NO: 908852 - RNA, 19 nt, Artificial Sequence
  Description of Artificial Sequence: Synthetic oligonucleotide
  Sense strand starting at position 1297 of SEQ ID NO: 588164
gaagauuccgaaugugaag

SEQ ID NO: 908853 - RNA, 19 nt, Artificial Sequence
  Description of Artificial Sequence: Synthetic oligonucleotide
  Antisense strand to SEQ ID NO: 908852
cuucacauucggaaucuuc

SEQ ID NO: 908854 - RNA, 19 nt, Artificial Sequence
  Description of Artificial Sequence: Synthetic oligonucleotide
  Sense strand starting at position 1803 of SEQ ID NO: 588164
ggucauuucugaggaaguc

SEQ ID NO: 908855 - RNA, 19 nt, Artificial Sequence
  Description of Artificial Sequence: Synthetic oligonucleotide
  Antisense strand to SEQ ID NO: 908854
gacuuccucagaaaugacc

SEQ ID NO: 908856 - RNA, 19 nt, Artificial Sequence
  Description of Artificial Sequence: Synthetic oligonucleotide
  Sense strand starting at position 1842 of SEQ ID NO: 588164
gguggaaacuucuuaccau

SEQ ID NO: 908857 - RNA, 19 nt, Artificial Sequence
  Description of Artificial Sequence: Synthetic oligonucleotide
  Antisense strand to SEQ ID NO: 908856
augguaagaaguuuccacc

SEQ ID NO: 908858 - RNA, 19 nt, Artificial Sequence
  Description of Artificial Sequence: Synthetic oligonucleotide
  Sense strand starting at position 1892 of SEQ ID NO: 588164
gccucuuggucuccucuua

SEQ ID NO: 908859 - RNA, 19 nt, Artificial Sequence
  Description of Artificial Sequence: Synthetic oligonucleotide
  Antisense strand to SEQ ID NO: 908858
uaagaggagaccaagaggc

SEQ ID NO: 908860 - RNA, 19 nt, Artificial Sequence
  Description of Artificial Sequence: Synthetic oligonucleotide
  Sense strand starting at position 2059 of SEQ ID NO: 588164
gcgcucaggugacugauuu

SEQ ID NO: 908861 - RNA, 19 nt, Artificial Sequence
  Description of Artificial Sequence: Synthetic oligonucleotide
  Antisense strand to SEQ ID NO: 908860
aaaucagucaccugagcgc

SEQ ID NO: 908862 - RNA, 19 nt, Artificial Sequence
  Description of Artificial Sequence: Synthetic oligonucleotide
  Sense strand starting at position 2060 of SEQ ID NO: 588164
cgcucaggugacugauuua

SEQ ID NO: 908863 - RNA, 19 nt, Artificial Sequence
  Description of Artificial Sequence: Synthetic oligonucleotide
  Antisense strand to SEQ ID NO: 908862
uaaaucagucaccugagcg

SEQ ID NO: 908864 - RNA, 19 nt, Artificial Sequence
  Description of Artificial Sequence: Synthetic oligonucleotide
  Sense strand starting at position 2272 of SEQ ID NO: 588164
cagaauugucgugacuaca

SEQ ID NO: 908865 - RNA, 19 nt, Artificial Sequence
  Description of Artificial Sequence: Synthetic oligonucleotide
  Antisense strand to SEQ ID NO: 908864
uguagucacgacaauucug

SEQ ID NO: 908866 - RNA, 19 nt, Artificial Sequence
  Description of Artificial Sequence: Synthetic oligonucleotide
  Sense strand starting at position 2330 of SEQ ID NO: 588164
guuguuuguccucagaggu

SEQ ID NO: 908867 - RNA, 19 nt, Artificial Sequence
  Description of Artificial Sequence: Synthetic oligonucleotide
  Antisense strand to SEQ ID NO: 908866
accucugaggacaaacaac

SEQ ID NO: 908868 - RNA, 19 nt, Artificial Sequence
  Description of Artificial Sequence: Synthetic oligonucleotide
  Sense strand starting at position 3081 of SEQ ID NO: 588164
cagucacaucuguggguga

SEQ ID NO: 908869 - RNA, 19 nt, Artificial Sequence
  Description of Artificial Sequence: Synthetic oligonucleotide
  Antisense strand to SEQ ID NO: 908868
ucacccacagaugugacug

SEQ ID NO: 908870 - RNA, 19 nt, Artificial Sequence
  Description of Artificial Sequence: Synthetic oligonucleotide
  Sense strand starting at position 3083 of SEQ ID NO: 588164
gucacaucugugggugaca

SEQ ID NO: 908871 - RNA, 19 nt, Artificial Sequence
  Description of Artificial Sequence: Synthetic oligonucleotide
  Antisense strand to SEQ ID NO: 908870
ugucacccacagaugugac

SEQ ID NO: 908872 - RNA, 19 nt, Artificial Sequence
  Description of Artificial Sequence: Synthetic oligonucleotide
  Sense strand starting at position 3170 of SEQ ID NO: 588164
ccugcagcugaacgauauu

SEQ ID NO: 908873 - RNA, 19 nt, Artificial Sequence
  Description of Artificial Sequence: Synthetic oligonucleotide
  Antisense strand to SEQ ID NO: 908872
aauaucguucagcugcagg

SEQ ID NO: 908874 - RNA, 19 nt, Artificial Sequence
  Description of Artificial Sequence: Synthetic oligonucleotide
  Sense strand starting at position 3324 of SEQ ID NO: 588164
acagcaaacuuucugguua

SEQ ID NO: 908875 - RNA, 19 nt, Artificial Sequence
  Description of Artificial Sequence: Synthetic oligonucleotide
  Antisense strand to SEQ ID NO: 908874
uaaccagaaaguuugcugu

SEQ ID NO: 908876 - RNA, 19 nt, Artificial Sequence
  Description of Artificial Sequence: Synthetic oligonucleotide
  Sense strand starting at position 3398 of SEQ ID NO: 588164
cagagaaucggcgaagacu

SEQ ID NO: 908877 - RNA, 19 nt, Artificial Sequence
  Description of Artificial Sequence: Synthetic oligonucleotide
  Antisense strand to SEQ ID NO: 908876
agucuucgccgauucucug

SEQ ID NO: 908878 - RNA, 19 nt, Artificial Sequence
  Description of Artificial Sequence: Synthetic oligonucleotide
  Sense strand starting at position 3406 of SEQ ID NO: 588164
cggcgaagacuuggcagaa

SEQ ID NO: 908879 - RNA, 19 nt, Artificial Sequence
  Description of Artificial Sequence: Synthetic oligonucleotide
  Antisense strand to SEQ ID NO: 908878
uucugccaagucuucgccg

SEQ ID NO: 908880 - RNA, 19 nt, Artificial Sequence
  Description of Artificial Sequence: Synthetic oligonucleotide
  Sense strand starting at position 3560 of SEQ ID NO: 588164
auauguagccuuggaauua

SEQ ID NO: 908881 - RNA, 19 nt, Artificial Sequence
  Description of Artificial Sequence: Synthetic oligonucleotide
  Antisense strand to SEQ ID NO: 908880
uaauuccaaggcuacauau

SEQ ID NO: 908882 - RNA, 19 nt, Artificial Sequence
  Description of Artificial Sequence: Synthetic oligonucleotide
  Sense strand starting at position 3604 of SEQ ID NO: 588164
ccggucuuaguuuaauaua

SEQ ID NO: 908883 - RNA, 19 nt, Artificial Sequence
  Description of Artificial Sequence: Synthetic oligonucleotide
  Antisense strand to SEQ ID NO: 908882
uauauuaaacuaagaccgg

SEQ ID NO: 908884 - RNA, 19 nt, Artificial Sequence
  Description of Artificial Sequence: Synthetic oligonucleotide
  Sense strand starting at position 3683 of SEQ ID NO: 588164
agccacagcugucuugaaa

SEQ ID NO: 908885 - RNA, 19 nt, Artificial Sequence
  Description of Artificial Sequence: Synthetic oligonucleotide
  Antisense strand to SEQ ID NO: 908884
uuucaagacagcuguggcu

SEQ ID NO: 908886 - RNA, 19 nt, Artificial Sequence
  Description of Artificial Sequence: Synthetic oligonucleotide
  Sense strand starting at position 58 of SEQ ID NO: 588174
gggagcuguacaugacuua

SEQ ID NO: 908887 - RNA, 19 nt, Artificial Sequence
  Description of Artificial Sequence: Synthetic oligonucleotide
  Antisense strand to SEQ ID NO: 908886
uaagucauguacagcuccc

SEQ ID NO: 908888 - RNA, 19 nt, Artificial Sequence
  Description of Artificial Sequence: Synthetic oligonucleotide
  Sense strand starting at position 69 of SEQ ID NO: 588174
augacuuaggccugaugca

SEQ ID NO: 908889 - RNA, 19 nt, Artificial Sequence
  Description of Artificial Sequence: Synthetic oligonucleotide
  Antisense strand to SEQ ID NO: 908888
ugcaucaggccuaagucau

SEQ ID NO: 908890 - RNA, 19 nt, Artificial Sequence
  Description of Artificial Sequence: Synthetic oligonucleotide
  Sense strand starting at position 70 of SEQ ID NO: 588174
ugacuuaggccugaugcau

SEQ ID NO: 908891 - RNA, 19 nt, Artificial Sequence
  Description of Artificial Sequence: Synthetic oligonucleotide
  Antisense strand to SEQ ID NO: 908890
augcaucaggccuaaguca

SEQ ID NO: 908892 - RNA, 19 nt, Artificial Sequence
  Description of Artificial Sequence: Synthetic oligonucleotide
  Sense strand starting at position 250 of SEQ ID NO: 588174
ggacaagucuaguaagcaa

SEQ ID NO: 908893 - RNA, 19 nt, Artificial Sequence
  Description of Artificial Sequence: Synthetic oligonucleotide
  Antisense strand to SEQ ID NO: 908892
uugcuuacuagacuugucc

SEQ ID NO: 908894 - RNA, 19 nt, Artificial Sequence
  Description of Artificial Sequence: Synthetic oligonucleotide
  Sense strand starting at position 275 of SEQ ID NO: 588174
agaacaaagugaggauuua

SEQ ID NO: 908895 - RNA, 19 nt, Artificial Sequence
  Description of Artificial Sequence: Synthetic oligonucleotide
  Antisense strand to SEQ ID NO: 908894
uaaauccucacuuuguucu

SEQ ID NO: 908896 - RNA, 19 nt, Artificial Sequence
  Description of Artificial Sequence: Synthetic oligonucleotide
  Sense strand starting at position 359 of SEQ ID NO: 588174
uauugaauaccuggugaaa

SEQ ID NO: 908897 - RNA, 19 nt, Artificial Sequence
  Description of Artificial Sequence: Synthetic oligonucleotide
  Antisense strand to SEQ ID NO: 908896
uuucaccagguauucaaua

SEQ ID NO: 908898 - RNA, 19 nt, Artificial Sequence
  Description of Artificial Sequence: Synthetic oligonucleotide
  Sense strand starting at position 469 of SEQ ID NO: 588174
uggugucuugcugcaccua

SEQ ID NO: 908899 - RNA, 19 nt, Artificial Sequence
  Description of Artificial Sequence: Synthetic oligonucleotide
  Antisense strand to SEQ ID NO: 908898
uaggugcagcaagacacca

SEQ ID NO: 908900 - RNA, 19 nt, Artificial Sequence
  Description of Artificial Sequence: Synthetic oligonucleotide
  Sense strand starting at position 470 of SEQ ID NO: 588174
ggugucuugcugcaccuau

SEQ ID NO: 908901 - RNA, 19 nt, Artificial Sequence
  Description of Artificial Sequence: Synthetic oligonucleotide
  Antisense strand to SEQ ID NO: 908900
auaggugcagcaagacacc

SEQ ID NO: 908902 - RNA, 19 nt, Artificial Sequence
  Description of Artificial Sequence: Synthetic oligonucleotide
  Sense strand starting at position 1024 of SEQ ID NO: 588174
cugaucucauuccuuguua

SEQ ID NO: 908903 - RNA, 19 nt, Artificial Sequence
  Description of Artificial Sequence: Synthetic oligonucleotide
  Antisense strand to SEQ ID NO: 908902
uaacaaggaaugagaucag

SEQ ID NO: 908904 - RNA, 19 nt, Artificial Sequence
  Description of Artificial Sequence: Synthetic oligonucleotide
  Sense strand starting at position 1190 of SEQ ID NO: 588174
cacacuguggaguaucaua

SEQ ID NO: 908905 - RNA, 19 nt, Artificial Sequence
  Description of Artificial Sequence: Synthetic oligonucleotide
  Antisense strand to SEQ ID NO: 908904
uaugauacuccacagugug

SEQ ID NO: 908906 - RNA, 19 nt, Artificial Sequence
  Description of Artificial Sequence: Synthetic oligonucleotide
  Sense strand starting at position 1195 of SEQ ID NO: 588174
uguggaguaucauaccauc

SEQ ID NO: 908907 - RNA, 19 nt, Artificial Sequence
  Description of Artificial Sequence: Synthetic oligonucleotide
  Antisense strand to SEQ ID NO: 908906
gaugguaugauacuccaca

SEQ ID NO: 908908 - RNA, 19 nt, Artificial Sequence
  Description of Artificial Sequence: Synthetic oligonucleotide
  Sense strand starting at position 1198 of SEQ ID NO: 588174
ggaguaucauaccaucucu

SEQ ID NO: 908909 - RNA, 19 nt, Artificial Sequence
  Description of Artificial Sequence: Synthetic oligonucleotide
  Antisense strand to SEQ ID NO: 908908
agagaugguaugauacucc

SEQ ID NO: 908910 - RNA, 19 nt, Artificial Sequence
  Description of Artificial Sequence: Synthetic oligonucleotide
  Sense strand starting at position 1204 of SEQ ID NO: 588174
ucauaccaucucuggagaa

SEQ ID NO: 908911 - RNA, 19 nt, Artificial Sequence
  Description of Artificial Sequence: Synthetic oligonucleotide
  Antisense strand to SEQ ID NO: 908910
uucuccagagaugguauga

SEQ ID NO: 908912 - RNA, 19 nt, Artificial Sequence
  Description of Artificial Sequence: Synthetic oligonucleotide
  Sense strand starting at position 1258 of SEQ ID NO: 588174
ccacuuaugggucauaguc

SEQ ID NO: 908913 - RNA, 19 nt, Artificial Sequence
  Description of Artificial Sequence: Synthetic oligonucleotide
  Antisense strand to SEQ ID NO: 908912
gacuaugacccauaagugg

SEQ ID NO: 908914 - RNA, 19 nt, Artificial Sequence
  Description of Artificial Sequence: Synthetic oligonucleotide
  Sense strand starting at position 1628 of SEQ ID NO: 588174
gguccaugcugaucccaga

SEQ ID NO: 908915 - RNA, 19 nt, Artificial Sequence
  Description of Artificial Sequence: Synthetic oligonucleotide
  Antisense strand to SEQ ID NO: 908914
ucugggaucagcauggacc

SEQ ID NO: 908916 - RNA, 19 nt, Artificial Sequence
  Description of Artificial Sequence: Synthetic oligonucleotide
  Sense strand starting at position 1648 of SEQ ID NO: 588174
gccuuuacuuacccacgua

SEQ ID NO: 908917 - RNA, 19 nt, Artificial Sequence
  Description of Artificial Sequence: Synthetic oligonucleotide
  Antisense strand to SEQ ID NO: 908916
uacguggguaaguaaaggc

SEQ ID NO: 908918 - RNA, 19 nt, Artificial Sequence
  Description of Artificial Sequence: Synthetic oligonucleotide
  Sense strand starting at position 1687 of SEQ ID NO: 588174
gaggcuugcuggucccaga

SEQ ID NO: 908919 - RNA, 19 nt, Artificial Sequence
  Description of Artificial Sequence: Synthetic oligonucleotide
  Antisense strand to SEQ ID NO: 908918
ucugggaccagcaagccuc

SEQ ID NO: 908920 - RNA, 19 nt, Artificial Sequence
  Description of Artificial Sequence: Synthetic oligonucleotide
  Sense strand starting at position 1703 of SEQ ID NO: 588174
agaauaauguccgcuugcu

SEQ ID NO: 908921 - RNA, 19 nt, Artificial Sequence
  Description of Artificial Sequence: Synthetic oligonucleotide
  Antisense strand to SEQ ID NO: 908920
agcaagcggacauuauucu

SEQ ID NO: 908922 - RNA, 19 nt, Artificial Sequence
  Description of Artificial Sequence: Synthetic oligonucleotide
  Sense strand starting at position 1712 of SEQ ID NO: 588174
uccgcuugcucuguuacau

SEQ ID NO: 908923 - RNA, 19 nt, Artificial Sequence
  Description of Artificial Sequence: Synthetic oligonucleotide
  Antisense strand to SEQ ID NO: 908922
auguaacagagcaagcgga

SEQ ID NO: 908924 - RNA, 19 nt, Artificial Sequence
  Description of Artificial Sequence: Synthetic oligonucleotide
  Sense strand starting at position 1713 of SEQ ID NO: 588174
ccgcuugcucuguuacauc

SEQ ID NO: 908925 - RNA, 19 nt, Artificial Sequence
  Description of Artificial Sequence: Synthetic oligonucleotide
  Antisense strand to SEQ ID NO: 908924
gauguaacagagcaagcgg

SEQ ID NO: 908926 - RNA, 19 nt, Artificial Sequence
  Description of Artificial Sequence: Synthetic oligonucleotide
  Sense strand starting at position 1734 of SEQ ID NO: 588174
agaacugauucucagggau

SEQ ID NO: 908927 - RNA, 19 nt, Artificial Sequence
  Description of Artificial Sequence: Synthetic oligonucleotide
  Antisense strand to SEQ ID NO: 908926
aucccugagaaucaguucu

SEQ ID NO: 908928 - RNA, 19 nt, Artificial Sequence
  Description of Artificial Sequence: Synthetic oligonucleotide
  Sense strand starting at position 1736 of SEQ ID NO: 588174
aacugauucucagggauug

SEQ ID NO: 908929 - RNA, 19 nt, Artificial Sequence
  Description of Artificial Sequence: Synthetic oligonucleotide
  Antisense strand to SEQ ID NO: 908928
caaucccugagaaucaguu

SEQ ID NO: 908930 - RNA, 19 nt, Artificial Sequence
  Description of Artificial Sequence: Synthetic oligonucleotide
  Sense strand starting at position 2163 of SEQ ID NO: 588174
gcgcccgccucauuugaaa

SEQ ID NO: 908931 - RNA, 19 nt, Artificial Sequence
  Description of Artificial Sequence: Synthetic oligonucleotide
  Antisense strand to SEQ ID NO: 908930
uuucaaaugaggcgggcgc

SEQ ID NO: 908932 - RNA, 19 nt, Artificial Sequence
  Description of Artificial Sequence: Synthetic oligonucleotide
  Sense strand starting at position 2345 of SEQ ID NO: 588174
aucucuuucggaugucauu

SEQ ID NO: 908933 - RNA, 19 nt, Artificial Sequence
  Description of Artificial Sequence: Synthetic oligonucleotide
  Antisense strand to SEQ ID NO: 908932
aaugacauccgaaagagau

SEQ ID NO: 908934 - RNA, 19 nt, Artificial Sequence
  Description of Artificial Sequence: Synthetic oligonucleotide
  Sense strand starting at position 2354 of SEQ ID NO: 588174
ggaugucauuccucgcagu

SEQ ID NO: 908935 - RNA, 19 nt, Artificial Sequence
  Description of Artificial Sequence: Synthetic oligonucleotide
  Antisense strand to SEQ ID NO: 908934
acugcgaggaaugacaucc

SEQ ID NO: 908936 - RNA, 19 nt, Artificial Sequence
  Description of Artificial Sequence: Synthetic oligonucleotide
  Sense strand starting at position 2360 of SEQ ID NO: 588174
cauuccucgcagugaaguu

SEQ ID NO: 908937 - RNA, 19 nt, Artificial Sequence
  Description of Artificial Sequence: Synthetic oligonucleotide
  Antisense strand to SEQ ID NO: 908936
aacuucacugcgaggaaug

SEQ ID NO: 908938 - RNA, 19 nt, Artificial Sequence
  Description of Artificial Sequence: Synthetic oligonucleotide
  Sense strand starting at position 2369 of SEQ ID NO: 588174
cagugaaguucuuuauuga

SEQ ID NO: 908939 - RNA, 19 nt, Artificial Sequence
  Description of Artificial Sequence: Synthetic oligonucleotide
  Antisense strand to SEQ ID NO: 908938
ucaauaaagaacuucacug

SEQ ID NO: 908940 - RNA, 19 nt, Artificial Sequence
  Description of Artificial Sequence: Synthetic oligonucleotide
  Sense strand starting at position 2370 of SEQ ID NO: 588174
agugaaguucuuuauugaa

SEQ ID NO: 908941 - RNA, 19 nt, Artificial Sequence
  Description of Artificial Sequence: Synthetic oligonucleotide
  Antisense strand to SEQ ID NO: 908940
uucaauaaagaacuucacu

SEQ ID NO: 908942 - RNA, 19 nt, Artificial Sequence
  Description of Artificial Sequence: Synthetic oligonucleotide
  Sense strand starting at position 2372 of SEQ ID NO: 588174
ugaaguucuuuauugaaac

SEQ ID NO: 908943 - RNA, 19 nt, Artificial Sequence
  Description of Artificial Sequence: Synthetic oligonucleotide
  Antisense strand to SEQ ID NO: 908942
guuucaauaaagaacuuca

SEQ ID NO: 908944 - RNA, 19 nt, Artificial Sequence
  Description of Artificial Sequence: Synthetic oligonucleotide
  Sense strand starting at position 2457 of SEQ ID NO: 588174
ugugcuaggucggcucuua

SEQ ID NO: 908945 - RNA, 19 nt, Artificial Sequence
  Description of Artificial Sequence: Synthetic oligonucleotide
  Antisense strand to SEQ ID NO: 908944
uaagagccgaccuagcaca

SEQ ID NO: 908946 - RNA, 19 nt, Artificial Sequence
  Description of Artificial Sequence: Synthetic oligonucleotide
  Sense strand starting at position 2458 of SEQ ID NO: 588174
gugcuaggucggcucuuaa

SEQ ID NO: 908947 - RNA, 19 nt, Artificial Sequence
  Description of Artificial Sequence: Synthetic oligonucleotide
  Antisense strand to SEQ ID NO: 908946
uuaagagccgaccuagcac

SEQ ID NO: 908948 - RNA, 19 nt, Artificial Sequence
  Description of Artificial Sequence: Synthetic oligonucleotide
  Sense strand starting at position 2522 of SEQ ID NO: 588174
ucaaacauagagugugaaa

SEQ ID NO: 908949 - RNA, 19 nt, Artificial Sequence
  Description of Artificial Sequence: Synthetic oligonucleotide
  Antisense strand to SEQ ID NO: 908948
uuucacacucuauguuuga

SEQ ID NO: 908950 - RNA, 19 nt, Artificial Sequence
  Description of Artificial Sequence: Synthetic oligonucleotide
  Sense strand starting at position 2889 of SEQ ID NO: 588174
aggcucagcgacuguuaga

SEQ ID NO: 908951 - RNA, 19 nt, Artificial Sequence
  Description of Artificial Sequence: Synthetic oligonucleotide
  Antisense strand to SEQ ID NO: 908950
ucuaacagucgcugagccu

SEQ ID NO: 908952 - RNA, 19 nt, Artificial Sequence
  Description of Artificial Sequence: Synthetic oligonucleotide
  Sense strand starting at position 2942 of SEQ ID NO: 588174
ggccucucaugucagauuu

SEQ ID NO: 908953 - RNA, 19 nt, Artificial Sequence
  Description of Artificial Sequence: Synthetic oligonucleotide
  Antisense strand to SEQ ID NO: 908952
aaaucugacaugagaggcc

SEQ ID NO: 908954 - RNA, 19 nt, Artificial Sequence
  Description of Artificial Sequence: Synthetic oligonucleotide
  Sense strand starting at position 2944 of SEQ ID NO: 588174
ccucucaugucagauuuag

SEQ ID NO: 908955 - RNA, 19 nt, Artificial Sequence
  Description of Artificial Sequence: Synthetic oligonucleotide
  Antisense strand to SEQ ID NO: 908954
cuaaaucugacaugagagg

SEQ ID NO: 908956 - RNA, 19 nt, Artificial Sequence
  Description of Artificial Sequence: Synthetic oligonucleotide
  Sense strand starting at position 3102 of SEQ ID NO: 588174
cuaggaagcuguuucgaca

SEQ ID NO: 908957 - RNA, 19 nt, Artificial Sequence
  Description of Artificial Sequence: Synthetic oligonucleotide
  Antisense strand to SEQ ID NO: 908956
ugucgaaacagcuuccuag

SEQ ID NO: 908958 - RNA, 19 nt, Artificial Sequence
  Description of Artificial Sequence: Synthetic oligonucleotide
  Sense strand starting at position 3113 of SEQ ID NO: 588174
uuucgacagucacuguuaa

SEQ ID NO: 908959 - RNA, 19 nt, Artificial Sequence
  Description of Artificial Sequence: Synthetic oligonucleotide
  Antisense strand to SEQ ID NO: 908958
uuaacagugacugucgaaa

SEQ ID NO: 908960 - RNA, 19 nt, Artificial Sequence
  Description of Artificial Sequence: Synthetic oligonucleotide
  Sense strand starting at position 3114 of SEQ ID NO: 588174
uucgacagucacuguuaaa

SEQ ID NO: 908961 - RNA, 19 nt, Artificial Sequence
  Description of Artificial Sequence: Synthetic oligonucleotide
  Antisense strand to SEQ ID NO: 908960
uuuaacagugacugucgaa

SEQ ID NO: 908962 - RNA, 19 nt, Artificial Sequence
  Description of Artificial Sequence: Synthetic oligonucleotide
  Sense strand starting at position 3117 of SEQ ID NO: 588174
gacagucacuguuaaagag

SEQ ID NO: 908963 - RNA, 19 nt, Artificial Sequence
  Description of Artificial Sequence: Synthetic oligonucleotide
  Antisense strand to SEQ ID NO: 908962
cucuuuaacagugacuguc

SEQ ID NO: 908964 - RNA, 19 nt, Artificial Sequence
  Description of Artificial Sequence: Synthetic oligonucleotide
  Sense strand starting at position 3610 of SEQ ID NO: 588174
cacagaagcgcaugaaauu

SEQ ID NO: 908965 - RNA, 19 nt, Artificial Sequence
  Description of Artificial Sequence: Synthetic oligonucleotide
  Antisense strand to SEQ ID NO: 908964
aauuucaugcgcuucugug

SEQ ID NO: 908966 - RNA, 19 nt, Artificial Sequence
  Description of Artificial Sequence: Synthetic oligonucleotide
  Sense strand starting at position 197 of SEQ ID NO: 588224
ggugugacgcagucggauu

SEQ ID NO: 908967 - RNA, 19 nt, Artificial Sequence
  Description of Artificial Sequence: Synthetic oligonucleotide
  Antisense strand to SEQ ID NO: 908966
aauccgacugcgucacacc

SEQ ID NO: 908968 - RNA, 19 nt, Artificial Sequence
  Description of Artificial Sequence: Synthetic oligonucleotide
  Sense strand starting at position 204 of SEQ ID NO: 588224
cgcagucggauugacauuu

SEQ ID NO: 908969 - RNA, 19 nt, Artificial Sequence
  Description of Artificial Sequence: Synthetic oligonucleotide
  Antisense strand to SEQ ID NO: 908968
aaaugucaauccgacugcg

SEQ ID NO: 908970 - RNA, 19 nt, Artificial Sequence
  Description of Artificial Sequence: Synthetic oligonucleotide
  Sense strand starting at position 670 of SEQ ID NO: 588224
ccgagcggcacguuugaaa

SEQ ID NO: 908971 - RNA, 19 nt, Artificial Sequence
  Description of Artificial Sequence: Synthetic oligonucleotide
  Antisense strand to SEQ ID NO: 908970
uuucaaacgugccgcucgg

SEQ ID NO: 908972 - RNA, 19 nt, Artificial Sequence
  Description of Artificial Sequence: Synthetic oligonucleotide
  Sense strand starting at position 1371 of SEQ ID NO: 588224
ggcccuguuucacagguga

SEQ ID NO: 908973 - RNA, 19 nt, Artificial Sequence
  Description of Artificial Sequence: Synthetic oligonucleotide
  Antisense strand to SEQ ID NO: 908972
ucaccugugaaacagggcc

SEQ ID NO: 908974 - RNA, 19 nt, Artificial Sequence
  Description of Artificial Sequence: Synthetic oligonucleotide
  Sense strand starting at position 1474 of SEQ ID NO: 588224
gggcgugucuuagcgucaa

SEQ ID NO: 908975 - RNA, 19 nt, Artificial Sequence
  Description of Artificial Sequence: Synthetic oligonucleotide
  Antisense strand to SEQ ID NO: 908974
uugacgcuaagacacgccc

SEQ ID NO: 908976 - RNA, 19 nt, Artificial Sequence
  Description of Artificial Sequence: Synthetic oligonucleotide
  Sense strand starting at position 1476 of SEQ ID NO: 588224
gcgugucuuagcgucaaag

SEQ ID NO: 908977 - RNA, 19 nt, Artificial Sequence
  Description of Artificial Sequence: Synthetic oligonucleotide
  Antisense strand to SEQ ID NO: 908976
cuuugacgcuaagacacgc

SEQ ID NO: 908978 - RNA, 19 nt, Artificial Sequence
  Description of Artificial Sequence: Synthetic oligonucleotide
  Sense strand starting at position 1851 of SEQ ID NO: 588224
gcaggauccuccuccucau

SEQ ID NO: 908979 - RNA, 19 nt, Artificial Sequence
  Description of Artificial Sequence: Synthetic oligonucleotide
  Antisense strand to SEQ ID NO: 908978
augaggaggaggauccugc

SEQ ID NO: 908980 - RNA, 19 nt, Artificial Sequence
  Description of Artificial Sequence: Synthetic oligonucleotide
  Sense strand starting at position 2246 of SEQ ID NO: 588224
aggccagucugcuggaaau

SEQ ID NO: 908981 - RNA, 19 nt, Artificial Sequence
  Description of Artificial Sequence: Synthetic oligonucleotide
  Antisense strand to SEQ ID NO: 908980
auuuccagcagacuggccu

SEQ ID NO: 908982 - RNA, 19 nt, Artificial Sequence
  Description of Artificial Sequence: Synthetic oligonucleotide
  Sense strand starting at position 2248 of SEQ ID NO: 588224
gccagucugcuggaaaucu

SEQ ID NO: 908983 - RNA, 19 nt, Artificial Sequence
  Description of Artificial Sequence: Synthetic oligonucleotide
  Antisense strand to SEQ ID NO: 908982
agauuuccagcagacuggc

SEQ ID NO: 908984 - RNA, 19 nt, Artificial Sequence
  Description of Artificial Sequence: Synthetic oligonucleotide
  Sense strand starting at position 2626 of SEQ ID NO: 588224
agugaacuccuuugacguc

SEQ ID NO: 908985 - RNA, 19 nt, Artificial Sequence
  Description of Artificial Sequence: Synthetic oligonucleotide
  Antisense strand to SEQ ID NO: 908984
gacgucaaaggaguucacu

SEQ ID NO: 908986 - RNA, 19 nt, Artificial Sequence
  Description of Artificial Sequence: Synthetic oligonucleotide
  Sense strand starting at position 2629 of SEQ ID NO: 588224
gaacuccuuugacgucauu

SEQ ID NO: 908987 - RNA, 19 nt, Artificial Sequence
  Description of Artificial Sequence: Synthetic oligonucleotide
  Antisense strand to SEQ ID NO: 908986
aaugacgucaaaggaguuc

SEQ ID NO: 908988 - RNA, 19 nt, Artificial Sequence
  Description of Artificial Sequence: Synthetic oligonucleotide
  Sense strand starting at position 2638 of SEQ ID NO: 588224
ugacgucauuccuaacgua

SEQ ID NO: 908989 - RNA, 19 nt, Artificial Sequence
  Description of Artificial Sequence: Synthetic oligonucleotide
  Antisense strand to SEQ ID NO: 908988
uacguuaggaaugacguca

SEQ ID NO: 908990 - RNA, 19 nt, Artificial Sequence
  Description of Artificial Sequence: Synthetic oligonucleotide
  Sense strand starting at position 2669 of SEQ ID NO: 588224
guaaguuacacguaccuau

SEQ ID NO: 908991 - RNA, 19 nt, Artificial Sequence
  Description of Artificial Sequence: Synthetic oligonucleotide
  Antisense strand to SEQ ID NO: 908990
auagguacguguaacuuac

SEQ ID NO: 908992 - RNA, 19 nt, Artificial Sequence
  Description of Artificial Sequence: Synthetic oligonucleotide
  Sense strand starting at position 2803 of SEQ ID NO: 588224
ccacguacguacuuagaga

SEQ ID NO: 908993 - RNA, 19 nt, Artificial Sequence
  Description of Artificial Sequence: Synthetic oligonucleotide
  Antisense strand to SEQ ID NO: 908992
ucucuaaguacguacgugg

SEQ ID NO: 908994 - RNA, 19 nt, Artificial Sequence
  Description of Artificial Sequence: Synthetic oligonucleotide
  Sense strand starting at position 2804 of SEQ ID NO: 588224
cacguacguacuuagagaa

SEQ ID NO: 908995 - RNA, 19 nt, Artificial Sequence
  Description of Artificial Sequence: Synthetic oligonucleotide
  Antisense strand to SEQ ID NO: 908994
uucucuaaguacguacgug

SEQ ID NO: 908996 - RNA, 19 nt, Artificial Sequence
  Description of Artificial Sequence: Synthetic oligonucleotide
  Sense strand starting at position 2883 of SEQ ID NO: 588224
uccugaggcuugcuauacu

SEQ ID NO: 908997 - RNA, 19 nt, Artificial Sequence
  Description of Artificial Sequence: Synthetic oligonucleotide
  Antisense strand to SEQ ID NO: 908996
aguauagcaagccucagga

SEQ ID NO: 908998 - RNA, 19 nt, Artificial Sequence
  Description of Artificial Sequence: Synthetic oligonucleotide
  Sense strand starting at position 3173 of SEQ ID NO: 588224
aucucauuggucuguaggu

SEQ ID NO: 908999 - RNA, 19 nt, Artificial Sequence
  Description of Artificial Sequence: Synthetic oligonucleotide
  Antisense strand to SEQ ID NO: 908998
accuacagaccaaugagau

SEQ ID NO: 909000 - RNA, 19 nt, Artificial Sequence
  Description of Artificial Sequence: Synthetic oligonucleotide
  Sense strand starting at position 3175 of SEQ ID NO: 588224
cucauuggucuguagguca

SEQ ID NO: 909001 - RNA, 19 nt, Artificial Sequence
  Description of Artificial Sequence: Synthetic oligonucleotide
  Antisense strand to SEQ ID NO: 909000
ugaccuacagaccaaugag

SEQ ID NO: 909002 - RNA, 19 nt, Artificial Sequence
  Description of Artificial Sequence: Synthetic oligonucleotide
  Sense strand starting at position 3178 of SEQ ID NO: 588224
auuggucuguaggucaaua

SEQ ID NO: 909003 - RNA, 19 nt, Artificial Sequence
  Description of Artificial Sequence: Synthetic oligonucleotide
  Antisense strand to SEQ ID NO: 909002
uauugaccuacagaccaau

SEQ ID NO: 909004 - RNA, 19 nt, Artificial Sequence
  Description of Artificial Sequence: Synthetic oligonucleotide
  Sense strand starting at position 3180 of SEQ ID NO: 588224
uggucuguaggucaauauu

SEQ ID NO: 909005 - RNA, 19 nt, Artificial Sequence
  Description of Artificial Sequence: Synthetic oligonucleotide
  Antisense strand to SEQ ID NO: 909004
aauauugaccuacagacca

SEQ ID NO: 909006 - RNA, 19 nt, Artificial Sequence
  Description of Artificial Sequence: Synthetic oligonucleotide
  Sense strand starting at position 3183 of SEQ ID NO: 588224
ucuguaggucaauauuauc

SEQ ID NO: 909007 - RNA, 19 nt, Artificial Sequence
  Description of Artificial Sequence: Synthetic oligonucleotide
  Antisense strand to SEQ ID NO: 909006
gauaauauugaccuacaga

SEQ ID NO: 909008 - RNA, 19 nt, Artificial Sequence
  Description of Artificial Sequence: Synthetic oligonucleotide
  Sense strand starting at position 3188 of SEQ ID NO: 588224
aggucaauauuaucaggca

SEQ ID NO: 909009 - RNA, 19 nt, Artificial Sequence
  Description of Artificial Sequence: Synthetic oligonucleotide
  Antisense strand to SEQ ID NO: 909008
ugccugauaauauugaccu

SEQ ID NO: 909010 - RNA, 19 nt, Artificial Sequence
  Description of Artificial Sequence: Synthetic oligonucleotide
  Sense strand starting at position 3189 of SEQ ID NO: 588224
ggucaauauuaucaggcau

SEQ ID NO: 909011 - RNA, 19 nt, Artificial Sequence
  Description of Artificial Sequence: Synthetic oligonucleotide
  Antisense strand to SEQ ID NO: 909010
augccugauaauauugacc

SEQ ID NO: 909012 - RNA, 19 nt, Artificial Sequence
  Description of Artificial Sequence: Synthetic oligonucleotide
  Sense strand starting at position 3524 of SEQ ID NO: 588224
uucuacugauaaggacaua

SEQ ID NO: 909013 - RNA, 19 nt, Artificial Sequence
  Description of Artificial Sequence: Synthetic oligonucleotide
  Antisense strand to SEQ ID NO: 909012
uauguccuuaucaguagaa

SEQ ID NO: 909014 - RNA, 19 nt, Artificial Sequence
  Description of Artificial Sequence: Synthetic oligonucleotide
  Sense strand starting at position 3549 of SEQ ID NO: 588224
gaaaguauuuaucacgccu

SEQ ID NO: 909015 - RNA, 19 nt, Artificial Sequence
  Description of Artificial Sequence: Synthetic oligonucleotide
  Antisense strand to SEQ ID NO: 909014
aggcgugauaaauacuuuc

SEQ ID NO: 909016 - RNA, 19 nt, Artificial Sequence
  Description of Artificial Sequence: Synthetic oligonucleotide
  Sense strand starting at position 3653 of SEQ ID NO: 588224
ggucuugaaugcuuugcca

SEQ ID NO: 909017 - RNA, 19 nt, Artificial Sequence
  Description of Artificial Sequence: Synthetic oligonucleotide
  Antisense strand to SEQ ID NO: 909016
uggcaaagcauucaagacc

SEQ ID NO: 909018 - RNA, 19 nt, Artificial Sequence
  Description of Artificial Sequence: Synthetic oligonucleotide
  Sense strand starting at position 3664 of SEQ ID NO: 588224
cuuugccagcuuugacaau

SEQ ID NO: 909019 - RNA, 19 nt, Artificial Sequence
  Description of Artificial Sequence: Synthetic oligonucleotide
  Antisense strand to SEQ ID NO: 909018
auugucaaagcuggcaaag

SEQ ID NO: 909020 - RNA, 19 nt, Artificial Sequence
  Description of Artificial Sequence: Synthetic oligonucleotide
  Sense strand starting at position 91 of SEQ ID NO: 588232
ugugucugcacagaucaga

SEQ ID NO: 909021 - RNA, 19 nt, Artificial Sequence
  Description of Artificial Sequence: Synthetic oligonucleotide
  Antisense strand to SEQ ID NO: 909020
ucugaucugugcagacaca

SEQ ID NO: 909022 - RNA, 19 nt, Artificial Sequence
  Description of Artificial Sequence: Synthetic oligonucleotide
  Sense strand starting at position 141 of SEQ ID NO: 588232
agaaauuccuauuauugag

SEQ ID NO: 909023 - RNA, 19 nt, Artificial Sequence
  Description of Artificial Sequence: Synthetic oligonucleotide
  Antisense strand to SEQ ID NO: 909022
cucaauaauaggaauuucu

SEQ ID NO: 909024 - RNA, 19 nt, Artificial Sequence
  Description of Artificial Sequence: Synthetic oligonucleotide
  Sense strand starting at position 221 of SEQ ID NO: 588232
cuaugagauuaugcacauu

SEQ ID NO: 909025 - RNA, 19 nt, Artificial Sequence
  Description of Artificial Sequence: Synthetic oligonucleotide
  Antisense strand to SEQ ID NO: 909024
aaugugcauaaucucauag

SEQ ID NO: 909026 - RNA, 19 nt, Artificial Sequence
  Description of Artificial Sequence: Synthetic oligonucleotide
  Sense strand starting at position 257 of SEQ ID NO: 588232
gaggcuuggagauguugaa

SEQ ID NO: 909027 - RNA, 19 nt, Artificial Sequence
  Description of Artificial Sequence: Synthetic oligonucleotide
  Antisense strand to SEQ ID NO: 909026
uucaacaucuccaagccuc

SEQ ID NO: 909028 - RNA, 19 nt, Artificial Sequence
  Description of Artificial Sequence: Synthetic oligonucleotide
  Sense strand starting at position 385 of SEQ ID NO: 588232
uuggaaguguuucucagca

SEQ ID NO: 909029 - RNA, 19 nt, Artificial Sequence
  Description of Artificial Sequence: Synthetic oligonucleotide
  Antisense strand to SEQ ID NO: 909028
ugcugagaaacacuuccaa

SEQ ID NO: 909030 - RNA, 19 nt, Artificial Sequence
  Description of Artificial Sequence: Synthetic oligonucleotide
  Sense strand starting at position 390 of SEQ ID NO: 588232
aguguuucucagcauaggu

SEQ ID NO: 909031 - RNA, 19 nt, Artificial Sequence
  Description of Artificial Sequence: Synthetic oligonucleotide
  Antisense strand to SEQ ID NO: 909030
accuaugcugagaaacacu

SEQ ID NO: 909032 - RNA, 19 nt, Artificial Sequence
  Description of Artificial Sequence: Synthetic oligonucleotide
  Sense strand starting at position 430 of SEQ ID NO: 588232
gaaguuugguucuuacauc

SEQ ID NO: 909033 - RNA, 19 nt, Artificial Sequence
  Description of Artificial Sequence: Synthetic oligonucleotide
  Antisense strand to SEQ ID NO: 909032
gauguaagaaccaaacuuc

SEQ ID NO: 909034 - RNA, 19 nt, Artificial Sequence
  Description of Artificial Sequence: Synthetic oligonucleotide
  Sense strand starting at position 493 of SEQ ID NO: 588232
agaaucaaaugagacuuua

SEQ ID NO: 909035 - RNA, 19 nt, Artificial Sequence
  Description of Artificial Sequence: Synthetic oligonucleotide
  Antisense strand to SEQ ID NO: 909034
uaaagucucauuugauucu

SEQ ID NO: 909036 - RNA, 19 nt, Artificial Sequence
  Description of Artificial Sequence: Synthetic oligonucleotide
  Sense strand starting at position 520 of SEQ ID NO: 588232
guccuuccuccuuaucuga

SEQ ID NO: 909037 - RNA, 19 nt, Artificial Sequence
  Description of Artificial Sequence: Synthetic oligonucleotide
  Antisense strand to SEQ ID NO: 909036
ucagauaaggaggaaggac

SEQ ID NO: 909038 - RNA, 19 nt, Artificial Sequence
  Description of Artificial Sequence: Synthetic oligonucleotide
  Sense strand starting at position 682 of SEQ ID NO: 588232
cuuuguuuccucugcauuu

SEQ ID NO: 909039 - RNA, 19 nt, Artificial Sequence
  Description of Artificial Sequence: Synthetic oligonucleotide
  Antisense strand to SEQ ID NO: 909038
aaaugcagaggaaacaaag

SEQ ID NO: 909040 - RNA, 19 nt, Artificial Sequence
  Description of Artificial Sequence: Synthetic oligonucleotide
  Sense strand starting at position 1183 of SEQ ID NO: 588232
acguauuuaucucauuuac

SEQ ID NO: 909041 - RNA, 19 nt, Artificial Sequence
  Description of Artificial Sequence: Synthetic oligonucleotide
  Antisense strand to SEQ ID NO: 909040
guaaaugagauaaauacgu

SEQ ID NO: 909042 - RNA, 19 nt, Artificial Sequence
  Description of Artificial Sequence: Synthetic oligonucleotide
  Sense strand starting at position 1235 of SEQ ID NO: 588232
ggaucaauaucauaaugga

SEQ ID NO: 909043 - RNA, 19 nt, Artificial Sequence
  Description of Artificial Sequence: Synthetic oligonucleotide
  Antisense strand to SEQ ID NO: 909042
uccauuaugauauugaucc

SEQ ID NO: 909044 - RNA, 19 nt, Artificial Sequence
  Description of Artificial Sequence: Synthetic oligonucleotide
  Sense strand starting at position 1327 of SEQ ID NO: 588232
gauucuaagucucucagag

SEQ ID NO: 909045 - RNA, 19 nt, Artificial Sequence
  Description of Artificial Sequence: Synthetic oligonucleotide
  Antisense strand to SEQ ID NO: 909044
cucugagagacuuagaauc

SEQ ID NO: 909046 - RNA, 19 nt, Artificial Sequence
  Description of Artificial Sequence: Synthetic oligonucleotide
  Sense strand starting at position 1339 of SEQ ID NO: 588232
cucagaguccuggagggua

SEQ ID NO: 909047 - RNA, 19 nt, Artificial Sequence
  Description of Artificial Sequence: Synthetic oligonucleotide
  Antisense strand to SEQ ID NO: 909046
uacccuccaggacucugag

SEQ ID NO: 909048 - RNA, 19 nt, Artificial Sequence
  Description of Artificial Sequence: Synthetic oligonucleotide
  Sense strand starting at position 1425 of SEQ ID NO: 588232
guguguggccggcauuuaa

SEQ ID NO: 909049 - RNA, 19 nt, Artificial Sequence
  Description of Artificial Sequence: Synthetic oligonucleotide
  Antisense strand to SEQ ID NO: 909048
uuaaaugccggccacacac

SEQ ID NO: 909050 - RNA, 19 nt, Artificial Sequence
  Description of Artificial Sequence: Synthetic oligonucleotide
  Sense strand starting at position 1488 of SEQ ID NO: 588232
gcuuacugauucucgggaa

SEQ ID NO: 909051 - RNA, 19 nt, Artificial Sequence
  Description of Artificial Sequence: Synthetic oligonucleotide
  Antisense strand to SEQ ID NO: 909050
uucccgagaaucaguaagc

SEQ ID NO: 909052 - RNA, 19 nt, Artificial Sequence
  Description of Artificial Sequence: Synthetic oligonucleotide
  Sense strand starting at position 1599 of SEQ ID NO: 588232
agcgaucucuggcuaggau

SEQ ID NO: 909053 - RNA, 19 nt, Artificial Sequence
  Description of Artificial Sequence: Synthetic oligonucleotide
  Antisense strand to SEQ ID NO: 909052
auccuagccagagaucgcu

SEQ ID NO: 909054 - RNA, 19 nt, Artificial Sequence
  Description of Artificial Sequence: Synthetic oligonucleotide
  Sense strand starting at position 1612 of SEQ ID NO: 588232
uaggaugcuccacggagau

SEQ ID NO: 909055 - RNA, 19 nt, Artificial Sequence
  Description of Artificial Sequence: Synthetic oligonucleotide
  Antisense strand to SEQ ID NO: 909054
aucuccguggagcauccua

SEQ ID NO: 909056 - RNA, 19 nt, Artificial Sequence
  Description of Artificial Sequence: Synthetic oligonucleotide
  Sense strand starting at position 1624 of SEQ ID NO: 588232
cggagaucuuccuccaggu

SEQ ID NO: 909057 - RNA, 19 nt, Artificial Sequence
  Description of Artificial Sequence: Synthetic oligonucleotide
  Antisense strand to SEQ ID NO: 909056
accuggaggaagaucuccg

SEQ ID NO: 909058 - RNA, 19 nt, Artificial Sequence
  Description of Artificial Sequence: Synthetic oligonucleotide
  Sense strand starting at position 1758 of SEQ ID NO: 588232
ccaagucguccgccucgaa

SEQ ID NO: 909059 - RNA, 19 nt, Artificial Sequence
  Description of Artificial Sequence: Synthetic oligonucleotide
  Antisense strand to SEQ ID NO: 909058
uucgaggcggacgacuugg

SEQ ID NO: 909060 - RNA, 19 nt, Artificial Sequence
  Description of Artificial Sequence: Synthetic oligonucleotide
  Sense strand starting at position 2128 of SEQ ID NO: 588232
cuggauacguacuccgaga

SEQ ID NO: 909061 - RNA, 19 nt, Artificial Sequence
  Description of Artificial Sequence: Synthetic oligonucleotide
  Antisense strand to SEQ ID NO: 909060
ucucggaguacguauccag

SEQ ID NO: 909062 - RNA, 19 nt, Artificial Sequence
  Description of Artificial Sequence: Synthetic oligonucleotide
  Sense strand starting at position 2130 of SEQ ID NO: 588232
ggauacguacuccgagaac

SEQ ID NO: 909063 - RNA, 19 nt, Artificial Sequence
  Description of Artificial Sequence: Synthetic oligonucleotide
  Antisense strand to SEQ ID NO: 909062
guucucggaguacguaucc

SEQ ID NO: 909064 - RNA, 19 nt, Artificial Sequence
  Description of Artificial Sequence: Synthetic oligonucleotide
  Sense strand starting at position 2355 of SEQ ID NO: 588232
gccagagccgaguggaaau

SEQ ID NO: 909065 - RNA, 19 nt, Artificial Sequence
  Description of Artificial Sequence: Synthetic oligonucleotide
  Antisense strand to SEQ ID NO: 909064
auuuccacucggcucuggc

SEQ ID NO: 909066 - RNA, 19 nt, Artificial Sequence
  Description of Artificial Sequence: Synthetic oligonucleotide
  Sense strand starting at position 2514 of SEQ ID NO: 588232
gggagaaauucucugggcu

SEQ ID NO: 909067 - RNA, 19 nt, Artificial Sequence
  Description of Artificial Sequence: Synthetic oligonucleotide
  Antisense strand to SEQ ID NO: 909066
agcccagagaauuucuccc

SEQ ID NO: 909068 - RNA, 19 nt, Artificial Sequence
  Description of Artificial Sequence: Synthetic oligonucleotide
  Sense strand starting at position 2515 of SEQ ID NO: 588232
ggagaaauucucugggcuc

SEQ ID NO: 909069 - RNA, 19 nt, Artificial Sequence
  Description of Artificial Sequence: Synthetic oligonucleotide
  Antisense strand to SEQ ID NO: 909068
gagcccagagaauuucucc

SEQ ID NO: 909070 - RNA, 19 nt, Artificial Sequence
  Description of Artificial Sequence: Synthetic oligonucleotide
  Sense strand starting at position 2552 of SEQ ID NO: 588232
ugguuuaccucugucugga

SEQ ID NO: 909071 - RNA, 19 nt, Artificial Sequence
  Description of Artificial Sequence: Synthetic oligonucleotide
  Antisense strand to SEQ ID NO: 909070
uccagacagagguaaacca

SEQ ID NO: 909072 - RNA, 19 nt, Artificial Sequence
  Description of Artificial Sequence: Synthetic oligonucleotide
  Sense strand starting at position 2647 of SEQ ID NO: 588232
gucggaagaaugcauugau

SEQ ID NO: 909073 - RNA, 19 nt, Artificial Sequence
  Description of Artificial Sequence: Synthetic oligonucleotide
  Antisense strand to SEQ ID NO: 909072
aucaaugcauucuuccgac

SEQ ID NO: 909074 - RNA, 19 nt, Artificial Sequence
  Description of Artificial Sequence: Synthetic oligonucleotide
  Sense strand starting at position 2650 of SEQ ID NO: 588232
ggaagaaugcauugaugcu

SEQ ID NO: 909075 - RNA, 19 nt, Artificial Sequence
  Description of Artificial Sequence: Synthetic oligonucleotide
  Antisense strand to SEQ ID NO: 909074
agcaucaaugcauucuucc

SEQ ID NO: 909076 - RNA, 19 nt, Artificial Sequence
  Description of Artificial Sequence: Synthetic oligonucleotide
  Sense strand starting at position 2669 of SEQ ID NO: 588232
gcuugcagugcguuucauu

SEQ ID NO: 909077 - RNA, 19 nt, Artificial Sequence
  Description of Artificial Sequence: Synthetic oligonucleotide
  Antisense strand to SEQ ID NO: 909076
aaugaaacgcacugcaagc

SEQ ID NO: 909078 - RNA, 19 nt, Artificial Sequence
  Description of Artificial Sequence: Synthetic oligonucleotide
  Sense strand starting at position 2739 of SEQ ID NO: 588232
auguguguucccuaucucu

SEQ ID NO: 909079 - RNA, 19 nt, Artificial Sequence
  Description of Artificial Sequence: Synthetic oligonucleotide
  Antisense strand to SEQ ID NO: 909078
agagauagggaacacacau

SEQ ID NO: 909080 - RNA, 19 nt, Artificial Sequence
  Description of Artificial Sequence: Synthetic oligonucleotide
  Sense strand starting at position 2828 of SEQ ID NO: 588232
accguccucuuauugauaa

SEQ ID NO: 909081 - RNA, 19 nt, Artificial Sequence
  Description of Artificial Sequence: Synthetic oligonucleotide
  Antisense strand to SEQ ID NO: 909080
uuaucaauaagaggacggu

SEQ ID NO: 909082 - RNA, 19 nt, Artificial Sequence
  Description of Artificial Sequence: Synthetic oligonucleotide
  Sense strand starting at position 2971 of SEQ ID NO: 588232
uugacaggauuuggucaaa

SEQ ID NO: 909083 - RNA, 19 nt, Artificial Sequence
  Description of Artificial Sequence: Synthetic oligonucleotide
  Antisense strand to SEQ ID NO: 909082
uuugaccaaauccugucaa

SEQ ID NO: 909084 - RNA, 19 nt, Artificial Sequence
  Description of Artificial Sequence: Synthetic oligonucleotide
  Sense strand starting at position 3045 of SEQ ID NO: 588232
acgagccuucuauacuaaa

SEQ ID NO: 909085 - RNA, 19 nt, Artificial Sequence
  Description of Artificial Sequence: Synthetic oligonucleotide
  Antisense strand to SEQ ID NO: 909084
uuuaguauagaaggcucgu

SEQ ID NO: 909086 - RNA, 19 nt, Artificial Sequence
  Description of Artificial Sequence: Synthetic oligonucleotide
  Sense strand starting at position 3073 of SEQ ID NO: 588232
uguugauuguaaucaaccu

SEQ ID NO: 909087 - RNA, 19 nt, Artificial Sequence
  Description of Artificial Sequence: Synthetic oligonucleotide
  Antisense strand to SEQ ID NO: 909086
agguugauuacaaucaaca

SEQ ID NO: 909088 - RNA, 19 nt, Artificial Sequence
  Description of Artificial Sequence: Synthetic oligonucleotide
  Sense strand starting at position 3129 of SEQ ID NO: 588232
gggagagccaacggucaua

SEQ ID NO: 909089 - RNA, 19 nt, Artificial Sequence
  Description of Artificial Sequence: Synthetic oligonucleotide
  Antisense strand to SEQ ID NO: 909088
uaugaccguuggcucuccc

SEQ ID NO: 909090 - RNA, 19 nt, Artificial Sequence
  Description of Artificial Sequence: Synthetic oligonucleotide
  Sense strand starting at position 3132 of SEQ ID NO: 588232
agagccaacggucauaaau

SEQ ID NO: 909091 - RNA, 19 nt, Artificial Sequence
  Description of Artificial Sequence: Synthetic oligonucleotide
  Antisense strand to SEQ ID NO: 909090
auuuaugaccguuggcucu

SEQ ID NO: 909092 - RNA, 19 nt, Artificial Sequence
  Description of Artificial Sequence: Synthetic oligonucleotide
  Sense strand starting at position 3240 of SEQ ID NO: 588232
aggccugucccugauucuu

SEQ ID NO: 909093 - RNA, 19 nt, Artificial Sequence
  Description of Artificial Sequence: Synthetic oligonucleotide
  Antisense strand to SEQ ID NO: 909092
aagaaucagggacaggccu

SEQ ID NO: 909094 - RNA, 19 nt, Artificial Sequence
  Description of Artificial Sequence: Synthetic oligonucleotide
  Sense strand starting at position 3352 of SEQ ID NO: 588232
acugacuaaugagauuaga

SEQ ID NO: 909095 - RNA, 19 nt, Artificial Sequence
  Description of Artificial Sequence: Synthetic oligonucleotide
  Antisense strand to SEQ ID NO: 909094
ucuaaucucauuagucagu

SEQ ID NO: 909096 - RNA, 19 nt, Artificial Sequence
  Description of Artificial Sequence: Synthetic oligonucleotide
  Sense strand starting at position 3924 of SEQ ID NO: 588232
auuguaucgcaagaauaaa

SEQ ID NO: 909097 - RNA, 19 nt, Artificial Sequence
  Description of Artificial Sequence: Synthetic oligonucleotide
  Antisense strand to SEQ ID NO: 909096
uuuauucuugcgauacaau

SEQ ID NO: 909098 - RNA, 19 nt, Artificial Sequence
  Description of Artificial Sequence: Synthetic oligonucleotide
  Sense strand starting at position 3943 of SEQ ID NO: 588232
ugcuauguacuauauugua

SEQ ID NO: 909099 - RNA, 19 nt, Artificial Sequence
  Description of Artificial Sequence: Synthetic oligonucleotide
  Antisense strand to SEQ ID NO: 909098
uacaauauaguacauagca

SEQ ID NO: 909100 - RNA, 19 nt, Artificial Sequence
  Description of Artificial Sequence: Synthetic oligonucleotide
  Sense strand starting at position 61 of SEQ ID NO: 588270
guaacucauuuauguguuu

SEQ ID NO: 909101 - RNA, 19 nt, Artificial Sequence
  Description of Artificial Sequence: Synthetic oligonucleotide
  Antisense strand to SEQ ID NO: 909100
aaacacauaaaugaguuac

SEQ ID NO: 909102 - RNA, 19 nt, Artificial Sequence
  Description of Artificial Sequence: Synthetic oligonucleotide
  Sense strand starting at position 252 of SEQ ID NO: 588270
aggauuaacugaggcacaa

SEQ ID NO: 909103 - RNA, 19 nt, Artificial Sequence
  Description of Artificial Sequence: Synthetic oligonucleotide
  Antisense strand to SEQ ID NO: 909102
uugugccucaguuaauccu

SEQ ID NO: 909104 - RNA, 19 nt, Artificial Sequence
  Description of Artificial Sequence: Synthetic oligonucleotide
  Sense strand starting at position 267 of SEQ ID NO: 588270
acaacugaaucaugaugca

SEQ ID NO: 909105 - RNA, 19 nt, Artificial Sequence
  Description of Artificial Sequence: Synthetic oligonucleotide
  Antisense strand to SEQ ID NO: 909104
ugcaucaugauucaguugu

SEQ ID NO: 909106 - RNA, 19 nt, Artificial Sequence
  Description of Artificial Sequence: Synthetic oligonucleotide
  Sense strand starting at position 617 of SEQ ID NO: 588270
agacgacucucugauagag

SEQ ID NO: 909107 - RNA, 19 nt, Artificial Sequence
  Description of Artificial Sequence: Synthetic oligonucleotide
  Antisense strand to SEQ ID NO: 909106
cucuaucagagagucgucu

SEQ ID NO: 909108 - RNA, 19 nt, Artificial Sequence
  Description of Artificial Sequence: Synthetic oligonucleotide
  Sense strand starting at position 619 of SEQ ID NO: 588270
acgacucucugauagagau

SEQ ID NO: 909109 - RNA, 19 nt, Artificial Sequence
  Description of Artificial Sequence: Synthetic oligonucleotide
  Antisense strand to SEQ ID NO: 909108
aucucuaucagagagucgu

SEQ ID NO: 909110 - RNA, 19 nt, Artificial Sequence
  Description of Artificial Sequence: Synthetic oligonucleotide
  Sense strand starting at position 773 of SEQ ID NO: 588270
aaagcuuccuagguguuua

SEQ ID NO: 909111 - RNA, 19 nt, Artificial Sequence
  Description of Artificial Sequence: Synthetic oligonucleotide
  Antisense strand to SEQ ID NO: 909110
uaaacaccuaggaagcuuu

SEQ ID NO: 909112 - RNA, 19 nt, Artificial Sequence
  Description of Artificial Sequence: Synthetic oligonucleotide
  Sense strand starting at position 913 of SEQ ID NO: 588270
ccaagaacuuucuacugag

SEQ ID NO: 909113 - RNA, 19 nt, Artificial Sequence
  Description of Artificial Sequence: Synthetic oligonucleotide
  Antisense strand to SEQ ID NO: 909112
cucaguagaaaguucuugg

SEQ ID NO: 909114 - RNA, 19 nt, Artificial Sequence
  Description of Artificial Sequence: Synthetic oligonucleotide
  Sense strand starting at position 919 of SEQ ID NO: 588270
acuuucuacugagaaacga

SEQ ID NO: 909115 - RNA, 19 nt, Artificial Sequence
  Description of Artificial Sequence: Synthetic oligonucleotide
  Antisense strand to SEQ ID NO: 909114
ucguuucucaguagaaagu

SEQ ID NO: 909116 - RNA, 19 nt, Artificial Sequence
  Description of Artificial Sequence: Synthetic oligonucleotide
  Sense strand starting at position 1019 of SEQ ID NO: 588270
gucccuauacugcguggaa

SEQ ID NO: 909117 - RNA, 19 nt, Artificial Sequence
  Description of Artificial Sequence: Synthetic oligonucleotide
  Antisense strand to SEQ ID NO: 909116
uuccacgcaguauagggac

SEQ ID NO: 909118 - RNA, 19 nt, Artificial Sequence
  Description of Artificial Sequence: Synthetic oligonucleotide
  Sense strand starting at position 1021 of SEQ ID NO: 588270
cccuauacugcguggaagu

SEQ ID NO: 909119 - RNA, 19 nt, Artificial Sequence
  Description of Artificial Sequence: Synthetic oligonucleotide
  Antisense strand to SEQ ID NO: 909118
acuuccacgcaguauaggg

SEQ ID NO: 909120 - RNA, 19 nt, Artificial Sequence
  Description of Artificial Sequence: Synthetic oligonucleotide
  Sense strand starting at position 1022 of SEQ ID NO: 588270
ccuauacugcguggaaguu

SEQ ID NO: 909121 - RNA, 19 nt, Artificial Sequence
  Description of Artificial Sequence: Synthetic oligonucleotide
  Antisense strand to SEQ ID NO: 909120
aacuuccacgcaguauagg

SEQ ID NO: 909122 - RNA, 19 nt, Artificial Sequence
  Description of Artificial Sequence: Synthetic oligonucleotide
  Sense strand starting at position 1023 of SEQ ID NO: 588270
cuauacugcguggaaguua

SEQ ID NO: 909123 - RNA, 19 nt, Artificial Sequence
  Description of Artificial Sequence: Synthetic oligonucleotide
  Antisense strand to SEQ ID NO: 909122
uaacuuccacgcaguauag

SEQ ID NO: 909124 - RNA, 19 nt, Artificial Sequence
  Description of Artificial Sequence: Synthetic oligonucleotide
  Sense strand starting at position 1031 of SEQ ID NO: 588270
cguggaaguuaauuagcau

SEQ ID NO: 909125 - RNA, 19 nt, Artificial Sequence
  Description of Artificial Sequence: Synthetic oligonucleotide
  Antisense strand to SEQ ID NO: 909124
augcuaauuaacuuccacg

SEQ ID NO: 909126 - RNA, 19 nt, Artificial Sequence
  Description of Artificial Sequence: Synthetic oligonucleotide
  Sense strand starting at position 1032 of SEQ ID NO: 588270
guggaaguuaauuagcauu

SEQ ID NO: 909127 - RNA, 19 nt, Artificial Sequence
  Description of Artificial Sequence: Synthetic oligonucleotide
  Antisense strand to SEQ ID NO: 909126
aaugcuaauuaacuuccac

SEQ ID NO: 909128 - RNA, 19 nt, Artificial Sequence
  Description of Artificial Sequence: Synthetic oligonucleotide
  Sense strand starting at position 1246 of SEQ ID NO: 588270
cggccacuuucucaaugaa

SEQ ID NO: 909129 - RNA, 19 nt, Artificial Sequence
  Description of Artificial Sequence: Synthetic oligonucleotide
  Antisense strand to SEQ ID NO: 909128
uucauugagaaaguggccg

SEQ ID NO: 909130 - RNA, 19 nt, Artificial Sequence
  Description of Artificial Sequence: Synthetic oligonucleotide
  Sense strand starting at position 2895 of SEQ ID NO: 588270
ggaagaaacuuacaaaguc

SEQ ID NO: 909131 - RNA, 19 nt, Artificial Sequence
  Description of Artificial Sequence: Synthetic oligonucleotide
  Antisense strand to SEQ ID NO: 909130
gacuuuguaaguuucuucc

SEQ ID NO: 909132 - RNA, 19 nt, Artificial Sequence
  Description of Artificial Sequence: Synthetic oligonucleotide
  Sense strand starting at position 3565 of SEQ ID NO: 588270
uagcguagugagggugaau

SEQ ID NO: 909133 - RNA, 19 nt, Artificial Sequence
  Description of Artificial Sequence: Synthetic oligonucleotide
  Antisense strand to SEQ ID NO: 909132
auucacccucacuacgcua

SEQ ID NO: 909134 - RNA, 19 nt, Artificial Sequence
  Description of Artificial Sequence: Synthetic oligonucleotide
  Sense strand starting at position 3598 of SEQ ID NO: 588270
auuggaggaauauguuuau

SEQ ID NO: 909135 - RNA, 19 nt, Artificial Sequence
  Description of Artificial Sequence: Synthetic oligonucleotide
  Antisense strand to SEQ ID NO: 909134
auaaacauauuccuccaau

SEQ ID NO: 909136 - RNA, 19 nt, Artificial Sequence
  Description of Artificial Sequence: Synthetic oligonucleotide
  Sense strand starting at position 3827 of SEQ ID NO: 588270
uaaguuguuugguuaggga

SEQ ID NO: 909137 - RNA, 19 nt, Artificial Sequence
  Description of Artificial Sequence: Synthetic oligonucleotide
  Antisense strand to SEQ ID NO: 909136
ucccuaaccaaacaacuua

SEQ ID NO: 909138 - RNA, 19 nt, Artificial Sequence
  Description of Artificial Sequence: Synthetic oligonucleotide
  Sense strand starting at position 3830 of SEQ ID NO: 588270
guuguuugguuagggaacu

SEQ ID NO: 909139 - RNA, 19 nt, Artificial Sequence
  Description of Artificial Sequence: Synthetic oligonucleotide
  Antisense strand to SEQ ID NO: 909138
aguucccuaaccaaacaac

SEQ ID NO: 909140 - RNA, 19 nt, Artificial Sequence
  Description of Artificial Sequence: Synthetic oligonucleotide
  Sense strand starting at position 3831 of SEQ ID NO: 588270
uuguuugguuagggaacuu

SEQ ID NO: 909141 - RNA, 19 nt, Artificial Sequence
  Description of Artificial Sequence: Synthetic oligonucleotide
  Antisense strand to SEQ ID NO: 909140
aaguucccuaaccaaacaa

SEQ ID NO: 909142 - RNA, 19 nt, Artificial Sequence
  Description of Artificial Sequence: Synthetic oligonucleotide
  Sense strand starting at position 3935 of SEQ ID NO: 588270
agacauuugccguggugau

SEQ ID NO: 909143 - RNA, 19 nt, Artificial Sequence
  Description of Artificial Sequence: Synthetic oligonucleotide
  Antisense strand to SEQ ID NO: 909142
aucaccacggcaaaugucu

SEQ ID NO: 909144 - RNA, 19 nt, Artificial Sequence
  Description of Artificial Sequence: Synthetic oligonucleotide
  Sense strand starting at position 3936 of SEQ ID NO: 588270
gacauuugccguggugaua

SEQ ID NO: 909145 - RNA, 19 nt, Artificial Sequence
  Description of Artificial Sequence: Synthetic oligonucleotide
  Antisense strand to SEQ ID NO: 909144
uaucaccacggcaaauguc

SEQ ID NO: 909146 - RNA, 19 nt, Artificial Sequence
  Description of Artificial Sequence: Synthetic oligonucleotide
  Sense strand starting at position 53 of SEQ ID NO: 588273
gagggagaauguucugagu

SEQ ID NO: 909147 - RNA, 19 nt, Artificial Sequence
  Description of Artificial Sequence: Synthetic oligonucleotide
  Antisense strand to SEQ ID NO: 909146
acucagaacauucucccuc

SEQ ID NO: 909148 - RNA, 19 nt, Artificial Sequence
  Description of Artificial Sequence: Synthetic oligonucleotide
  Sense strand starting at position 55 of SEQ ID NO: 588273
gggagaauguucugaguac

SEQ ID NO: 909149 - RNA, 19 nt, Artificial Sequence
  Description of Artificial Sequence: Synthetic oligonucleotide
  Antisense strand to SEQ ID NO: 909148
guacucagaacauucuccc

SEQ ID NO: 909150 - RNA, 19 nt, Artificial Sequence
  Description of Artificial Sequence: Synthetic oligonucleotide
  Sense strand starting at position 56 of SEQ ID NO: 588273
ggagaauguucugaguaca

SEQ ID NO: 909151 - RNA, 19 nt, Artificial Sequence
  Description of Artificial Sequence: Synthetic oligonucleotide
  Antisense strand to SEQ ID NO: 909150
uguacucagaacauucucc

SEQ ID NO: 909152 - RNA, 19 nt, Artificial Sequence
  Description of Artificial Sequence: Synthetic oligonucleotide
  Sense strand starting at position 101 of SEQ ID NO: 588273
cagggauguguccauagac

SEQ ID NO: 909153 - RNA, 19 nt, Artificial Sequence
  Description of Artificial Sequence: Synthetic oligonucleotide
  Antisense strand to SEQ ID NO: 909152
gucuauggacacaucccug

SEQ ID NO: 909154 - RNA, 19 nt, Artificial Sequence
  Description of Artificial Sequence: Synthetic oligonucleotide
  Sense strand starting at position 115 of SEQ ID NO: 588273
uagacaugacauggaguuu

SEQ ID NO: 909155 - RNA, 19 nt, Artificial Sequence
  Description of Artificial Sequence: Synthetic oligonucleotide
  Antisense strand to SEQ ID NO: 909154
aaacuccaugucaugucua

SEQ ID NO: 909156 - RNA, 19 nt, Artificial Sequence
  Description of Artificial Sequence: Synthetic oligonucleotide
  Sense strand starting at position 127 of SEQ ID NO: 588273
ggaguuugguccggccaga

SEQ ID NO: 909157 - RNA, 19 nt, Artificial Sequence
  Description of Artificial Sequence: Synthetic oligonucleotide
  Antisense strand to SEQ ID NO: 909156
ucuggccggaccaaacucc

SEQ ID NO: 909158 - RNA, 19 nt, Artificial Sequence
  Description of Artificial Sequence: Synthetic oligonucleotide
  Sense strand starting at position 196 of SEQ ID NO: 588273
gagguaugcuggcgccaga

SEQ ID NO: 909159 - RNA, 19 nt, Artificial Sequence
  Description of Artificial Sequence: Synthetic oligonucleotide
  Antisense strand to SEQ ID NO: 909158
ucuggcgccagcauaccuc

SEQ ID NO: 909160 - RNA, 19 nt, Artificial Sequence
  Description of Artificial Sequence: Synthetic oligonucleotide
  Sense strand starting at position 543 of SEQ ID NO: 588273
gggugucaucccgcggacu

SEQ ID NO: 909161 - RNA, 19 nt, Artificial Sequence
  Description of Artificial Sequence: Synthetic oligonucleotide
  Antisense strand to SEQ ID NO: 909160
aguccgcgggaugacaccc

SEQ ID NO: 909162 - RNA, 19 nt, Artificial Sequence
  Description of Artificial Sequence: Synthetic oligonucleotide
  Sense strand starting at position 884 of SEQ ID NO: 588273
ggcccuuucugcucugaca

SEQ ID NO: 909163 - RNA, 19 nt, Artificial Sequence
  Description of Artificial Sequence: Synthetic oligonucleotide
  Antisense strand to SEQ ID NO: 909162
ugucagagcagaaagggcc

SEQ ID NO: 909164 - RNA, 19 nt, Artificial Sequence
  Description of Artificial Sequence: Synthetic oligonucleotide
  Sense strand starting at position 1001 of SEQ ID NO: 588273
cgcggagauuuccagaaac

SEQ ID NO: 909165 - RNA, 19 nt, Artificial Sequence
  Description of Artificial Sequence: Synthetic oligonucleotide
  Antisense strand to SEQ ID NO: 909164
guuucuggaaaucuccgcg

SEQ ID NO: 909166 - RNA, 19 nt, Artificial Sequence
  Description of Artificial Sequence: Synthetic oligonucleotide
  Sense strand starting at position 1079 of SEQ ID NO: 588273
ccuagaaacuugcggacaa

SEQ ID NO: 909167 - RNA, 19 nt, Artificial Sequence
  Description of Artificial Sequence: Synthetic oligonucleotide
  Antisense strand to SEQ ID NO: 909166
uuguccgcaaguuucuagg

SEQ ID NO: 909168 - RNA, 19 nt, Artificial Sequence
  Description of Artificial Sequence: Synthetic oligonucleotide
  Sense strand starting at position 1080 of SEQ ID NO: 588273
cuagaaacuugcggacaau

SEQ ID NO: 909169 - RNA, 19 nt, Artificial Sequence
  Description of Artificial Sequence: Synthetic oligonucleotide
  Antisense strand to SEQ ID NO: 909168
auuguccgcaaguuucuag

SEQ ID NO: 909170 - RNA, 19 nt, Artificial Sequence
  Description of Artificial Sequence: Synthetic oligonucleotide
  Sense strand starting at position 1081 of SEQ ID NO: 588273
uagaaacuugcggacaauu

SEQ ID NO: 909171 - RNA, 19 nt, Artificial Sequence
  Description of Artificial Sequence: Synthetic oligonucleotide
  Antisense strand to SEQ ID NO: 909170
aauuguccgcaaguuucua

SEQ ID NO: 909172 - RNA, 19 nt, Artificial Sequence
  Description of Artificial Sequence: Synthetic oligonucleotide
  Sense strand starting at position 2180 of SEQ ID NO: 588273
cccuccuccuuguauagau

SEQ ID NO: 909173 - RNA, 19 nt, Artificial Sequence
  Description of Artificial Sequence: Synthetic oligonucleotide
  Antisense strand to SEQ ID NO: 909172
aucuauacaaggaggaggg

SEQ ID NO: 909174 - RNA, 19 nt, Artificial Sequence
  Description of Artificial Sequence: Synthetic oligonucleotide
  Sense strand starting at position 2237 of SEQ ID NO: 588273
gcuucacggugauuugauc

SEQ ID NO: 909175 - RNA, 19 nt, Artificial Sequence
  Description of Artificial Sequence: Synthetic oligonucleotide
  Antisense strand to SEQ ID NO: 909174
gaucaaaucaccgugaagc

SEQ ID NO: 909176 - RNA, 19 nt, Artificial Sequence
  Description of Artificial Sequence: Synthetic oligonucleotide
  Sense strand starting at position 2243 of SEQ ID NO: 588273
cggugauuugaucaccguu

SEQ ID NO: 909177 - RNA, 19 nt, Artificial Sequence
  Description of Artificial Sequence: Synthetic oligonucleotide
  Antisense strand to SEQ ID NO: 909176
aacggugaucaaaucaccg

SEQ ID NO: 909178 - RNA, 19 nt, Artificial Sequence
  Description of Artificial Sequence: Synthetic oligonucleotide
  Sense strand starting at position 2245 of SEQ ID NO: 588273
gugauuugaucaccguucu

SEQ ID NO: 909179 - RNA, 19 nt, Artificial Sequence
  Description of Artificial Sequence: Synthetic oligonucleotide
  Antisense strand to SEQ ID NO: 909178
agaacggugaucaaaucac

SEQ ID NO: 909180 - RNA, 19 nt, Artificial Sequence
  Description of Artificial Sequence: Synthetic oligonucleotide
  Sense strand starting at position 2251 of SEQ ID NO: 588273
ugaucaccguucugagauu

SEQ ID NO: 909181 - RNA, 19 nt, Artificial Sequence
  Description of Artificial Sequence: Synthetic oligonucleotide
  Antisense strand to SEQ ID NO: 909180
aaucucagaacggugauca

SEQ ID NO: 909182 - RNA, 19 nt, Artificial Sequence
  Description of Artificial Sequence: Synthetic oligonucleotide
  Sense strand starting at position 2252 of SEQ ID NO: 588273
gaucaccguucugagauua

SEQ ID NO: 909183 - RNA, 19 nt, Artificial Sequence
  Description of Artificial Sequence: Synthetic oligonucleotide
  Antisense strand to SEQ ID NO: 909182
uaaucucagaacggugauc

SEQ ID NO: 909184 - RNA, 19 nt, Artificial Sequence
  Description of Artificial Sequence: Synthetic oligonucleotide
  Sense strand starting at position 2331 of SEQ ID NO: 588273
gccaaauucuacuccugga

SEQ ID NO: 909185 - RNA, 19 nt, Artificial Sequence
  Description of Artificial Sequence: Synthetic oligonucleotide
  Antisense strand to SEQ ID NO: 909184
uccaggaguagaauuuggc

SEQ ID NO: 909186 - RNA, 19 nt, Artificial Sequence
  Description of Artificial Sequence: Synthetic oligonucleotide
  Sense strand starting at position 2715 of SEQ ID NO: 588273
gccacucguucacgagcaa

SEQ ID NO: 909187 - RNA, 19 nt, Artificial Sequence
  Description of Artificial Sequence: Synthetic oligonucleotide
  Antisense strand to SEQ ID NO: 909186
uugcucgugaacgaguggc

SEQ ID NO: 909188 - RNA, 19 nt, Artificial Sequence
  Description of Artificial Sequence: Synthetic oligonucleotide
  Sense strand starting at position 2719 of SEQ ID NO: 588273
cucguucacgagcaaaguu

SEQ ID NO: 909189 - RNA, 19 nt, Artificial Sequence
  Description of Artificial Sequence: Synthetic oligonucleotide
  Antisense strand to SEQ ID NO: 909188
aacuuugcucgugaacgag

SEQ ID NO: 909190 - RNA, 19 nt, Artificial Sequence
  Description of Artificial Sequence: Synthetic oligonucleotide
  Sense strand starting at position 2727 of SEQ ID NO: 588273
cgagcaaaguuacacuuau

SEQ ID NO: 909191 - RNA, 19 nt, Artificial Sequence
  Description of Artificial Sequence: Synthetic oligonucleotide
  Antisense strand to SEQ ID NO: 909190
auaaguguaacuuugcucg

SEQ ID NO: 909192 - RNA, 19 nt, Artificial Sequence
  Description of Artificial Sequence: Synthetic oligonucleotide
  Sense strand starting at position 2857 of SEQ ID NO: 588273
cgaaacgcauccucagaua

SEQ ID NO: 909193 - RNA, 19 nt, Artificial Sequence
  Description of Artificial Sequence: Synthetic oligonucleotide
  Antisense strand to SEQ ID NO: 909192
uaucugaggaugcguuucg

SEQ ID NO: 909194 - RNA, 19 nt, Artificial Sequence
  Description of Artificial Sequence: Synthetic oligonucleotide
  Sense strand starting at position 2948 of SEQ ID NO: 588273
gcacgcuauccuggccaua

SEQ ID NO: 909195 - RNA, 19 nt, Artificial Sequence
  Description of Artificial Sequence: Synthetic oligonucleotide
  Antisense strand to SEQ ID NO: 909194
uauggccaggauagcgugc

SEQ ID NO: 909196 - RNA, 19 nt, Artificial Sequence
  Description of Artificial Sequence: Synthetic oligonucleotide
  Sense strand starting at position 2950 of SEQ ID NO: 588273
acgcuauccuggccauauc

SEQ ID NO: 909197 - RNA, 19 nt, Artificial Sequence
  Description of Artificial Sequence: Synthetic oligonucleotide
  Antisense strand to SEQ ID NO: 909196
gauauggccaggauagcgu

SEQ ID NO: 909198 - RNA, 19 nt, Artificial Sequence
  Description of Artificial Sequence: Synthetic oligonucleotide
  Sense strand starting at position 3023 of SEQ ID NO: 588273
cacacaguucuccgagagu

SEQ ID NO: 909199 - RNA, 19 nt, Artificial Sequence
  Description of Artificial Sequence: Synthetic oligonucleotide
  Antisense strand to SEQ ID NO: 909198
acucucggagaacugugug

SEQ ID NO: 909200 - RNA, 19 nt, Artificial Sequence
  Description of Artificial Sequence: Synthetic oligonucleotide
  Sense strand starting at position 3549 of SEQ ID NO: 588273
cgagcaaggugucugguuu

SEQ ID NO: 909201 - RNA, 19 nt, Artificial Sequence
  Description of Artificial Sequence: Synthetic oligonucleotide
  Antisense strand to SEQ ID NO: 909200
aaaccagacaccuugcucg

SEQ ID NO: 909202 - RNA, 19 nt, Artificial Sequence
  Description of Artificial Sequence: Synthetic oligonucleotide
  Sense strand starting at position 3830 of SEQ ID NO: 588273
gcacaaauugagcauguuu

SEQ ID NO: 909203 - RNA, 19 nt, Artificial Sequence
  Description of Artificial Sequence: Synthetic oligonucleotide
  Antisense strand to SEQ ID NO: 909202
aaacaugcucaauuugugc

SEQ ID NO: 909204 - RNA, 19 nt, Artificial Sequence
  Description of Artificial Sequence: Synthetic oligonucleotide
  Sense strand starting at position 3832 of SEQ ID NO: 588273
acaaauugagcauguuugu

SEQ ID NO: 909205 - RNA, 19 nt, Artificial Sequence
  Description of Artificial Sequence: Synthetic oligonucleotide
  Antisense strand to SEQ ID NO: 909204
acaaacaugcucaauuugu

SEQ ID NO: 909206 - RNA, 19 nt, Artificial Sequence
  Description of Artificial Sequence: Synthetic oligonucleotide
  Sense strand starting at position 3956 of SEQ ID NO: 588273
guugcauacuugguaccau

SEQ ID NO: 909207 - RNA, 19 nt, Artificial Sequence
  Description of Artificial Sequence: Synthetic oligonucleotide
  Antisense strand to SEQ ID NO: 909206
augguaccaaguaugcaac

SEQ ID NO: 909208 - RNA, 19 nt, Artificial Sequence
  Description of Artificial Sequence: Synthetic oligonucleotide
  Sense strand starting at position 3974 of SEQ ID NO: 588273
ugcagacccugucuuuauu

SEQ ID NO: 909209 - RNA, 19 nt, Artificial Sequence
  Description of Artificial Sequence: Synthetic oligonucleotide
  Antisense strand to SEQ ID NO: 909208
aauaaagacagggucugca

SEQ ID NO: 909210 - RNA, 19 nt, Artificial Sequence
  Description of Artificial Sequence: Synthetic oligonucleotide
  Sense strand starting at position 132 of SEQ ID NO: 588287
gccagcuuccaggagauca

SEQ ID NO: 909211 - RNA, 19 nt, Artificial Sequence
  Description of Artificial Sequence: Synthetic oligonucleotide
  Antisense strand to SEQ ID NO: 909210
ugaucuccuggaagcuggc

SEQ ID NO: 909212 - RNA, 19 nt, Artificial Sequence
  Description of Artificial Sequence: Synthetic oligonucleotide
  Sense strand starting at position 497 of SEQ ID NO: 588287
ccgcaucacucugaauuua

SEQ ID NO: 909213 - RNA, 19 nt, Artificial Sequence
  Description of Artificial Sequence: Synthetic oligonucleotide
  Antisense strand to SEQ ID NO: 909212
uaaauucagagugaugcgg

SEQ ID NO: 909214 - RNA, 19 nt, Artificial Sequence
  Description of Artificial Sequence: Synthetic oligonucleotide
  Sense strand starting at position 510 of SEQ ID NO: 588287
aauuuagucugggaucguu

SEQ ID NO: 909215 - RNA, 19 nt, Artificial Sequence
  Description of Artificial Sequence: Synthetic oligonucleotide
  Antisense strand to SEQ ID NO: 909214
aacgaucccagacuaaauu

SEQ ID NO: 909216 - RNA, 19 nt, Artificial Sequence
  Description of Artificial Sequence: Synthetic oligonucleotide
  Sense strand starting at position 640 of SEQ ID NO: 588287
ccaacuauuuguuaggacu

SEQ ID NO: 909217 - RNA, 19 nt, Artificial Sequence
  Description of Artificial Sequence: Synthetic oligonucleotide
  Antisense strand to SEQ ID NO: 909216
aguccuaacaaauaguugg

SEQ ID NO: 909218 - RNA, 19 nt, Artificial Sequence
  Description of Artificial Sequence: Synthetic oligonucleotide
  Sense strand starting at position 642 of SEQ ID NO: 588287
aacuauuuguuaggacuga

SEQ ID NO: 909219 - RNA, 19 nt, Artificial Sequence
  Description of Artificial Sequence: Synthetic oligonucleotide
  Antisense strand to SEQ ID NO: 909218
ucaguccuaacaaauaguu

SEQ ID NO: 909220 - RNA, 19 nt, Artificial Sequence
  Description of Artificial Sequence: Synthetic oligonucleotide
  Sense strand starting at position 657 of SEQ ID NO: 588287
cugaguuccucauuccuac

SEQ ID NO: 909221 - RNA, 19 nt, Artificial Sequence
  Description of Artificial Sequence: Synthetic oligonucleotide
  Antisense strand to SEQ ID NO: 909220
guaggaaugaggaacucag

SEQ ID NO: 909222 - RNA, 19 nt, Artificial Sequence
  Description of Artificial Sequence: Synthetic oligonucleotide
  Sense strand starting at position 710 of SEQ ID NO: 588287
gaggucacucugcaugcau

SEQ ID NO: 909223 - RNA, 19 nt, Artificial Sequence
  Description of Artificial Sequence: Synthetic oligonucleotide
  Antisense strand to SEQ ID NO: 909222
augcaugcagagugaccuc

SEQ ID NO: 909224 - RNA, 19 nt, Artificial Sequence
  Description of Artificial Sequence: Synthetic oligonucleotide
  Sense strand starting at position 1144 of SEQ ID NO: 588287
cuccuugguuguccagaga

SEQ ID NO: 909225 - RNA, 19 nt, Artificial Sequence
  Description of Artificial Sequence: Synthetic oligonucleotide
  Antisense strand to SEQ ID NO: 909224
ucucuggacaaccaaggag

SEQ ID NO: 909226 - RNA, 19 nt, Artificial Sequence
  Description of Artificial Sequence: Synthetic oligonucleotide
  Sense strand starting at position 1147 of SEQ ID NO: 588287
cuugguuguccagagacag

SEQ ID NO: 909227 - RNA, 19 nt, Artificial Sequence
  Description of Artificial Sequence: Synthetic oligonucleotide
  Antisense strand to SEQ ID NO: 909226
cugucucuggacaaccaag

SEQ ID NO: 909228 - RNA, 19 nt, Artificial Sequence
  Description of Artificial Sequence: Synthetic oligonucleotide
  Sense strand starting at position 1447 of SEQ ID NO: 588287
cuuuaauuacaagguaugu

SEQ ID NO: 909229 - RNA, 19 nt, Artificial Sequence
  Description of Artificial Sequence: Synthetic oligonucleotide
  Antisense strand to SEQ ID NO: 909228
acauaccuuguaauuaaag

SEQ ID NO: 909230 - RNA, 19 nt, Artificial Sequence
  Description of Artificial Sequence: Synthetic oligonucleotide
  Sense strand starting at position 1496 of SEQ ID NO: 588287
gcaggaucgcacuaauuga

SEQ ID NO: 909231 - RNA, 19 nt, Artificial Sequence
  Description of Artificial Sequence: Synthetic oligonucleotide
  Antisense strand to SEQ ID NO: 909230
ucaauuagugcgauccugc

SEQ ID NO: 909232 - RNA, 19 nt, Artificial Sequence
  Description of Artificial Sequence: Synthetic oligonucleotide
  Sense strand starting at position 1654 of SEQ ID NO: 588287
uugucaaugccuggagucu

SEQ ID NO: 909233 - RNA, 19 nt, Artificial Sequence
  Description of Artificial Sequence: Synthetic oligonucleotide
  Antisense strand to SEQ ID NO: 909232
agacuccaggcauugacaa

SEQ ID NO: 909234 - RNA, 19 nt, Artificial Sequence
  Description of Artificial Sequence: Synthetic oligonucleotide
  Sense strand starting at position 1793 of SEQ ID NO: 588287
cucagauuccuauagcaga

SEQ ID NO: 909235 - RNA, 19 nt, Artificial Sequence
  Description of Artificial Sequence: Synthetic oligonucleotide
  Antisense strand to SEQ ID NO: 909234
ucugcuauaggaaucugag

SEQ ID NO: 909236 - RNA, 19 nt, Artificial Sequence
  Description of Artificial Sequence: Synthetic oligonucleotide
  Sense strand starting at position 1814 of SEQ ID NO: 588287
aaagucuguugagcagaga

SEQ ID NO: 909237 - RNA, 19 nt, Artificial Sequence
  Description of Artificial Sequence: Synthetic oligonucleotide
  Antisense strand to SEQ ID NO: 909236
ucucugcucaacagacuuu

SEQ ID NO: 909238 - RNA, 19 nt, Artificial Sequence
  Description of Artificial Sequence: Synthetic oligonucleotide
  Sense strand starting at position 1865 of SEQ ID NO: 588287
accgucuuaccguaggagu

SEQ ID NO: 909239 - RNA, 19 nt, Artificial Sequence
  Description of Artificial Sequence: Synthetic oligonucleotide
  Antisense strand to SEQ ID NO: 909238
acuccuacgguaagacggu

SEQ ID NO: 909240 - RNA, 19 nt, Artificial Sequence
  Description of Artificial Sequence: Synthetic oligonucleotide
  Sense strand starting at position 2017 of SEQ ID NO: 588287
caacuagaugacuggguau

SEQ ID NO: 909241 - RNA, 19 nt, Artificial Sequence
  Description of Artificial Sequence: Synthetic oligonucleotide
  Antisense strand to SEQ ID NO: 909240
auacccagucaucuaguug

SEQ ID NO: 909242 - RNA, 19 nt, Artificial Sequence
  Description of Artificial Sequence: Synthetic oligonucleotide
  Sense strand starting at position 2029 of SEQ ID NO: 588287
uggguauuccugcaagcag

SEQ ID NO: 909243 - RNA, 19 nt, Artificial Sequence
  Description of Artificial Sequence: Synthetic oligonucleotide
  Antisense strand to SEQ ID NO: 909242
cugcuugcaggaauaccca

SEQ ID NO: 909244 - RNA, 19 nt, Artificial Sequence
  Description of Artificial Sequence: Synthetic oligonucleotide
  Sense strand starting at position 2145 of SEQ ID NO: 588287
gaggcagcgagaugucuaa

SEQ ID NO: 909245 - RNA, 19 nt, Artificial Sequence
  Description of Artificial Sequence: Synthetic oligonucleotide
  Antisense strand to SEQ ID NO: 909244
uuagacaucucgcugccuc

SEQ ID NO: 909246 - RNA, 19 nt, Artificial Sequence
  Description of Artificial Sequence: Synthetic oligonucleotide
  Sense strand starting at position 2455 of SEQ ID NO: 588287
ggaugcagaaauugacuca

SEQ ID NO: 909247 - RNA, 19 nt, Artificial Sequence
  Description of Artificial Sequence: Synthetic oligonucleotide
  Antisense strand to SEQ ID NO: 909246
ugagucaauuucugcaucc

SEQ ID NO: 909248 - RNA, 19 nt, Artificial Sequence
  Description of Artificial Sequence: Synthetic oligonucleotide
  Sense strand starting at position 2509 of SEQ ID NO: 588287
gcaucuagucugcaccaga

SEQ ID NO: 909249 - RNA, 19 nt, Artificial Sequence
  Description of Artificial Sequence: Synthetic oligonucleotide
  Antisense strand to SEQ ID NO: 909248
ucuggugcagacuagaugc

SEQ ID NO: 909250 - RNA, 19 nt, Artificial Sequence
  Description of Artificial Sequence: Synthetic oligonucleotide
  Sense strand starting at position 2733 of SEQ ID NO: 588287
aggaguuagccagguacag

SEQ ID NO: 909251 - RNA, 19 nt, Artificial Sequence
  Description of Artificial Sequence: Synthetic oligonucleotide
  Antisense strand to SEQ ID NO: 909250
cuguaccuggcuaacuccu

SEQ ID NO: 909252 - RNA, 19 nt, Artificial Sequence
  Description of Artificial Sequence: Synthetic oligonucleotide
  Sense strand starting at position 2735 of SEQ ID NO: 588287
gaguuagccagguacagaa

SEQ ID NO: 909253 - RNA, 19 nt, Artificial Sequence
  Description of Artificial Sequence: Synthetic oligonucleotide
  Antisense strand to SEQ ID NO: 909252
uucuguaccuggcuaacuc

SEQ ID NO: 909254 - RNA, 19 nt, Artificial Sequence
  Description of Artificial Sequence: Synthetic oligonucleotide
  Sense strand starting at position 2755 of SEQ ID NO: 588287
gagggagugaccugugcaa

SEQ ID NO: 909255 - RNA, 19 nt, Artificial Sequence
  Description of Artificial Sequence: Synthetic oligonucleotide
  Antisense strand to SEQ ID NO: 909254
uugcacaggucacucccuc

SEQ ID NO: 909256 - RNA, 19 nt, Artificial Sequence
  Description of Artificial Sequence: Synthetic oligonucleotide
  Sense strand starting at position 2757 of SEQ ID NO: 588287
gggagugaccugugcaaua

SEQ ID NO: 909257 - RNA, 19 nt, Artificial Sequence
  Description of Artificial Sequence: Synthetic oligonucleotide
  Antisense strand to SEQ ID NO: 909256
uauugcacaggucacuccc

SEQ ID NO: 909258 - RNA, 19 nt, Artificial Sequence
  Description of Artificial Sequence: Synthetic oligonucleotide
  Sense strand starting at position 2768 of SEQ ID NO: 588287
gugcaauagcccugaggug

SEQ ID NO: 909259 - RNA, 19 nt, Artificial Sequence
  Description of Artificial Sequence: Synthetic oligonucleotide
  Antisense strand to SEQ ID NO: 909258
caccucagggcuauugcac

SEQ ID NO: 909260 - RNA, 19 nt, Artificial Sequence
  Description of Artificial Sequence: Synthetic oligonucleotide
  Sense strand starting at position 2769 of SEQ ID NO: 588287
ugcaauagcccugagguga

SEQ ID NO: 909261 - RNA, 19 nt, Artificial Sequence
  Description of Artificial Sequence: Synthetic oligonucleotide
  Antisense strand to SEQ ID NO: 909260
ucaccucagggcuauugca

SEQ ID NO: 909262 - RNA, 19 nt, Artificial Sequence
  Description of Artificial Sequence: Synthetic oligonucleotide
  Sense strand starting at position 2818 of SEQ ID NO: 588287
gaauaaguuccaggugguu

SEQ ID NO: 909263 - RNA, 19 nt, Artificial Sequence
  Description of Artificial Sequence: Synthetic oligonucleotide
  Antisense strand to SEQ ID NO: 909262
aaccaccuggaacuuauuc

SEQ ID NO: 909264 - RNA, 19 nt, Artificial Sequence
  Description of Artificial Sequence: Synthetic oligonucleotide
  Sense strand starting at position 2963 of SEQ ID NO: 588287
ugacaugauccggauuguc

SEQ ID NO: 909265 - RNA, 19 nt, Artificial Sequence
  Description of Artificial Sequence: Synthetic oligonucleotide
  Antisense strand to SEQ ID NO: 909264
gacaauccggaucauguca

SEQ ID NO: 909266 - RNA, 19 nt, Artificial Sequence
  Description of Artificial Sequence: Synthetic oligonucleotide
  Sense strand starting at position 2971 of SEQ ID NO: 588287
uccggauuguccucuggga

SEQ ID NO: 909267 - RNA, 19 nt, Artificial Sequence
  Description of Artificial Sequence: Synthetic oligonucleotide
  Antisense strand to SEQ ID NO: 909266
ucccagaggacaauccgga

SEQ ID NO: 909268 - RNA, 19 nt, Artificial Sequence
  Description of Artificial Sequence: Synthetic oligonucleotide
  Sense strand starting at position 2973 of SEQ ID NO: 588287
cggauuguccucugggaag

SEQ ID NO: 909269 - RNA, 19 nt, Artificial Sequence
  Description of Artificial Sequence: Synthetic oligonucleotide
  Antisense strand to SEQ ID NO: 909268
cuucccagaggacaauccg

SEQ ID NO: 909270 - RNA, 19 nt, Artificial Sequence
  Description of Artificial Sequence: Synthetic oligonucleotide
  Sense strand starting at position 3156 of SEQ ID NO: 588287
uggucccuuccaggagaaa

SEQ ID NO: 909271 - RNA, 19 nt, Artificial Sequence
  Description of Artificial Sequence: Synthetic oligonucleotide
  Antisense strand to SEQ ID NO: 909270
uuucuccuggaagggacca

SEQ ID NO: 909272 - RNA, 19 nt, Artificial Sequence
  Description of Artificial Sequence: Synthetic oligonucleotide
  Sense strand starting at position 3208 of SEQ ID NO: 588287
gcaguuuagagaggugaug

SEQ ID NO: 909273 - RNA, 19 nt, Artificial Sequence
  Description of Artificial Sequence: Synthetic oligonucleotide
  Antisense strand to SEQ ID NO: 909272
caucaccucucuaaacugc

SEQ ID NO: 909274 - RNA, 19 nt, Artificial Sequence
  Description of Artificial Sequence: Synthetic oligonucleotide
  Sense strand starting at position 3512 of SEQ ID NO: 588287
cgaugcgugccuguaauuc

SEQ ID NO: 909275 - RNA, 19 nt, Artificial Sequence
  Description of Artificial Sequence: Synthetic oligonucleotide
  Antisense strand to SEQ ID NO: 909274
gaauuacaggcacgcaucg

SEQ ID NO: 909276 - RNA, 19 nt, Artificial Sequence
  Description of Artificial Sequence: Synthetic oligonucleotide
  Sense strand starting at position 3773 of SEQ ID NO: 588287
ggaggagguguuugaacug

SEQ ID NO: 909277 - RNA, 19 nt, Artificial Sequence
  Description of Artificial Sequence: Synthetic oligonucleotide
  Antisense strand to SEQ ID NO: 909276
caguucaaacaccuccucc

SEQ ID NO: 909278 - RNA, 19 nt, Artificial Sequence
  Description of Artificial Sequence: Synthetic oligonucleotide
  Sense strand starting at position 3779 of SEQ ID NO: 588287
gguguuugaacugggcaga

SEQ ID NO: 909279 - RNA, 19 nt, Artificial Sequence
  Description of Artificial Sequence: Synthetic oligonucleotide
  Antisense strand to SEQ ID NO: 909278
ucugcccaguucaaacacc

SEQ ID NO: 909280 - RNA, 19 nt, Artificial Sequence
  Description of Artificial Sequence: Synthetic oligonucleotide
  Sense strand starting at position 3806 of SEQ ID NO: 588287
agcagaauuugaugggcca

SEQ ID NO: 909281 - RNA, 19 nt, Artificial Sequence
  Description of Artificial Sequence: Synthetic oligonucleotide
  Antisense strand to SEQ ID NO: 909280
uggcccaucaaauucugcu

SEQ ID NO: 909282 - RNA, 19 nt, Artificial Sequence
  Description of Artificial Sequence: Synthetic oligonucleotide
  Sense strand starting at position 3921 of SEQ ID NO: 588287
ggaggaagucagggcugau

SEQ ID NO: 909283 - RNA, 19 nt, Artificial Sequence
  Description of Artificial Sequence: Synthetic oligonucleotide
  Antisense strand to SEQ ID NO: 909282
aucagcccugacuuccucc

SEQ ID NO: 909284 - RNA, 19 nt, Artificial Sequence
  Description of Artificial Sequence: Synthetic oligonucleotide
  Sense strand starting at position 3924 of SEQ ID NO: 588287
ggaagucagggcugauaag

SEQ ID NO: 909285 - RNA, 19 nt, Artificial Sequence
  Description of Artificial Sequence: Synthetic oligonucleotide
  Antisense strand to SEQ ID NO: 909284
cuuaucagcccugacuucc

SEQ ID NO: 909286 - RNA, 19 nt, Artificial Sequence
  Description of Artificial Sequence: Synthetic oligonucleotide
  Sense strand starting at position 3942 of SEQ ID NO: 588287
gcagguuugggcuagauca

SEQ ID NO: 909287 - RNA, 19 nt, Artificial Sequence
  Description of Artificial Sequence: Synthetic oligonucleotide
  Antisense strand to SEQ ID NO: 909286
ugaucuagcccaaaccugc

SEQ ID NO: 909288 - RNA, 19 nt, Artificial Sequence
  Description of Artificial Sequence: Synthetic oligonucleotide
  Sense strand starting at position 3944 of SEQ ID NO: 588287
agguuugggcuagaucaag

SEQ ID NO: 909289 - RNA, 19 nt, Artificial Sequence
  Description of Artificial Sequence: Synthetic oligonucleotide
  Antisense strand to SEQ ID NO: 909288
cuugaucuagcccaaaccu

SEQ ID NO: 909290 - RNA, 19 nt, Artificial Sequence
  Description of Artificial Sequence: Synthetic oligonucleotide
  Sense strand starting at position 11 of SEQ ID NO: 588298
ucaauauaugagugcauga

SEQ ID NO: 909291 - RNA, 19 nt, Artificial Sequence
  Description of Artificial Sequence: Synthetic oligonucleotide
  Antisense strand to SEQ ID NO: 909290
ucaugcacucauauauuga

SEQ ID NO: 909292 - RNA, 19 nt, Artificial Sequence
  Description of Artificial Sequence: Synthetic oligonucleotide
  Sense strand starting at position 89 of SEQ ID NO: 588298
cuacacuggucacuagaau

SEQ ID NO: 909293 - RNA, 19 nt, Artificial Sequence
  Description of Artificial Sequence: Synthetic oligonucleotide
  Antisense strand to SEQ ID NO: 909292
auucuagugaccaguguag

SEQ ID NO: 909294 - RNA, 19 nt, Artificial Sequence
  Description of Artificial Sequence: Synthetic oligonucleotide
  Sense strand starting at position 156 of SEQ ID NO: 588298
guuaguugccggucuuaac

SEQ ID NO: 909295 - RNA, 19 nt, Artificial Sequence
  Description of Artificial Sequence: Synthetic oligonucleotide
  Antisense strand to SEQ ID NO: 909294
guuaagaccggcaacuaac

SEQ ID NO: 909296 - RNA, 19 nt, Artificial Sequence
  Description of Artificial Sequence: Synthetic oligonucleotide
  Sense strand starting at position 563 of SEQ ID NO: 588298
gcccuugggaugugaccaa

SEQ ID NO: 909297 - RNA, 19 nt, Artificial Sequence
  Description of Artificial Sequence: Synthetic oligonucleotide
  Antisense strand to SEQ ID NO: 909296
uuggucacaucccaagggc

SEQ ID NO: 909298 - RNA, 19 nt, Artificial Sequence
  Description of Artificial Sequence: Synthetic oligonucleotide
  Sense strand starting at position 833 of SEQ ID NO: 588298
uaagaagggcuguguaaag

SEQ ID NO: 909299 - RNA, 19 nt, Artificial Sequence
  Description of Artificial Sequence: Synthetic oligonucleotide
  Antisense strand to SEQ ID NO: 909298
cuuuacacagcccuucuua

SEQ ID NO: 909300 - RNA, 19 nt, Artificial Sequence
  Description of Artificial Sequence: Synthetic oligonucleotide
  Sense strand starting at position 965 of SEQ ID NO: 588298
gguccgugcggguuacaua

SEQ ID NO: 909301 - RNA, 19 nt, Artificial Sequence
  Description of Artificial Sequence: Synthetic oligonucleotide
  Antisense strand to SEQ ID NO: 909300
uauguaacccgcacggacc

SEQ ID NO: 909302 - RNA, 19 nt, Artificial Sequence
  Description of Artificial Sequence: Synthetic oligonucleotide
  Sense strand starting at position 1025 of SEQ ID NO: 588298
gggauuacagcgugaggga

SEQ ID NO: 909303 - RNA, 19 nt, Artificial Sequence
  Description of Artificial Sequence: Synthetic oligonucleotide
  Antisense strand to SEQ ID NO: 909302
ucccucacgcuguaauccc

SEQ ID NO: 909304 - RNA, 19 nt, Artificial Sequence
  Description of Artificial Sequence: Synthetic oligonucleotide
  Sense strand starting at position 1119 of SEQ ID NO: 588298
agcacaaaguaauucgaua

SEQ ID NO: 909305 - RNA, 19 nt, Artificial Sequence
  Description of Artificial Sequence: Synthetic oligonucleotide
  Antisense strand to SEQ ID NO: 909304
uaucgaauuacuuugugcu

SEQ ID NO: 909306 - RNA, 19 nt, Artificial Sequence
  Description of Artificial Sequence: Synthetic oligonucleotide
  Sense strand starting at position 1176 of SEQ ID NO: 588298
uccgaaguuagauggaaac

SEQ ID NO: 909307 - RNA, 19 nt, Artificial Sequence
  Description of Artificial Sequence: Synthetic oligonucleotide
  Antisense strand to SEQ ID NO: 909306
guuuccaucuaacuucgga

SEQ ID NO: 909308 - RNA, 19 nt, Artificial Sequence
  Description of Artificial Sequence: Synthetic oligonucleotide
  Sense strand starting at position 1198 of SEQ ID NO: 588298
uguauuaaagccuaaagcu

SEQ ID NO: 909309 - RNA, 19 nt, Artificial Sequence
  Description of Artificial Sequence: Synthetic oligonucleotide
  Antisense strand to SEQ ID NO: 909308
agcuuuaggcuuuaauaca

SEQ ID NO: 909310 - RNA, 19 nt, Artificial Sequence
  Description of Artificial Sequence: Synthetic oligonucleotide
  Sense strand starting at position 1268 of SEQ ID NO: 588298
gcaaauaagauucggcaga

SEQ ID NO: 909311 - RNA, 19 nt, Artificial Sequence
  Description of Artificial Sequence: Synthetic oligonucleotide
  Antisense strand to SEQ ID NO: 909310
ucugccgaaucuuauuugc

SEQ ID NO: 909312 - RNA, 19 nt, Artificial Sequence
  Description of Artificial Sequence: Synthetic oligonucleotide
  Sense strand starting at position 1270 of SEQ ID NO: 588298
aaauaagauucggcagagu

SEQ ID NO: 909313 - RNA, 19 nt, Artificial Sequence
  Description of Artificial Sequence: Synthetic oligonucleotide
  Antisense strand to SEQ ID NO: 909312
acucugccgaaucuuauuu

SEQ ID NO: 909314 - RNA, 19 nt, Artificial Sequence
  Description of Artificial Sequence: Synthetic oligonucleotide
  Sense strand starting at position 1273 of SEQ ID NO: 588298
uaagauucggcagaguaag

SEQ ID NO: 909315 - RNA, 19 nt, Artificial Sequence
  Description of Artificial Sequence: Synthetic oligonucleotide
  Antisense strand to SEQ ID NO: 909314
cuuacucugccgaaucuua

SEQ ID NO: 909316 - RNA, 19 nt, Artificial Sequence
  Description of Artificial Sequence: Synthetic oligonucleotide
  Sense strand starting at position 1325 of SEQ ID NO: 588298
ugcucaguacuguaauuau

SEQ ID NO: 909317 - RNA, 19 nt, Artificial Sequence
  Description of Artificial Sequence: Synthetic oligonucleotide
  Antisense strand to SEQ ID NO: 909316
auaauuacaguacugagca

SEQ ID NO: 909318 - RNA, 19 nt, Artificial Sequence
  Description of Artificial Sequence: Synthetic oligonucleotide
  Sense strand starting at position 1361 of SEQ ID NO: 588298
ucccuuggacuguaaugua

SEQ ID NO: 909319 - RNA, 19 nt, Artificial Sequence
  Description of Artificial Sequence: Synthetic oligonucleotide
  Antisense strand to SEQ ID NO: 909318
uacauuacaguccaaggga

SEQ ID NO: 909320 - RNA, 19 nt, Artificial Sequence
  Description of Artificial Sequence: Synthetic oligonucleotide
  Sense strand starting at position 1601 of SEQ ID NO: 588298
aaaugcugcggagaucuua

SEQ ID NO: 909321 - RNA, 19 nt, Artificial Sequence
  Description of Artificial Sequence: Synthetic oligonucleotide
  Antisense strand to SEQ ID NO: 909320
uaagaucuccgcagcauuu

SEQ ID NO: 909322 - RNA, 19 nt, Artificial Sequence
  Description of Artificial Sequence: Synthetic oligonucleotide
  Sense strand starting at position 1783 of SEQ ID NO: 588298
cagggucuuccggauauaa

SEQ ID NO: 909323 - RNA, 19 nt, Artificial Sequence
  Description of Artificial Sequence: Synthetic oligonucleotide
  Antisense strand to SEQ ID NO: 909322
uuauauccggaagacccug

SEQ ID NO: 909324 - RNA, 19 nt, Artificial Sequence
  Description of Artificial Sequence: Synthetic oligonucleotide
  Sense strand starting at position 1785 of SEQ ID NO: 588298
gggucuuccggauauaauc

SEQ ID NO: 909325 - RNA, 19 nt, Artificial Sequence
  Description of Artificial Sequence: Synthetic oligonucleotide
  Antisense strand to SEQ ID NO: 909324
gauuauauccggaagaccc

SEQ ID NO: 909326 - RNA, 19 nt, Artificial Sequence
  Description of Artificial Sequence: Synthetic oligonucleotide
  Sense strand starting at position 2191 of SEQ ID NO: 588298
acacaaucugagugugcaa

SEQ ID NO: 909327 - RNA, 19 nt, Artificial Sequence
  Description of Artificial Sequence: Synthetic oligonucleotide
  Antisense strand to SEQ ID NO: 909326
uugcacacucagauugugu

SEQ ID NO: 909328 - RNA, 19 nt, Artificial Sequence
  Description of Artificial Sequence: Synthetic oligonucleotide
  Sense strand starting at position 2193 of SEQ ID NO: 588298
acaaucugagugugcaauu

SEQ ID NO: 909329 - RNA, 19 nt, Artificial Sequence
  Description of Artificial Sequence: Synthetic oligonucleotide
  Antisense strand to SEQ ID NO: 909328
aauugcacacucagauugu

SEQ ID NO: 909330 - RNA, 19 nt, Artificial Sequence
  Description of Artificial Sequence: Synthetic oligonucleotide
  Sense strand starting at position 2271 of SEQ ID NO: 588298
aggguaagucuauguuuag

SEQ ID NO: 909331 - RNA, 19 nt, Artificial Sequence
  Description of Artificial Sequence: Synthetic oligonucleotide
  Antisense strand to SEQ ID NO: 909330
cuaaacauagacuuacccu

SEQ ID NO: 909332 - RNA, 19 nt, Artificial Sequence
  Description of Artificial Sequence: Synthetic oligonucleotide
  Sense strand starting at position 2357 of SEQ ID NO: 588298
guaggagagcuccaguaga

SEQ ID NO: 909333 - RNA, 19 nt, Artificial Sequence
  Description of Artificial Sequence: Synthetic oligonucleotide
  Antisense strand to SEQ ID NO: 909332
ucuacuggagcucuccuac

SEQ ID NO: 909334 - RNA, 19 nt, Artificial Sequence
  Description of Artificial Sequence: Synthetic oligonucleotide
  Sense strand starting at position 2478 of SEQ ID NO: 588298
uaauuaauggugggcacau

SEQ ID NO: 909335 - RNA, 19 nt, Artificial Sequence
  Description of Artificial Sequence: Synthetic oligonucleotide
  Antisense strand to SEQ ID NO: 909334
augugcccaccauuaauua

SEQ ID NO: 909336 - RNA, 19 nt, Artificial Sequence
  Description of Artificial Sequence: Synthetic oligonucleotide
  Sense strand starting at position 2479 of SEQ ID NO: 588298
aauuaauggugggcacauu

SEQ ID NO: 909337 - RNA, 19 nt, Artificial Sequence
  Description of Artificial Sequence: Synthetic oligonucleotide
  Antisense strand to SEQ ID NO: 909336
aaugugcccaccauuaauu

SEQ ID NO: 909338 - RNA, 19 nt, Artificial Sequence
  Description of Artificial Sequence: Synthetic oligonucleotide
  Sense strand starting at position 2635 of SEQ ID NO: 588298
cgaaauaucuucuuccagu

SEQ ID NO: 909339 - RNA, 19 nt, Artificial Sequence
  Description of Artificial Sequence: Synthetic oligonucleotide
  Antisense strand to SEQ ID NO: 909338
acuggaagaagauauuucg

SEQ ID NO: 909340 - RNA, 19 nt, Artificial Sequence
  Description of Artificial Sequence: Synthetic oligonucleotide
  Sense strand starting at position 2749 of SEQ ID NO: 588298
uuguguccucuuuaauaaa

SEQ ID NO: 909341 - RNA, 19 nt, Artificial Sequence
  Description of Artificial Sequence: Synthetic oligonucleotide
  Antisense strand to SEQ ID NO: 909340
uuuauuaaagaggacacaa

SEQ ID NO: 909342 - RNA, 19 nt, Artificial Sequence
  Description of Artificial Sequence: Synthetic oligonucleotide
  Sense strand starting at position 2825 of SEQ ID NO: 588298
ccuuuacuucugggucuau

SEQ ID NO: 909343 - RNA, 19 nt, Artificial Sequence
  Description of Artificial Sequence: Synthetic oligonucleotide
  Antisense strand to SEQ ID NO: 909342
auagacccagaaguaaagg

SEQ ID NO: 909344 - RNA, 19 nt, Artificial Sequence
  Description of Artificial Sequence: Synthetic oligonucleotide
  Sense strand starting at position 2826 of SEQ ID NO: 588298
cuuuacuucugggucuauu

SEQ ID NO: 909345 - RNA, 19 nt, Artificial Sequence
  Description of Artificial Sequence: Synthetic oligonucleotide
  Antisense strand to SEQ ID NO: 909344
aauagacccagaaguaaag

SEQ ID NO: 909346 - RNA, 19 nt, Artificial Sequence
  Description of Artificial Sequence: Synthetic oligonucleotide
  Sense strand starting at position 2987 of SEQ ID NO: 588298
guccauugaauguauaugu

SEQ ID NO: 909347 - RNA, 19 nt, Artificial Sequence
  Description of Artificial Sequence: Synthetic oligonucleotide
  Antisense strand to SEQ ID NO: 909346
acauauacauucaauggac

SEQ ID NO: 909348 - RNA, 19 nt, Artificial Sequence
  Description of Artificial Sequence: Synthetic oligonucleotide
  Sense strand starting at position 2994 of SEQ ID NO: 588298
gaauguauaugugucuauu

SEQ ID NO: 909349 - RNA, 19 nt, Artificial Sequence
  Description of Artificial Sequence: Synthetic oligonucleotide
  Antisense strand to SEQ ID NO: 909348
aauagacacauauacauuc

SEQ ID NO: 909350 - RNA, 19 nt, Artificial Sequence
  Description of Artificial Sequence: Synthetic oligonucleotide
  Sense strand starting at position 3006 of SEQ ID NO: 588298
gucuauuucugacucuugu

SEQ ID NO: 909351 - RNA, 19 nt, Artificial Sequence
  Description of Artificial Sequence: Synthetic oligonucleotide
  Antisense strand to SEQ ID NO: 909350
acaagagucagaaauagac

SEQ ID NO: 909352 - RNA, 19 nt, Artificial Sequence
  Description of Artificial Sequence: Synthetic oligonucleotide
  Sense strand starting at position 3012 of SEQ ID NO: 588298
uucugacucuuguuauauu

SEQ ID NO: 909353 - RNA, 19 nt, Artificial Sequence
  Description of Artificial Sequence: Synthetic oligonucleotide
  Antisense strand to SEQ ID NO: 909352
aauauaacaagagucagaa

SEQ ID NO: 909354 - RNA, 19 nt, Artificial Sequence
  Description of Artificial Sequence: Synthetic oligonucleotide
  Sense strand starting at position 3052 of SEQ ID NO: 588298
auaccauugucucuagguu

SEQ ID NO: 909355 - RNA, 19 nt, Artificial Sequence
  Description of Artificial Sequence: Synthetic oligonucleotide
  Antisense strand to SEQ ID NO: 909354
aaccuagagacaaugguau

SEQ ID NO: 909356 - RNA, 19 nt, Artificial Sequence
  Description of Artificial Sequence: Synthetic oligonucleotide
  Sense strand starting at position 3060 of SEQ ID NO: 588298
gucucuagguuacuuuaga

SEQ ID NO: 909357 - RNA, 19 nt, Artificial Sequence
  Description of Artificial Sequence: Synthetic oligonucleotide
  Antisense strand to SEQ ID NO: 909356
ucuaaaguaaccuagagac

SEQ ID NO: 909358 - RNA, 19 nt, Artificial Sequence
  Description of Artificial Sequence: Synthetic oligonucleotide
  Sense strand starting at position 3061 of SEQ ID NO: 588298
ucucuagguuacuuuagau

SEQ ID NO: 909359 - RNA, 19 nt, Artificial Sequence
  Description of Artificial Sequence: Synthetic oligonucleotide
  Antisense strand to SEQ ID NO: 909358
aucuaaaguaaccuagaga

SEQ ID NO: 909360 - RNA, 19 nt, Artificial Sequence
  Description of Artificial Sequence: Synthetic oligonucleotide
  Sense strand starting at position 3265 of SEQ ID NO: 588298
cuugaaucccugugcauuu

SEQ ID NO: 909361 - RNA, 19 nt, Artificial Sequence
  Description of Artificial Sequence: Synthetic oligonucleotide
  Antisense strand to SEQ ID NO: 909360
aaaugcacagggauucaag

SEQ ID NO: 909362 - RNA, 19 nt, Artificial Sequence
  Description of Artificial Sequence: Synthetic oligonucleotide
  Sense strand starting at position 3560 of SEQ ID NO: 588298
acaauuauagugugcuaca

SEQ ID NO: 909363 - RNA, 19 nt, Artificial Sequence
  Description of Artificial Sequence: Synthetic oligonucleotide
  Antisense strand to SEQ ID NO: 909362
uguagcacacuauaauugu

SEQ ID NO: 909364 - RNA, 19 nt, Artificial Sequence
  Description of Artificial Sequence: Synthetic oligonucleotide
  Sense strand starting at position 3710 of SEQ ID NO: 588298
ugcuacugucaauggaauu

SEQ ID NO: 909365 - RNA, 19 nt, Artificial Sequence
  Description of Artificial Sequence: Synthetic oligonucleotide
  Antisense strand to SEQ ID NO: 909364
aauuccauugacaguagca

SEQ ID NO: 909366 - RNA, 19 nt, Artificial Sequence
  Description of Artificial Sequence: Synthetic oligonucleotide
  Sense strand starting at position 3711 of SEQ ID NO: 588298
gcuacugucaauggaauug

SEQ ID NO: 909367 - RNA, 19 nt, Artificial Sequence
  Description of Artificial Sequence: Synthetic oligonucleotide
  Antisense strand to SEQ ID NO: 909366
caauuccauugacaguagc

SEQ ID NO: 909368 - RNA, 19 nt, Artificial Sequence
  Description of Artificial Sequence: Synthetic oligonucleotide
  Sense strand starting at position 3758 of SEQ ID NO: 588298
guugcuacgguauagaaau

SEQ ID NO: 909369 - RNA, 19 nt, Artificial Sequence
  Description of Artificial Sequence: Synthetic oligonucleotide
  Antisense strand to SEQ ID NO: 909368
auuucuauaccguagcaac

SEQ ID NO: 909370 - RNA, 19 nt, Artificial Sequence
  Description of Artificial Sequence: Synthetic oligonucleotide
  Sense strand starting at position 181 of SEQ ID NO: 588299
cuggaaauguccuugauga

SEQ ID NO: 909371 - RNA, 19 nt, Artificial Sequence
  Description of Artificial Sequence: Synthetic oligonucleotide
  Antisense strand to SEQ ID NO: 909370
ucaucaaggacauuuccag

SEQ ID NO: 909372 - RNA, 19 nt, Artificial Sequence
  Description of Artificial Sequence: Synthetic oligonucleotide
  Sense strand starting at position 182 of SEQ ID NO: 588299
uggaaauguccuugaugac

SEQ ID NO: 909373 - RNA, 19 nt, Artificial Sequence
  Description of Artificial Sequence: Synthetic oligonucleotide
  Antisense strand to SEQ ID NO: 909372
gucaucaaggacauuucca

SEQ ID NO: 909374 - RNA, 19 nt, Artificial Sequence
  Description of Artificial Sequence: Synthetic oligonucleotide
  Sense strand starting at position 238 of SEQ ID NO: 588299
ugagcuuaagcuuagauaa

SEQ ID NO: 909375 - RNA, 19 nt, Artificial Sequence
  Description of Artificial Sequence: Synthetic oligonucleotide
  Antisense strand to SEQ ID NO: 909374
uuaucuaagcuuaagcuca

SEQ ID NO: 909376 - RNA, 19 nt, Artificial Sequence
  Description of Artificial Sequence: Synthetic oligonucleotide
  Sense strand starting at position 369 of SEQ ID NO: 588299
gacccaauuucguuagcua

SEQ ID NO: 909377 - RNA, 19 nt, Artificial Sequence
  Description of Artificial Sequence: Synthetic oligonucleotide
  Antisense strand to SEQ ID NO: 909376
uagcuaacgaaauuggguc

SEQ ID NO: 909378 - RNA, 19 nt, Artificial Sequence
  Description of Artificial Sequence: Synthetic oligonucleotide
  Sense strand starting at position 460 of SEQ ID NO: 588299
acaggugcucaugaaauuc

SEQ ID NO: 909379 - RNA, 19 nt, Artificial Sequence
  Description of Artificial Sequence: Synthetic oligonucleotide
  Antisense strand to SEQ ID NO: 909378
gaauuucaugagcaccugu

SEQ ID NO: 909380 - RNA, 19 nt, Artificial Sequence
  Description of Artificial Sequence: Synthetic oligonucleotide
  Sense strand starting at position 524 of SEQ ID NO: 588299
ggagguauucuaggaacug

SEQ ID NO: 909381 - RNA, 19 nt, Artificial Sequence
  Description of Artificial Sequence: Synthetic oligonucleotide
  Antisense strand to SEQ ID NO: 909380
caguuccuagaauaccucc

SEQ ID NO: 909382 - RNA, 19 nt, Artificial Sequence
  Description of Artificial Sequence: Synthetic oligonucleotide
  Sense strand starting at position 774 of SEQ ID NO: 588299
ggguuagauucuguugaau

SEQ ID NO: 909383 - RNA, 19 nt, Artificial Sequence
  Description of Artificial Sequence: Synthetic oligonucleotide
  Antisense strand to SEQ ID NO: 909382
auucaacagaaucuaaccc

SEQ ID NO: 909384 - RNA, 19 nt, Artificial Sequence
  Description of Artificial Sequence: Synthetic oligonucleotide
  Sense strand starting at position 786 of SEQ ID NO: 588299
guugaauugagucaucuga

SEQ ID NO: 909385 - RNA, 19 nt, Artificial Sequence
  Description of Artificial Sequence: Synthetic oligonucleotide
  Antisense strand to SEQ ID NO: 909384
ucagaugacucaauucaac

SEQ ID NO: 909386 - RNA, 19 nt, Artificial Sequence
  Description of Artificial Sequence: Synthetic oligonucleotide
  Sense strand starting at position 837 of SEQ ID NO: 588299
aagaguacauggucaucaa

SEQ ID NO: 909387 - RNA, 19 nt, Artificial Sequence
  Description of Artificial Sequence: Synthetic oligonucleotide
  Antisense strand to SEQ ID NO: 909386
uugaugaccauguacucuu

SEQ ID NO: 909388 - RNA, 19 nt, Artificial Sequence
  Description of Artificial Sequence: Synthetic oligonucleotide
  Sense strand starting at position 924 of SEQ ID NO: 588299
cuugucauaguugaaacua

SEQ ID NO: 909389 - RNA, 19 nt, Artificial Sequence
  Description of Artificial Sequence: Synthetic oligonucleotide
  Antisense strand to SEQ ID NO: 909388
uaguuucaacuaugacaag

SEQ ID NO: 909390 - RNA, 19 nt, Artificial Sequence
  Description of Artificial Sequence: Synthetic oligonucleotide
  Sense strand starting at position 948 of SEQ ID NO: 588299
gcgauucuuggagaaggac

SEQ ID NO: 909391 - RNA, 19 nt, Artificial Sequence
  Description of Artificial Sequence: Synthetic oligonucleotide
  Antisense strand to SEQ ID NO: 909390
guccuucuccaagaaucgc

SEQ ID NO: 909392 - RNA, 19 nt, Artificial Sequence
  Description of Artificial Sequence: Synthetic oligonucleotide
  Sense strand starting at position 979 of SEQ ID NO: 588299
agaggcaguccucaauaau

SEQ ID NO: 909393 - RNA, 19 nt, Artificial Sequence
  Description of Artificial Sequence: Synthetic oligonucleotide
  Antisense strand to SEQ ID NO: 909392
auuauugaggacugccucu

SEQ ID NO: 909394 - RNA, 19 nt, Artificial Sequence
  Description of Artificial Sequence: Synthetic oligonucleotide
  Sense strand starting at position 1108 of SEQ ID NO: 588299
ucuuucuuaugguuagaga

SEQ ID NO: 909395 - RNA, 19 nt, Artificial Sequence
  Description of Artificial Sequence: Synthetic oligonucleotide
  Antisense strand to SEQ ID NO: 909394
ucucuaaccauaagaaaga

SEQ ID NO: 909396 - RNA, 19 nt, Artificial Sequence
  Description of Artificial Sequence: Synthetic oligonucleotide
  Sense strand starting at position 1147 of SEQ ID NO: 588299
ugggucugucagggacaga

SEQ ID NO: 909397 - RNA, 19 nt, Artificial Sequence
  Description of Artificial Sequence: Synthetic oligonucleotide
  Antisense strand to SEQ ID NO: 909396
ucugucccugacagaccca

SEQ ID NO: 909398 - RNA, 19 nt, Artificial Sequence
  Description of Artificial Sequence: Synthetic oligonucleotide
  Sense strand starting at position 1235 of SEQ ID NO: 588299
cugaguaagccucagaguc

SEQ ID NO: 909399 - RNA, 19 nt, Artificial Sequence
  Description of Artificial Sequence: Synthetic oligonucleotide
  Antisense strand to SEQ ID NO: 909398
gacucugaggcuuacucag

SEQ ID NO: 909400 - RNA, 19 nt, Artificial Sequence
  Description of Artificial Sequence: Synthetic oligonucleotide
  Sense strand starting at position 1577 of SEQ ID NO: 588299
gcacaaggaggauguuuau

SEQ ID NO: 909401 - RNA, 19 nt, Artificial Sequence
  Description of Artificial Sequence: Synthetic oligonucleotide
  Antisense strand to SEQ ID NO: 909400
auaaacauccuccuugugc

SEQ ID NO: 909402 - RNA, 19 nt, Artificial Sequence
  Description of Artificial Sequence: Synthetic oligonucleotide
  Sense strand starting at position 1638 of SEQ ID NO: 588299
cauuauguuguagaguaaa

SEQ ID NO: 909403 - RNA, 19 nt, Artificial Sequence
  Description of Artificial Sequence: Synthetic oligonucleotide
  Antisense strand to SEQ ID NO: 909402
uuuacucuacaacauaaug

SEQ ID NO: 909404 - RNA, 19 nt, Artificial Sequence
  Description of Artificial Sequence: Synthetic oligonucleotide
  Sense strand starting at position 1888 of SEQ ID NO: 588299
ugcuaagaaugaguggaua

SEQ ID NO: 909405 - RNA, 19 nt, Artificial Sequence
  Description of Artificial Sequence: Synthetic oligonucleotide
  Antisense strand to SEQ ID NO: 909404
uauccacucauucuuagca

SEQ ID NO: 909406 - RNA, 19 nt, Artificial Sequence
  Description of Artificial Sequence: Synthetic oligonucleotide
  Sense strand starting at position 1946 of SEQ ID NO: 588299
auuaccuuuccucaguaga

SEQ ID NO: 909407 - RNA, 19 nt, Artificial Sequence
  Description of Artificial Sequence: Synthetic oligonucleotide
  Antisense strand to SEQ ID NO: 909406
ucuacugaggaaagguaau

SEQ ID NO: 909408 - RNA, 19 nt, Artificial Sequence
  Description of Artificial Sequence: Synthetic oligonucleotide
  Sense strand starting at position 1998 of SEQ ID NO: 588299
auagcuagaugaguaauca

SEQ ID NO: 909409 - RNA, 19 nt, Artificial Sequence
  Description of Artificial Sequence: Synthetic oligonucleotide
  Antisense strand to SEQ ID NO: 909408
ugauuacucaucuagcuau

SEQ ID NO: 909410 - RNA, 19 nt, Artificial Sequence
  Description of Artificial Sequence: Synthetic oligonucleotide
  Sense strand starting at position 2155 of SEQ ID NO: 588299
ugugaaggagccugaaaga

SEQ ID NO: 909411 - RNA, 19 nt, Artificial Sequence
  Description of Artificial Sequence: Synthetic oligonucleotide
  Antisense strand to SEQ ID NO: 909410
ucuuucaggcuccuucaca

SEQ ID NO: 909412 - RNA, 19 nt, Artificial Sequence
  Description of Artificial Sequence: Synthetic oligonucleotide
  Sense strand starting at position 2456 of SEQ ID NO: 588299
aggcauagcuaaucaauca

SEQ ID NO: 909413 - RNA, 19 nt, Artificial Sequence
  Description of Artificial Sequence: Synthetic oligonucleotide
  Antisense strand to SEQ ID NO: 909412
ugauugauuagcuaugccu

SEQ ID NO: 909414 - RNA, 19 nt, Artificial Sequence
  Description of Artificial Sequence: Synthetic oligonucleotide
  Sense strand starting at position 2496 of SEQ ID NO: 588299
ucagaugauuccucugacu

SEQ ID NO: 909415 - RNA, 19 nt, Artificial Sequence
  Description of Artificial Sequence: Synthetic oligonucleotide
  Antisense strand to SEQ ID NO: 909414
agucagaggaaucaucuga

SEQ ID NO: 909416 - RNA, 19 nt, Artificial Sequence
  Description of Artificial Sequence: Synthetic oligonucleotide
  Sense strand starting at position 2498 of SEQ ID NO: 588299
agaugauuccucugacuac

SEQ ID NO: 909417 - RNA, 19 nt, Artificial Sequence
  Description of Artificial Sequence: Synthetic oligonucleotide
  Antisense strand to SEQ ID NO: 909416
guagucagaggaaucaucu

SEQ ID NO: 909418 - RNA, 19 nt, Artificial Sequence
  Description of Artificial Sequence: Synthetic oligonucleotide
  Sense strand starting at position 2584 of SEQ ID NO: 588299
uuguccucuccauacuaga

SEQ ID NO: 909419 - RNA, 19 nt, Artificial Sequence
  Description of Artificial Sequence: Synthetic oligonucleotide
  Antisense strand to SEQ ID NO: 909418
ucuaguauggagaggacaa

SEQ ID NO: 909420 - RNA, 19 nt, Artificial Sequence
  Description of Artificial Sequence: Synthetic oligonucleotide
  Sense strand starting at position 2597 of SEQ ID NO: 588299
acuagaugauaucugaagu

SEQ ID NO: 909421 - RNA, 19 nt, Artificial Sequence
  Description of Artificial Sequence: Synthetic oligonucleotide
  Antisense strand to SEQ ID NO: 909420
acuucagauaucaucuagu

SEQ ID NO: 909422 - RNA, 19 nt, Artificial Sequence
  Description of Artificial Sequence: Synthetic oligonucleotide
  Sense strand starting at position 2664 of SEQ ID NO: 588299
acgccagcucguucaugaa

SEQ ID NO: 909423 - RNA, 19 nt, Artificial Sequence
  Description of Artificial Sequence: Synthetic oligonucleotide
  Antisense strand to SEQ ID NO: 909422
uucaugaacgagcuggcgu

SEQ ID NO: 909424 - RNA, 19 nt, Artificial Sequence
  Description of Artificial Sequence: Synthetic oligonucleotide
  Sense strand starting at position 2719 of SEQ ID NO: 588299
cuguuucugacuuauggag

SEQ ID NO: 909425 - RNA, 19 nt, Artificial Sequence
  Description of Artificial Sequence: Synthetic oligonucleotide
  Antisense strand to SEQ ID NO: 909424
cuccauaagucagaaacag

SEQ ID NO: 909426 - RNA, 19 nt, Artificial Sequence
  Description of Artificial Sequence: Synthetic oligonucleotide
  Sense strand starting at position 2743 of SEQ ID NO: 588299
gcuauauaagucgauauga

SEQ ID NO: 909427 - RNA, 19 nt, Artificial Sequence
  Description of Artificial Sequence: Synthetic oligonucleotide
  Antisense strand to SEQ ID NO: 909426
ucauaucgacuuauauagc

SEQ ID NO: 909428 - RNA, 19 nt, Artificial Sequence
  Description of Artificial Sequence: Synthetic oligonucleotide
  Sense strand starting at position 2796 of SEQ ID NO: 588299
uugucaccuguauaacaau

SEQ ID NO: 909429 - RNA, 19 nt, Artificial Sequence
  Description of Artificial Sequence: Synthetic oligonucleotide
  Antisense strand to SEQ ID NO: 909428
auuguuauacaggugacaa

SEQ ID NO: 909430 - RNA, 19 nt, Artificial Sequence
  Description of Artificial Sequence: Synthetic oligonucleotide
  Sense strand starting at position 3272 of SEQ ID NO: 588299
gaugauugaucuuuaugug

SEQ ID NO: 909431 - RNA, 19 nt, Artificial Sequence
  Description of Artificial Sequence: Synthetic oligonucleotide
  Antisense strand to SEQ ID NO: 909430
cacauaaagaucaaucauc

SEQ ID NO: 909432 - RNA, 19 nt, Artificial Sequence
  Description of Artificial Sequence: Synthetic oligonucleotide
  Sense strand starting at position 3297 of SEQ ID NO: 588299
ggcauacaaccugguaaga

SEQ ID NO: 909433 - RNA, 19 nt, Artificial Sequence
  Description of Artificial Sequence: Synthetic oligonucleotide
  Antisense strand to SEQ ID NO: 909432
ucuuaccagguuguaugcc

SEQ ID NO: 909434 - RNA, 19 nt, Artificial Sequence
  Description of Artificial Sequence: Synthetic oligonucleotide
  Sense strand starting at position 3434 of SEQ ID NO: 588299
ucacguuagcaauaaugaa

SEQ ID NO: 909435 - RNA, 19 nt, Artificial Sequence
  Description of Artificial Sequence: Synthetic oligonucleotide
  Antisense strand to SEQ ID NO: 909434
uucauuauugcuaacguga

SEQ ID NO: 909436 - RNA, 19 nt, Artificial Sequence
  Description of Artificial Sequence: Synthetic oligonucleotide
  Sense strand starting at position 3555 of SEQ ID NO: 588299
uuaauaaguguaugguaga

SEQ ID NO: 909437 - RNA, 19 nt, Artificial Sequence
  Description of Artificial Sequence: Synthetic oligonucleotide
  Antisense strand to SEQ ID NO: 909436
ucuaccauacacuuauuaa

SEQ ID NO: 909438 - RNA, 19 nt, Artificial Sequence
  Description of Artificial Sequence: Synthetic oligonucleotide
  Sense strand starting at position 3560 of SEQ ID NO: 588299
aaguguaugguagauugau

SEQ ID NO: 909439 - RNA, 19 nt, Artificial Sequence
  Description of Artificial Sequence: Synthetic oligonucleotide
  Antisense strand to SEQ ID NO: 909438
aucaaucuaccauacacuu

SEQ ID NO: 909440 - RNA, 19 nt, Artificial Sequence
  Description of Artificial Sequence: Synthetic oligonucleotide
  Sense strand starting at position 3566 of SEQ ID NO: 588299
augguagauugaucaguug

SEQ ID NO: 909441 - RNA, 19 nt, Artificial Sequence
  Description of Artificial Sequence: Synthetic oligonucleotide
  Antisense strand to SEQ ID NO: 909440
caacugaucaaucuaccau

SEQ ID NO: 909442 - RNA, 19 nt, Artificial Sequence
  Description of Artificial Sequence: Synthetic oligonucleotide
  Sense strand starting at position 3575 of SEQ ID NO: 588299
ugaucaguuguauacaucu

SEQ ID NO: 909443 - RNA, 19 nt, Artificial Sequence
  Description of Artificial Sequence: Synthetic oligonucleotide
  Antisense strand to SEQ ID NO: 909442
agauguauacaacugauca

SEQ ID NO: 909444 - RNA, 19 nt, Artificial Sequence
  Description of Artificial Sequence: Synthetic oligonucleotide
  Sense strand starting at position 3616 of SEQ ID NO: 588299
uccagaagaaauuggguuu

SEQ ID NO: 909445 - RNA, 19 nt, Artificial Sequence
  Description of Artificial Sequence: Synthetic oligonucleotide
  Antisense strand to SEQ ID NO: 909444
aaacccaauuucuucugga

SEQ ID NO: 909446 - RNA, 19 nt, Artificial Sequence
  Description of Artificial Sequence: Synthetic oligonucleotide
  Sense strand starting at position 3845 of SEQ ID NO: 588299
ggaagauucuacuuguaua

SEQ ID NO: 909447 - RNA, 19 nt, Artificial Sequence
  Description of Artificial Sequence: Synthetic oligonucleotide
  Antisense strand to SEQ ID NO: 909446
uauacaaguagaaucuucc

SEQ ID NO: 909448 - RNA, 19 nt, Artificial Sequence
  Description of Artificial Sequence: Synthetic oligonucleotide
  Sense strand starting at position 3882 of SEQ ID NO: 588299
gugguaucaaauuaaagug

SEQ ID NO: 909449 - RNA, 19 nt, Artificial Sequence
  Description of Artificial Sequence: Synthetic oligonucleotide
  Antisense strand to SEQ ID NO: 909448
cacuuuaauuugauaccac

SEQ ID NO: 909450 - RNA, 19 nt, Artificial Sequence
  Description of Artificial Sequence: Synthetic oligonucleotide
  Sense strand starting at position 5 of SEQ ID NO: 588300
cucagaauuagcgaugggu

SEQ ID NO: 909451 - RNA, 19 nt, Artificial Sequence
  Description of Artificial Sequence: Synthetic oligonucleotide
  Antisense strand to SEQ ID NO: 909450
acccaucgcuaauucugag

SEQ ID NO: 909452 - RNA, 19 nt, Artificial Sequence
  Description of Artificial Sequence: Synthetic oligonucleotide
  Sense strand starting at position 7 of SEQ ID NO: 588300
cagaauuagcgauggguuc

SEQ ID NO: 909453 - RNA, 19 nt, Artificial Sequence
  Description of Artificial Sequence: Synthetic oligonucleotide
  Antisense strand to SEQ ID NO: 909452
gaacccaucgcuaauucug

SEQ ID NO: 909454 - RNA, 19 nt, Artificial Sequence
  Description of Artificial Sequence: Synthetic oligonucleotide
  Sense strand starting at position 234 of SEQ ID NO: 588300
uggaaaguguuucuaagug

SEQ ID NO: 909455 - RNA, 19 nt, Artificial Sequence
  Description of Artificial Sequence: Synthetic oligonucleotide
  Antisense strand to SEQ ID NO: 909454
cacuuagaaacacuuucca

SEQ ID NO: 909456 - RNA, 19 nt, Artificial Sequence
  Description of Artificial Sequence: Synthetic oligonucleotide
  Sense strand starting at position 431 of SEQ ID NO: 588300
ucaugcgacucuuccauuu

SEQ ID NO: 909457 - RNA, 19 nt, Artificial Sequence
  Description of Artificial Sequence: Synthetic oligonucleotide
  Antisense strand to SEQ ID NO: 909456
aaauggaagagucgcauga

SEQ ID NO: 909458 - RNA, 19 nt, Artificial Sequence
  Description of Artificial Sequence: Synthetic oligonucleotide
  Sense strand starting at position 605 of SEQ ID NO: 588300
agaugcaauguuugaauaa

SEQ ID NO: 909459 - RNA, 19 nt, Artificial Sequence
  Description of Artificial Sequence: Synthetic oligonucleotide
  Antisense strand to SEQ ID NO: 909458
uuauucaaacauugcaucu

SEQ ID NO: 909460 - RNA, 19 nt, Artificial Sequence
  Description of Artificial Sequence: Synthetic oligonucleotide
  Sense strand starting at position 710 of SEQ ID NO: 588300
uuucuuguaagaggguuua

SEQ ID NO: 909461 - RNA, 19 nt, Artificial Sequence
  Description of Artificial Sequence: Synthetic oligonucleotide
  Antisense strand to SEQ ID NO: 909460
uaaacccucuuacaagaaa

SEQ ID NO: 909462 - RNA, 19 nt, Artificial Sequence
  Description of Artificial Sequence: Synthetic oligonucleotide
  Sense strand starting at position 720 of SEQ ID NO: 588300
gaggguuuaaaguguccua

SEQ ID NO: 909463 - RNA, 19 nt, Artificial Sequence
  Description of Artificial Sequence: Synthetic oligonucleotide
  Antisense strand to SEQ ID NO: 909462
uaggacacuuuaaacccuc

SEQ ID NO: 909464 - RNA, 19 nt, Artificial Sequence
  Description of Artificial Sequence: Synthetic oligonucleotide
  Sense strand starting at position 723 of SEQ ID NO: 588300
gguuuaaaguguccuagga

SEQ ID NO: 909465 - RNA, 19 nt, Artificial Sequence
  Description of Artificial Sequence: Synthetic oligonucleotide
  Antisense strand to SEQ ID NO: 909464
uccuaggacacuuuaaacc

SEQ ID NO: 909466 - RNA, 19 nt, Artificial Sequence
  Description of Artificial Sequence: Synthetic oligonucleotide
  Sense strand starting at position 727 of SEQ ID NO: 588300
uaaaguguccuaggaaagu

SEQ ID NO: 909467 - RNA, 19 nt, Artificial Sequence
  Description of Artificial Sequence: Synthetic oligonucleotide
  Antisense strand to SEQ ID NO: 909466
acuuuccuaggacacuuua

SEQ ID NO: 909468 - RNA, 19 nt, Artificial Sequence
  Description of Artificial Sequence: Synthetic oligonucleotide
  Sense strand starting at position 823 of SEQ ID NO: 588300
gugaacauuuguuaguaau

SEQ ID NO: 909469 - RNA, 19 nt, Artificial Sequence
  Description of Artificial Sequence: Synthetic oligonucleotide
  Antisense strand to SEQ ID NO: 909468
auuacuaacaaauguucac

SEQ ID NO: 909470 - RNA, 19 nt, Artificial Sequence
  Description of Artificial Sequence: Synthetic oligonucleotide
  Sense strand starting at position 934 of SEQ ID NO: 588300
cccaaauuggaccgcuuaa

SEQ ID NO: 909471 - RNA, 19 nt, Artificial Sequence
  Description of Artificial Sequence: Synthetic oligonucleotide
  Antisense strand to SEQ ID NO: 909470
uuaagcgguccaauuuggg

SEQ ID NO: 909472 - RNA, 19 nt, Artificial Sequence
  Description of Artificial Sequence: Synthetic oligonucleotide
  Sense strand starting at position 970 of SEQ ID NO: 588300
gucaacuucuaagucuaca

SEQ ID NO: 909473 - RNA, 19 nt, Artificial Sequence
  Description of Artificial Sequence: Synthetic oligonucleotide
  Antisense strand to SEQ ID NO: 909472
uguagacuuagaaguugac

SEQ ID NO: 909474 - RNA, 19 nt, Artificial Sequence
  Description of Artificial Sequence: Synthetic oligonucleotide
  Sense strand starting at position 1011 of SEQ ID NO: 588300
ggauucugaaguuacaugu

SEQ ID NO: 909475 - RNA, 19 nt, Artificial Sequence
  Description of Artificial Sequence: Synthetic oligonucleotide
  Antisense strand to SEQ ID NO: 909474
acauguaacuucagaaucc

SEQ ID NO: 909476 - RNA, 19 nt, Artificial Sequence
  Description of Artificial Sequence: Synthetic oligonucleotide
  Sense strand starting at position 1062 of SEQ ID NO: 588300
ccgggaacuccaggugaau

SEQ ID NO: 909477 - RNA, 19 nt, Artificial Sequence
  Description of Artificial Sequence: Synthetic oligonucleotide
  Antisense strand to SEQ ID NO: 909476
auucaccuggaguucccgg

SEQ ID NO: 909478 - RNA, 19 nt, Artificial Sequence
  Description of Artificial Sequence: Synthetic oligonucleotide
  Sense strand starting at position 1089 of SEQ ID NO: 588300
gagggaauucgccagauug

SEQ ID NO: 909479 - RNA, 19 nt, Artificial Sequence
  Description of Artificial Sequence: Synthetic oligonucleotide
  Antisense strand to SEQ ID NO: 909478
caaucuggcgaauucccuc

SEQ ID NO: 909480 - RNA, 19 nt, Artificial Sequence
  Description of Artificial Sequence: Synthetic oligonucleotide
  Sense strand starting at position 1091 of SEQ ID NO: 588300
gggaauucgccagauugag

SEQ ID NO: 909481 - RNA, 19 nt, Artificial Sequence
  Description of Artificial Sequence: Synthetic oligonucleotide
  Antisense strand to SEQ ID NO: 909480
cucaaucuggcgaauuccc

SEQ ID NO: 909482 - RNA, 19 nt, Artificial Sequence
  Description of Artificial Sequence: Synthetic oligonucleotide
  Sense strand starting at position 1097 of SEQ ID NO: 588300
ucgccagauugaguuacaa

SEQ ID NO: 909483 - RNA, 19 nt, Artificial Sequence
  Description of Artificial Sequence: Synthetic oligonucleotide
  Antisense strand to SEQ ID NO: 909482
uuguaacucaaucuggcga

SEQ ID NO: 909484 - RNA, 19 nt, Artificial Sequence
  Description of Artificial Sequence: Synthetic oligonucleotide
  Sense strand starting at position 2277 of SEQ ID NO: 588300
ccaagcccucccgaugaaa

SEQ ID NO: 909485 - RNA, 19 nt, Artificial Sequence
  Description of Artificial Sequence: Synthetic oligonucleotide
  Antisense strand to SEQ ID NO: 909484
uuucaucgggagggcuugg

SEQ ID NO: 909486 - RNA, 19 nt, Artificial Sequence
  Description of Artificial Sequence: Synthetic oligonucleotide
  Sense strand starting at position 2288 of SEQ ID NO: 588300
cgaugaaaccgccaccaau

SEQ ID NO: 909487 - RNA, 19 nt, Artificial Sequence
  Description of Artificial Sequence: Synthetic oligonucleotide
  Antisense strand to SEQ ID NO: 909486
auugguggcgguuucaucg

SEQ ID NO: 909488 - RNA, 19 nt, Artificial Sequence
  Description of Artificial Sequence: Synthetic oligonucleotide
  Sense strand starting at position 2334 of SEQ ID NO: 588300
cucucuaacggagagcuaa

SEQ ID NO: 909489 - RNA, 19 nt, Artificial Sequence
  Description of Artificial Sequence: Synthetic oligonucleotide
  Antisense strand to SEQ ID NO: 909488
uuagcucuccguuagagag

SEQ ID NO: 909490 - RNA, 19 nt, Artificial Sequence
  Description of Artificial Sequence: Synthetic oligonucleotide
  Sense strand starting at position 2358 of SEQ ID NO: 588300
cgcccaggccuccaugaaa

SEQ ID NO: 909491 - RNA, 19 nt, Artificial Sequence
  Description of Artificial Sequence: Synthetic oligonucleotide
  Antisense strand to SEQ ID NO: 909490
uuucauggaggccugggcg

SEQ ID NO: 909492 - RNA, 19 nt, Artificial Sequence
  Description of Artificial Sequence: Synthetic oligonucleotide
  Sense strand starting at position 2833 of SEQ ID NO: 588300
gugagugcccuuucugcau

SEQ ID NO: 909493 - RNA, 19 nt, Artificial Sequence
  Description of Artificial Sequence: Synthetic oligonucleotide
  Antisense strand to SEQ ID NO: 909492
augcagaaagggcacucac

SEQ ID NO: 909494 - RNA, 19 nt, Artificial Sequence
  Description of Artificial Sequence: Synthetic oligonucleotide
  Sense strand starting at position 2837 of SEQ ID NO: 588300
gugcccuuucugcaucaga

SEQ ID NO: 909495 - RNA, 19 nt, Artificial Sequence
  Description of Artificial Sequence: Synthetic oligonucleotide
  Antisense strand to SEQ ID NO: 909494
ucugaugcagaaagggcac

SEQ ID NO: 909496 - RNA, 19 nt, Artificial Sequence
  Description of Artificial Sequence: Synthetic oligonucleotide
  Sense strand starting at position 2980 of SEQ ID NO: 588300
caagauuaguguccagacu

SEQ ID NO: 909497 - RNA, 19 nt, Artificial Sequence
  Description of Artificial Sequence: Synthetic oligonucleotide
  Antisense strand to SEQ ID NO: 909496
agucuggacacuaaucuug

SEQ ID NO: 909498 - RNA, 19 nt, Artificial Sequence
  Description of Artificial Sequence: Synthetic oligonucleotide
  Sense strand starting at position 2986 of SEQ ID NO: 588300
uaguguccagacugaauca

SEQ ID NO: 909499 - RNA, 19 nt, Artificial Sequence
  Description of Artificial Sequence: Synthetic oligonucleotide
  Antisense strand to SEQ ID NO: 909498
ugauucagucuggacacua

SEQ ID NO: 909500 - RNA, 19 nt, Artificial Sequence
  Description of Artificial Sequence: Synthetic oligonucleotide
  Sense strand starting at position 3006 of SEQ ID NO: 588300
uccagacaccugugacaua

SEQ ID NO: 909501 - RNA, 19 nt, Artificial Sequence
  Description of Artificial Sequence: Synthetic oligonucleotide
  Antisense strand to SEQ ID NO: 909500
uaugucacaggugucugga

SEQ ID NO: 909502 - RNA, 19 nt, Artificial Sequence
  Description of Artificial Sequence: Synthetic oligonucleotide
  Sense strand starting at position 3273 of SEQ ID NO: 588300
guagaagacuucuucuguu

SEQ ID NO: 909503 - RNA, 19 nt, Artificial Sequence
  Description of Artificial Sequence: Synthetic oligonucleotide
  Antisense strand to SEQ ID NO: 909502
aacagaagaagucuucuac

SEQ ID NO: 909504 - RNA, 19 nt, Artificial Sequence
  Description of Artificial Sequence: Synthetic oligonucleotide
  Sense strand starting at position 3280 of SEQ ID NO: 588300
acuucuucuguuggaguca

SEQ ID NO: 909505 - RNA, 19 nt, Artificial Sequence
  Description of Artificial Sequence: Synthetic oligonucleotide
  Antisense strand to SEQ ID NO: 909504
ugacuccaacagaagaagu

SEQ ID NO: 909506 - RNA, 19 nt, Artificial Sequence
  Description of Artificial Sequence: Synthetic oligonucleotide
  Sense strand starting at position 3346 of SEQ ID NO: 588300
guugaagucaaaggguaaa

SEQ ID NO: 909507 - RNA, 19 nt, Artificial Sequence
  Description of Artificial Sequence: Synthetic oligonucleotide
  Antisense strand to SEQ ID NO: 909506
uuuacccuuugacuucaac

SEQ ID NO: 909508 - RNA, 19 nt, Artificial Sequence
  Description of Artificial Sequence: Synthetic oligonucleotide
  Sense strand starting at position 3470 of SEQ ID NO: 588300
ggagcaaagcucugcuaga

SEQ ID NO: 909509 - RNA, 19 nt, Artificial Sequence
  Description of Artificial Sequence: Synthetic oligonucleotide
  Antisense strand to SEQ ID NO: 909508
ucuagcagagcuuugcucc

SEQ ID NO: 909510 - RNA, 19 nt, Artificial Sequence
  Description of Artificial Sequence: Synthetic oligonucleotide
  Sense strand starting at position 3471 of SEQ ID NO: 588300
gagcaaagcucugcuagac

SEQ ID NO: 909511 - RNA, 19 nt, Artificial Sequence
  Description of Artificial Sequence: Synthetic oligonucleotide
  Antisense strand to SEQ ID NO: 909510
gucuagcagagcuuugcuc

SEQ ID NO: 909512 - RNA, 19 nt, Artificial Sequence
  Description of Artificial Sequence: Synthetic oligonucleotide
  Sense strand starting at position 3548 of SEQ ID NO: 588300
ucaagaucuucccuggaau

SEQ ID NO: 909513 - RNA, 19 nt, Artificial Sequence
  Description of Artificial Sequence: Synthetic oligonucleotide
  Antisense strand to SEQ ID NO: 909512
auuccagggaagaucuuga

SEQ ID NO: 909514 - RNA, 19 nt, Artificial Sequence
  Description of Artificial Sequence: Synthetic oligonucleotide
  Sense strand starting at position 3614 of SEQ ID NO: 588300
guuauugguggagggcaaa

SEQ ID NO: 909515 - RNA, 19 nt, Artificial Sequence
  Description of Artificial Sequence: Synthetic oligonucleotide
  Antisense strand to SEQ ID NO: 909514
uuugcccuccaccaauaac

SEQ ID NO: 909516 - RNA, 19 nt, Artificial Sequence
  Description of Artificial Sequence: Synthetic oligonucleotide
  Sense strand starting at position 3767 of SEQ ID NO: 588300
gggauuaugugucugcuca

SEQ ID NO: 909517 - RNA, 19 nt, Artificial Sequence
  Description of Artificial Sequence: Synthetic oligonucleotide
  Antisense strand to SEQ ID NO: 909516
ugagcagacacauaauccc

SEQ ID NO: 909518 - RNA, 19 nt, Artificial Sequence
  Description of Artificial Sequence: Synthetic oligonucleotide
  Sense strand starting at position 3838 of SEQ ID NO: 588300
uuaggaacguggcuucuaa

SEQ ID NO: 909519 - RNA, 19 nt, Artificial Sequence
  Description of Artificial Sequence: Synthetic oligonucleotide
  Antisense strand to SEQ ID NO: 909518
uuagaagccacguuccuaa

SEQ ID NO: 909520 - RNA, 19 nt, Artificial Sequence
  Description of Artificial Sequence: Synthetic oligonucleotide
  Sense strand starting at position 3865 of SEQ ID NO: 588300
ucagcauugacuggcagau

SEQ ID NO: 909521 - RNA, 19 nt, Artificial Sequence
  Description of Artificial Sequence: Synthetic oligonucleotide
  Antisense strand to SEQ ID NO: 909520
aucugccagucaaugcuga

SEQ ID NO: 909522 - RNA, 19 nt, Artificial Sequence
  Description of Artificial Sequence: Synthetic oligonucleotide
  Sense strand starting at position 3885 of SEQ ID NO: 588300
uuaugcaaaugauuagaca

SEQ ID NO: 909523 - RNA, 19 nt, Artificial Sequence
  Description of Artificial Sequence: Synthetic oligonucleotide
  Antisense strand to SEQ ID NO: 909522
ugucuaaucauuugcauaa

SEQ ID NO: 909524 - RNA, 19 nt, Artificial Sequence
  Description of Artificial Sequence: Synthetic oligonucleotide
  Sense strand starting at position 3894 of SEQ ID NO: 588300
ugauuagacaaguguaugu

SEQ ID NO: 909525 - RNA, 19 nt, Artificial Sequence
  Description of Artificial Sequence: Synthetic oligonucleotide
  Antisense strand to SEQ ID NO: 909524
acauacacuugucuaauca

SEQ ID NO: 909526 - RNA, 19 nt, Artificial Sequence
  Description of Artificial Sequence: Synthetic oligonucleotide
  Sense strand starting at position 3896 of SEQ ID NO: 588300
auuagacaaguguauguuu

SEQ ID NO: 909527 - RNA, 19 nt, Artificial Sequence
  Description of Artificial Sequence: Synthetic oligonucleotide
  Antisense strand to SEQ ID NO: 909526
aaacauacacuugucuaau

SEQ ID NO: 909528 - RNA, 19 nt, Artificial Sequence
  Description of Artificial Sequence: Synthetic oligonucleotide
  Sense strand starting at position 3962 of SEQ ID NO: 588300
caucauaagagcgagugua

SEQ ID NO: 909529 - RNA, 19 nt, Artificial Sequence
  Description of Artificial Sequence: Synthetic oligonucleotide
  Antisense strand to SEQ ID NO: 909528
uacacucgcucuuaugaug

SEQ ID NO: 909530 - RNA, 19 nt, Artificial Sequence
  Description of Artificial Sequence: Synthetic oligonucleotide
  Sense strand starting at position 37 of SEQ ID NO: 588305
cuggaaauaacguggauua

SEQ ID NO: 909531 - RNA, 19 nt, Artificial Sequence
  Description of Artificial Sequence: Synthetic oligonucleotide
  Antisense strand to SEQ ID NO: 909530
uaauccacguuauuuccag

SEQ ID NO: 909532 - RNA, 19 nt, Artificial Sequence
  Description of Artificial Sequence: Synthetic oligonucleotide
  Sense strand starting at position 48 of SEQ ID NO: 588305
guggauuacugccuuccaa

SEQ ID NO: 909533 - RNA, 19 nt, Artificial Sequence
  Description of Artificial Sequence: Synthetic oligonucleotide
  Antisense strand to SEQ ID NO: 909532
uuggaaggcaguaauccac

SEQ ID NO: 909534 - RNA, 19 nt, Artificial Sequence
  Description of Artificial Sequence: Synthetic oligonucleotide
  Sense strand starting at position 253 of SEQ ID NO: 588305
cacuuuaaucuucggucga

SEQ ID NO: 909535 - RNA, 19 nt, Artificial Sequence
  Description of Artificial Sequence: Synthetic oligonucleotide
  Antisense strand to SEQ ID NO: 909534
ucgaccgaagauuaaagug

SEQ ID NO: 909536 - RNA, 19 nt, Artificial Sequence
  Description of Artificial Sequence: Synthetic oligonucleotide
  Sense strand starting at position 255 of SEQ ID NO: 588305
cuuuaaucuucggucgaga

SEQ ID NO: 909537 - RNA, 19 nt, Artificial Sequence
  Description of Artificial Sequence: Synthetic oligonucleotide
  Antisense strand to SEQ ID NO: 909536
ucucgaccgaagauuaaag

SEQ ID NO: 909538 - RNA, 19 nt, Artificial Sequence
  Description of Artificial Sequence: Synthetic oligonucleotide
  Sense strand starting at position 257 of SEQ ID NO: 588305
uuaaucuucggucgagaau

SEQ ID NO: 909539 - RNA, 19 nt, Artificial Sequence
  Description of Artificial Sequence: Synthetic oligonucleotide
  Antisense strand to SEQ ID NO: 909538
auucucgaccgaagauuaa

SEQ ID NO: 909540 - RNA, 19 nt, Artificial Sequence
  Description of Artificial Sequence: Synthetic oligonucleotide
  Sense strand starting at position 258 of SEQ ID NO: 588305
uaaucuucggucgagaaug

SEQ ID NO: 909541 - RNA, 19 nt, Artificial Sequence
  Description of Artificial Sequence: Synthetic oligonucleotide
  Antisense strand to SEQ ID NO: 909540
cauucucgaccgaagauua

SEQ ID NO: 909542 - RNA, 19 nt, Artificial Sequence
  Description of Artificial Sequence: Synthetic oligonucleotide
  Sense strand starting at position 263 of SEQ ID NO: 588305
uucggucgagaaugcaaau

SEQ ID NO: 909543 - RNA, 19 nt, Artificial Sequence
  Description of Artificial Sequence: Synthetic oligonucleotide
  Antisense strand to SEQ ID NO: 909542
auuugcauucucgaccgaa

SEQ ID NO: 909544 - RNA, 19 nt, Artificial Sequence
  Description of Artificial Sequence: Synthetic oligonucleotide
  Sense strand starting at position 432 of SEQ ID NO: 588305
aaggcuuuccgacagguua

SEQ ID NO: 909545 - RNA, 19 nt, Artificial Sequence
  Description of Artificial Sequence: Synthetic oligonucleotide
  Antisense strand to SEQ ID NO: 909544
uaaccugucggaaagccuu

SEQ ID NO: 909546 - RNA, 19 nt, Artificial Sequence
  Description of Artificial Sequence: Synthetic oligonucleotide
  Sense strand starting at position 648 of SEQ ID NO: 588305
cggagagaauuccuuaauu

SEQ ID NO: 909547 - RNA, 19 nt, Artificial Sequence
  Description of Artificial Sequence: Synthetic oligonucleotide
  Antisense strand to SEQ ID NO: 909546
aauuaaggaauucucuccg

SEQ ID NO: 909548 - RNA, 19 nt, Artificial Sequence
  Description of Artificial Sequence: Synthetic oligonucleotide
  Sense strand starting at position 685 of SEQ ID NO: 588305
gcuagagaucccugggauu

SEQ ID NO: 909549 - RNA, 19 nt, Artificial Sequence
  Description of Artificial Sequence: Synthetic oligonucleotide
  Antisense strand to SEQ ID NO: 909548
aaucccagggaucucuagc

SEQ ID NO: 909550 - RNA, 19 nt, Artificial Sequence
  Description of Artificial Sequence: Synthetic oligonucleotide
  Sense strand starting at position 696 of SEQ ID NO: 588305
cugggauucccuuggaguc

SEQ ID NO: 909551 - RNA, 19 nt, Artificial Sequence
  Description of Artificial Sequence: Synthetic oligonucleotide
  Antisense strand to SEQ ID NO: 909550
gacuccaagggaaucccag

SEQ ID NO: 909552 - RNA, 19 nt, Artificial Sequence
  Description of Artificial Sequence: Synthetic oligonucleotide
  Sense strand starting at position 766 of SEQ ID NO: 588305
acuccucuagcgcaauaaa

SEQ ID NO: 909553 - RNA, 19 nt, Artificial Sequence
  Description of Artificial Sequence: Synthetic oligonucleotide
  Antisense strand to SEQ ID NO: 909552
uuuauugcgcuagaggagu

SEQ ID NO: 909554 - RNA, 19 nt, Artificial Sequence
  Description of Artificial Sequence: Synthetic oligonucleotide
  Sense strand starting at position 786 of SEQ ID NO: 588305
ccucccaauucuguuggaa

SEQ ID NO: 909555 - RNA, 19 nt, Artificial Sequence
  Description of Artificial Sequence: Synthetic oligonucleotide
  Antisense strand to SEQ ID NO: 909554
uuccaacagaauugggagg

SEQ ID NO: 909556 - RNA, 19 nt, Artificial Sequence
  Description of Artificial Sequence: Synthetic oligonucleotide
  Sense strand starting at position 848 of SEQ ID NO: 588305
ggaauucccugcccugaga

SEQ ID NO: 909557 - RNA, 19 nt, Artificial Sequence
  Description of Artificial Sequence: Synthetic oligonucleotide
  Antisense strand to SEQ ID NO: 909556
ucucagggcagggaauucc

SEQ ID NO: 909558 - RNA, 19 nt, Artificial Sequence
  Description of Artificial Sequence: Synthetic oligonucleotide
  Sense strand starting at position 2349 of SEQ ID NO: 588305
ccgugcuugcaugcuuaga

SEQ ID NO: 909559 - RNA, 19 nt, Artificial Sequence
  Description of Artificial Sequence: Synthetic oligonucleotide
  Antisense strand to SEQ ID NO: 909558
ucuaagcaugcaagcacgg

SEQ ID NO: 909560 - RNA, 19 nt, Artificial Sequence
  Description of Artificial Sequence: Synthetic oligonucleotide
  Sense strand starting at position 2513 of SEQ ID NO: 588305
cugagaaauuuauagggua

SEQ ID NO: 909561 - RNA, 19 nt, Artificial Sequence
  Description of Artificial Sequence: Synthetic oligonucleotide
  Antisense strand to SEQ ID NO: 909560
uacccuauaaauuucucag

SEQ ID NO: 909562 - RNA, 19 nt, Artificial Sequence
  Description of Artificial Sequence: Synthetic oligonucleotide
  Sense strand starting at position 2543 of SEQ ID NO: 588305
cccuauauacggcaaagaa

SEQ ID NO: 909563 - RNA, 19 nt, Artificial Sequence
  Description of Artificial Sequence: Synthetic oligonucleotide
  Antisense strand to SEQ ID NO: 909562
uucuuugccguauauaggg

SEQ ID NO: 909564 - RNA, 19 nt, Artificial Sequence
  Description of Artificial Sequence: Synthetic oligonucleotide
  Sense strand starting at position 2555 of SEQ ID NO: 588305
caaagaagauccucagugu

SEQ ID NO: 909565 - RNA, 19 nt, Artificial Sequence
  Description of Artificial Sequence: Synthetic oligonucleotide
  Antisense strand to SEQ ID NO: 909564
acacugaggaucuucuuug

SEQ ID NO: 909566 - RNA, 19 nt, Artificial Sequence
  Description of Artificial Sequence: Synthetic oligonucleotide
  Sense strand starting at position 2750 of SEQ ID NO: 588305
cugugaggcuguuuaaacu

SEQ ID NO: 909567 - RNA, 19 nt, Artificial Sequence
  Description of Artificial Sequence: Synthetic oligonucleotide
  Antisense strand to SEQ ID NO: 909566
aguuuaaacagccucacag

SEQ ID NO: 909568 - RNA, 19 nt, Artificial Sequence
  Description of Artificial Sequence: Synthetic oligonucleotide
  Sense strand starting at position 2841 of SEQ ID NO: 588305
ggugguuacacagauguag

SEQ ID NO: 909569 - RNA, 19 nt, Artificial Sequence
  Description of Artificial Sequence: Synthetic oligonucleotide
  Antisense strand to SEQ ID NO: 909568
cuacaucuguguaaccacc

SEQ ID NO: 909570 - RNA, 19 nt, Artificial Sequence
  Description of Artificial Sequence: Synthetic oligonucleotide
  Sense strand starting at position 2843 of SEQ ID NO: 588305
ugguuacacagauguagaa

SEQ ID NO: 909571 - RNA, 19 nt, Artificial Sequence
  Description of Artificial Sequence: Synthetic oligonucleotide
  Antisense strand to SEQ ID NO: 909570
uucuacaucuguguaacca

SEQ ID NO: 909572 - RNA, 19 nt, Artificial Sequence
  Description of Artificial Sequence: Synthetic oligonucleotide
  Sense strand starting at position 2902 of SEQ ID NO: 588305
acaguaugucauuauaccu

SEQ ID NO: 909573 - RNA, 19 nt, Artificial Sequence
  Description of Artificial Sequence: Synthetic oligonucleotide
  Antisense strand to SEQ ID NO: 909572
agguauaaugacauacugu

SEQ ID NO: 909574 - RNA, 19 nt, Artificial Sequence
  Description of Artificial Sequence: Synthetic oligonucleotide
  Sense strand starting at position 2969 of SEQ ID NO: 588305
cuggcucgaucaucuuaca

SEQ ID NO: 909575 - RNA, 19 nt, Artificial Sequence
  Description of Artificial Sequence: Synthetic oligonucleotide
  Antisense strand to SEQ ID NO: 909574
uguaagaugaucgagccag

SEQ ID NO: 909576 - RNA, 19 nt, Artificial Sequence
  Description of Artificial Sequence: Synthetic oligonucleotide
  Sense strand starting at position 3078 of SEQ ID NO: 588305
cugagcaguucuuccuaca

SEQ ID NO: 909577 - RNA, 19 nt, Artificial Sequence
  Description of Artificial Sequence: Synthetic oligonucleotide
  Antisense strand to SEQ ID NO: 909576
uguaggaagaacugcucag

SEQ ID NO: 909578 - RNA, 19 nt, Artificial Sequence
  Description of Artificial Sequence: Synthetic oligonucleotide
  Sense strand starting at position 3161 of SEQ ID NO: 588305
cugcuaucuccaugucuua

SEQ ID NO: 909579 - RNA, 19 nt, Artificial Sequence
  Description of Artificial Sequence: Synthetic oligonucleotide
  Antisense strand to SEQ ID NO: 909578
uaagacauggagauagcag

SEQ ID NO: 909580 - RNA, 19 nt, Artificial Sequence
  Description of Artificial Sequence: Synthetic oligonucleotide
  Sense strand starting at position 3177 of SEQ ID NO: 588305
uuagucuuccgguauauuc

SEQ ID NO: 909581 - RNA, 19 nt, Artificial Sequence
  Description of Artificial Sequence: Synthetic oligonucleotide
  Antisense strand to SEQ ID NO: 909580
gaauauaccggaagacuaa

SEQ ID NO: 909582 - RNA, 19 nt, Artificial Sequence
  Description of Artificial Sequence: Synthetic oligonucleotide
  Sense strand starting at position 3179 of SEQ ID NO: 588305
agucuuccgguauauucua

SEQ ID NO: 909583 - RNA, 19 nt, Artificial Sequence
  Description of Artificial Sequence: Synthetic oligonucleotide
  Antisense strand to SEQ ID NO: 909582
uagaauauaccggaagacu

SEQ ID NO: 909584 - RNA, 19 nt, Artificial Sequence
  Description of Artificial Sequence: Synthetic oligonucleotide
  Sense strand starting at position 3186 of SEQ ID NO: 588305
cgguauauucuauacacac

SEQ ID NO: 909585 - RNA, 19 nt, Artificial Sequence
  Description of Artificial Sequence: Synthetic oligonucleotide
  Antisense strand to SEQ ID NO: 909584
guguguauagaauauaccg

SEQ ID NO: 909586 - RNA, 19 nt, Artificial Sequence
  Description of Artificial Sequence: Synthetic oligonucleotide
  Sense strand starting at position 3456 of SEQ ID NO: 588305
uucugaaauccucgaaucu

SEQ ID NO: 909587 - RNA, 19 nt, Artificial Sequence
  Description of Artificial Sequence: Synthetic oligonucleotide
  Antisense strand to SEQ ID NO: 909586
agauucgaggauuucagaa

SEQ ID NO: 909588 - RNA, 19 nt, Artificial Sequence
  Description of Artificial Sequence: Synthetic oligonucleotide
  Sense strand starting at position 3457 of SEQ ID NO: 588305
ucugaaauccucgaaucug

SEQ ID NO: 909589 - RNA, 19 nt, Artificial Sequence
  Description of Artificial Sequence: Synthetic oligonucleotide
  Antisense strand to SEQ ID NO: 909588
cagauucgaggauuucaga

SEQ ID NO: 909590 - RNA, 19 nt, Artificial Sequence
  Description of Artificial Sequence: Synthetic oligonucleotide
  Sense strand starting at position 3465 of SEQ ID NO: 588305
ccucgaaucugccuuugga

SEQ ID NO: 909591 - RNA, 19 nt, Artificial Sequence
  Description of Artificial Sequence: Synthetic oligonucleotide
  Antisense strand to SEQ ID NO: 909590
uccaaaggcagauucgagg

SEQ ID NO: 909592 - RNA, 19 nt, Artificial Sequence
  Description of Artificial Sequence: Synthetic oligonucleotide
  Sense strand starting at position 3537 of SEQ ID NO: 588305
ccauuaguauucucugucu

SEQ ID NO: 909593 - RNA, 19 nt, Artificial Sequence
  Description of Artificial Sequence: Synthetic oligonucleotide
  Antisense strand to SEQ ID NO: 909592
agacagagaauacuaaugg

SEQ ID NO: 909594 - RNA, 19 nt, Artificial Sequence
  Description of Artificial Sequence: Synthetic oligonucleotide
  Sense strand starting at position 3539 of SEQ ID NO: 588305
auuaguauucucugucuga

SEQ ID NO: 909595 - RNA, 19 nt, Artificial Sequence
  Description of Artificial Sequence: Synthetic oligonucleotide
  Antisense strand to SEQ ID NO: 909594
ucagacagagaauacuaau

SEQ ID NO: 909596 - RNA, 19 nt, Artificial Sequence
  Description of Artificial Sequence: Synthetic oligonucleotide
  Sense strand starting at position 3540 of SEQ ID NO: 588305
uuaguauucucugucugaa

SEQ ID NO: 909597 - RNA, 19 nt, Artificial Sequence
  Description of Artificial Sequence: Synthetic oligonucleotide
  Antisense strand to SEQ ID NO: 909596
uucagacagagaauacuaa

SEQ ID NO: 909598 - RNA, 19 nt, Artificial Sequence
  Description of Artificial Sequence: Synthetic oligonucleotide
  Sense strand starting at position 3572 of SEQ ID NO: 588305
agaagcuucuagcuuuaca

SEQ ID NO: 909599 - RNA, 19 nt, Artificial Sequence
  Description of Artificial Sequence: Synthetic oligonucleotide
  Antisense strand to SEQ ID NO: 909598
uguaaagcuagaagcuucu

SEQ ID NO: 909600 - RNA, 19 nt, Artificial Sequence
  Description of Artificial Sequence: Synthetic oligonucleotide
  Sense strand starting at position 3609 of SEQ ID NO: 588305
cugugaaaccagugaagcu

SEQ ID NO: 909601 - RNA, 19 nt, Artificial Sequence
  Description of Artificial Sequence: Synthetic oligonucleotide
  Antisense strand to SEQ ID NO: 909600
agcuucacugguuucacag

SEQ ID NO: 909602 - RNA, 19 nt, Artificial Sequence
  Description of Artificial Sequence: Synthetic oligonucleotide
  Sense strand starting at position 3624 of SEQ ID NO: 588305
agcucuacuccugacagga

SEQ ID NO: 909603 - RNA, 19 nt, Artificial Sequence
  Description of Artificial Sequence: Synthetic oligonucleotide
  Antisense strand to SEQ ID NO: 909602
uccugucaggaguagagcu

SEQ ID NO: 909604 - RNA, 19 nt, Artificial Sequence
  Description of Artificial Sequence: Synthetic oligonucleotide
  Sense strand starting at position 3668 of SEQ ID NO: 588305
ccuggaaacuuauaaauga

SEQ ID NO: 909605 - RNA, 19 nt, Artificial Sequence
  Description of Artificial Sequence: Synthetic oligonucleotide
  Antisense strand to SEQ ID NO: 909604
ucauuuauaaguuuccagg

SEQ ID NO: 909606 - RNA, 19 nt, Artificial Sequence
  Description of Artificial Sequence: Synthetic oligonucleotide
  Sense strand starting at position 3866 of SEQ ID NO: 588305
uccaguuucugggcuaaag

SEQ ID NO: 909607 - RNA, 19 nt, Artificial Sequence
  Description of Artificial Sequence: Synthetic oligonucleotide
  Antisense strand to SEQ ID NO: 909606
cuuuagcccagaaacugga

SEQ ID NO: 909608 - RNA, 19 nt, Artificial Sequence
  Description of Artificial Sequence: Synthetic oligonucleotide
  Sense strand starting at position 3930 of SEQ ID NO: 588305
gugcuaccacgccaaauuu

SEQ ID NO: 909609 - RNA, 19 nt, Artificial Sequence
  Description of Artificial Sequence: Synthetic oligonucleotide
  Antisense strand to SEQ ID NO: 909608
aaauuuggcgugguagcac

SEQ ID NO: 909610 - RNA, 19 nt, Artificial Sequence
  Description of Artificial Sequence: Synthetic oligonucleotide
  Sense strand starting at position 66 of SEQ ID NO: 588319
guaaaugauuagguucuaa

SEQ ID NO: 909611 - RNA, 19 nt, Artificial Sequence
  Description of Artificial Sequence: Synthetic oligonucleotide
  Antisense strand to SEQ ID NO: 909610
uuagaaccuaaucauuuac

SEQ ID NO: 909612 - RNA, 19 nt, Artificial Sequence
  Description of Artificial Sequence: Synthetic oligonucleotide
  Sense strand starting at position 149 of SEQ ID NO: 588319
uugaaauggugguuguaaa

SEQ ID NO: 909613 - RNA, 19 nt, Artificial Sequence
  Description of Artificial Sequence: Synthetic oligonucleotide
  Antisense strand to SEQ ID NO: 909612
uuuacaaccaccauuucaa

SEQ ID NO: 909614 - RNA, 19 nt, Artificial Sequence
  Description of Artificial Sequence: Synthetic oligonucleotide
  Sense strand starting at position 278 of SEQ ID NO: 588319
acagcuuuagguugagagu

SEQ ID NO: 909615 - RNA, 19 nt, Artificial Sequence
  Description of Artificial Sequence: Synthetic oligonucleotide
  Antisense strand to SEQ ID NO: 909614
acucucaaccuaaagcugu

SEQ ID NO: 909616 - RNA, 19 nt, Artificial Sequence
  Description of Artificial Sequence: Synthetic oligonucleotide
  Sense strand starting at position 287 of SEQ ID NO: 588319
gguugagagucuuuagaug

SEQ ID NO: 909617 - RNA, 19 nt, Artificial Sequence
  Description of Artificial Sequence: Synthetic oligonucleotide
  Antisense strand to SEQ ID NO: 909616
caucuaaagacucucaacc

SEQ ID NO: 909618 - RNA, 19 nt, Artificial Sequence
  Description of Artificial Sequence: Synthetic oligonucleotide
  Sense strand starting at position 318 of SEQ ID NO: 588319
uuugccuuccuagaaauga

SEQ ID NO: 909619 - RNA, 19 nt, Artificial Sequence
  Description of Artificial Sequence: Synthetic oligonucleotide
  Antisense strand to SEQ ID NO: 909618
ucauuucuaggaaggcaaa

SEQ ID NO: 909620 - RNA, 19 nt, Artificial Sequence
  Description of Artificial Sequence: Synthetic oligonucleotide
  Sense strand starting at position 335 of SEQ ID NO: 588319
gaaucuuaccgacauguuc

SEQ ID NO: 909621 - RNA, 19 nt, Artificial Sequence
  Description of Artificial Sequence: Synthetic oligonucleotide
  Antisense strand to SEQ ID NO: 909620
gaacaugucgguaagauuc

SEQ ID NO: 909622 - RNA, 19 nt, Artificial Sequence
  Description of Artificial Sequence: Synthetic oligonucleotide
  Sense strand starting at position 350 of SEQ ID NO: 588319
guuccauuaucuuuccaug

SEQ ID NO: 909623 - RNA, 19 nt, Artificial Sequence
  Description of Artificial Sequence: Synthetic oligonucleotide
  Antisense strand to SEQ ID NO: 909622
cauggaaagauaauggaac

SEQ ID NO: 909624 - RNA, 19 nt, Artificial Sequence
  Description of Artificial Sequence: Synthetic oligonucleotide
  Sense strand starting at position 693 of SEQ ID NO: 588319
agcggaauaacugggagua

SEQ ID NO: 909625 - RNA, 19 nt, Artificial Sequence
  Description of Artificial Sequence: Synthetic oligonucleotide
  Antisense strand to SEQ ID NO: 909624
uacucccaguuauuccgcu

SEQ ID NO: 909626 - RNA, 19 nt, Artificial Sequence
  Description of Artificial Sequence: Synthetic oligonucleotide
  Sense strand starting at position 694 of SEQ ID NO: 588319
gcggaauaacugggaguaa

SEQ ID NO: 909627 - RNA, 19 nt, Artificial Sequence
  Description of Artificial Sequence: Synthetic oligonucleotide
  Antisense strand to SEQ ID NO: 909626
uuacucccaguuauuccgc

SEQ ID NO: 909628 - RNA, 19 nt, Artificial Sequence
  Description of Artificial Sequence: Synthetic oligonucleotide
  Sense strand starting at position 763 of SEQ ID NO: 588319
cagguaggaacaugugauu

SEQ ID NO: 909629 - RNA, 19 nt, Artificial Sequence
  Description of Artificial Sequence: Synthetic oligonucleotide
  Antisense strand to SEQ ID NO: 909628
aaucacauguuccuaccug

SEQ ID NO: 909630 - RNA, 19 nt, Artificial Sequence
  Description of Artificial Sequence: Synthetic oligonucleotide
  Sense strand starting at position 841 of SEQ ID NO: 588319
acagcuaagccacauguua

SEQ ID NO: 909631 - RNA, 19 nt, Artificial Sequence
  Description of Artificial Sequence: Synthetic oligonucleotide
  Antisense strand to SEQ ID NO: 909630
uaacauguggcuuagcugu

SEQ ID NO: 909632 - RNA, 19 nt, Artificial Sequence
  Description of Artificial Sequence: Synthetic oligonucleotide
  Sense strand starting at position 936 of SEQ ID NO: 588319
ccaaacgaaugcuuacaga

SEQ ID NO: 909633 - RNA, 19 nt, Artificial Sequence
  Description of Artificial Sequence: Synthetic oligonucleotide
  Antisense strand to SEQ ID NO: 909632
ucuguaagcauucguuugg

SEQ ID NO: 909634 - RNA, 19 nt, Artificial Sequence
  Description of Artificial Sequence: Synthetic oligonucleotide
  Sense strand starting at position 1010 of SEQ ID NO: 588319
aauuuaaggcuguggcauu

SEQ ID NO: 909635 - RNA, 19 nt, Artificial Sequence
  Description of Artificial Sequence: Synthetic oligonucleotide
  Antisense strand to SEQ ID NO: 909634
aaugccacagccuuaaauu

SEQ ID NO: 909636 - RNA, 19 nt, Artificial Sequence
  Description of Artificial Sequence: Synthetic oligonucleotide
  Sense strand starting at position 1402 of SEQ ID NO: 588319
gcuaaacuuccuuaacguc

SEQ ID NO: 909637 - RNA, 19 nt, Artificial Sequence
  Description of Artificial Sequence: Synthetic oligonucleotide
  Antisense strand to SEQ ID NO: 909636
gacguuaaggaaguuuagc

SEQ ID NO: 909638 - RNA, 19 nt, Artificial Sequence
  Description of Artificial Sequence: Synthetic oligonucleotide
  Sense strand starting at position 1410 of SEQ ID NO: 588319
uccuuaacgucucuuagga

SEQ ID NO: 909639 - RNA, 19 nt, Artificial Sequence
  Description of Artificial Sequence: Synthetic oligonucleotide
  Antisense strand to SEQ ID NO: 909638
uccuaagagacguuaagga

SEQ ID NO: 909640 - RNA, 19 nt, Artificial Sequence
  Description of Artificial Sequence: Synthetic oligonucleotide
  Sense strand starting at position 1427 of SEQ ID NO: 588319
gagugauguccacacuacu

SEQ ID NO: 909641 - RNA, 19 nt, Artificial Sequence
  Description of Artificial Sequence: Synthetic oligonucleotide
  Antisense strand to SEQ ID NO: 909640
aguaguguggacaucacuc

SEQ ID NO: 909642 - RNA, 19 nt, Artificial Sequence
  Description of Artificial Sequence: Synthetic oligonucleotide
  Sense strand starting at position 1665 of SEQ ID NO: 588319
uuuaucuugguguaaagcu

SEQ ID NO: 909643 - RNA, 19 nt, Artificial Sequence
  Description of Artificial Sequence: Synthetic oligonucleotide
  Antisense strand to SEQ ID NO: 909642
agcuuuacaccaagauaaa

SEQ ID NO: 909644 - RNA, 19 nt, Artificial Sequence
  Description of Artificial Sequence: Synthetic oligonucleotide
  Sense strand starting at position 1672 of SEQ ID NO: 588319
ugguguaaagcuuaucuaa

SEQ ID NO: 909645 - RNA, 19 nt, Artificial Sequence
  Description of Artificial Sequence: Synthetic oligonucleotide
  Antisense strand to SEQ ID NO: 909644
uuagauaagcuuuacacca

SEQ ID NO: 909646 - RNA, 19 nt, Artificial Sequence
  Description of Artificial Sequence: Synthetic oligonucleotide
  Sense strand starting at position 1674 of SEQ ID NO: 588319
guguaaagcuuaucuaaua

SEQ ID NO: 909647 - RNA, 19 nt, Artificial Sequence
  Description of Artificial Sequence: Synthetic oligonucleotide
  Antisense strand to SEQ ID NO: 909646
uauuagauaagcuuuacac

SEQ ID NO: 909648 - RNA, 19 nt, Artificial Sequence
  Description of Artificial Sequence: Synthetic oligonucleotide
  Sense strand starting at position 1835 of SEQ ID NO: 588319
aguuaccuccugcaguaaa

SEQ ID NO: 909649 - RNA, 19 nt, Artificial Sequence
  Description of Artificial Sequence: Synthetic oligonucleotide
  Antisense strand to SEQ ID NO: 909648
uuuacugcaggagguaacu

SEQ ID NO: 909650 - RNA, 19 nt, Artificial Sequence
  Description of Artificial Sequence: Synthetic oligonucleotide
  Sense strand starting at position 2050 of SEQ ID NO: 588319
gugguuucgaaguaauaag

SEQ ID NO: 909651 - RNA, 19 nt, Artificial Sequence
  Description of Artificial Sequence: Synthetic oligonucleotide
  Antisense strand to SEQ ID NO: 909650
cuuauuacuucgaaaccac

SEQ ID NO: 909652 - RNA, 19 nt, Artificial Sequence
  Description of Artificial Sequence: Synthetic oligonucleotide
  Sense strand starting at position 2128 of SEQ ID NO: 588319
cugugcugugugaggaagu

SEQ ID NO: 909653 - RNA, 19 nt, Artificial Sequence
  Description of Artificial Sequence: Synthetic oligonucleotide
  Antisense strand to SEQ ID NO: 909652
acuuccucacacagcacag

SEQ ID NO: 909654 - RNA, 19 nt, Artificial Sequence
  Description of Artificial Sequence: Synthetic oligonucleotide
  Sense strand starting at position 2212 of SEQ ID NO: 588319
ucucauuugucagauuuau

SEQ ID NO: 909655 - RNA, 19 nt, Artificial Sequence
  Description of Artificial Sequence: Synthetic oligonucleotide
  Antisense strand to SEQ ID NO: 909654
auaaaucugacaaaugaga

SEQ ID NO: 909656 - RNA, 19 nt, Artificial Sequence
  Description of Artificial Sequence: Synthetic oligonucleotide
  Sense strand starting at position 2249 of SEQ ID NO: 588319
ggcauuuagugcucaaaua

SEQ ID NO: 909657 - RNA, 19 nt, Artificial Sequence
  Description of Artificial Sequence: Synthetic oligonucleotide
  Antisense strand to SEQ ID NO: 909656
uauuugagcacuaaaugcc

SEQ ID NO: 909658 - RNA, 19 nt, Artificial Sequence
  Description of Artificial Sequence: Synthetic oligonucleotide
  Sense strand starting at position 2810 of SEQ ID NO: 588319
guucuauaucuugacugag

SEQ ID NO: 909659 - RNA, 19 nt, Artificial Sequence
  Description of Artificial Sequence: Synthetic oligonucleotide
  Antisense strand to SEQ ID NO: 909658
cucagucaagauauagaac

SEQ ID NO: 909660 - RNA, 19 nt, Artificial Sequence
  Description of Artificial Sequence: Synthetic oligonucleotide
  Sense strand starting at position 2812 of SEQ ID NO: 588319
ucuauaucuugacugagga

SEQ ID NO: 909661 - RNA, 19 nt, Artificial Sequence
  Description of Artificial Sequence: Synthetic oligonucleotide
  Antisense strand to SEQ ID NO: 909660
uccucagucaagauauaga

SEQ ID NO: 909662 - RNA, 19 nt, Artificial Sequence
  Description of Artificial Sequence: Synthetic oligonucleotide
  Sense strand starting at position 3051 of SEQ ID NO: 588319
uuuggaugagacugaguca

SEQ ID NO: 909663 - RNA, 19 nt, Artificial Sequence
  Description of Artificial Sequence: Synthetic oligonucleotide
  Antisense strand to SEQ ID NO: 909662
ugacucagucucauccaaa

SEQ ID NO: 909664 - RNA, 19 nt, Artificial Sequence
  Description of Artificial Sequence: Synthetic oligonucleotide
  Sense strand starting at position 3120 of SEQ ID NO: 588319
ucuauuauguacccuaagu

SEQ ID NO: 909665 - RNA, 19 nt, Artificial Sequence
  Description of Artificial Sequence: Synthetic oligonucleotide
  Antisense strand to SEQ ID NO: 909664
acuuaggguacauaauaga

SEQ ID NO: 909666 - RNA, 19 nt, Artificial Sequence
  Description of Artificial Sequence: Synthetic oligonucleotide
  Sense strand starting at position 3158 of SEQ ID NO: 588319
gagggauauugucugaugu

SEQ ID NO: 909667 - RNA, 19 nt, Artificial Sequence
  Description of Artificial Sequence: Synthetic oligonucleotide
  Antisense strand to SEQ ID NO: 909666
acaucagacaauaucccuc

SEQ ID NO: 909668 - RNA, 19 nt, Artificial Sequence
  Description of Artificial Sequence: Synthetic oligonucleotide
  Sense strand starting at position 3159 of SEQ ID NO: 588319
agggauauugucugauguc

SEQ ID NO: 909669 - RNA, 19 nt, Artificial Sequence
  Description of Artificial Sequence: Synthetic oligonucleotide
  Antisense strand to SEQ ID NO: 909668
gacaucagacaauaucccu

SEQ ID NO: 909670 - RNA, 19 nt, Artificial Sequence
  Description of Artificial Sequence: Synthetic oligonucleotide
  Sense strand starting at position 3165 of SEQ ID NO: 588319
auugucugauguccagaca

SEQ ID NO: 909671 - RNA, 19 nt, Artificial Sequence
  Description of Artificial Sequence: Synthetic oligonucleotide
  Antisense strand to SEQ ID NO: 909670
ugucuggacaucagacaau

SEQ ID NO: 909672 - RNA, 19 nt, Artificial Sequence
  Description of Artificial Sequence: Synthetic oligonucleotide
  Sense strand starting at position 3168 of SEQ ID NO: 588319
gucugauguccagacacag

SEQ ID NO: 909673 - RNA, 19 nt, Artificial Sequence
  Description of Artificial Sequence: Synthetic oligonucleotide
  Antisense strand to SEQ ID NO: 909672
cugugucuggacaucagac

SEQ ID NO: 909674 - RNA, 19 nt, Artificial Sequence
  Description of Artificial Sequence: Synthetic oligonucleotide
  Sense strand starting at position 3282 of SEQ ID NO: 588319
uugaccaaucgcuaaguaa

SEQ ID NO: 909675 - RNA, 19 nt, Artificial Sequence
  Description of Artificial Sequence: Synthetic oligonucleotide
  Antisense strand to SEQ ID NO: 909674
uuacuuagcgauuggucaa

SEQ ID NO: 909676 - RNA, 19 nt, Artificial Sequence
  Description of Artificial Sequence: Synthetic oligonucleotide
  Sense strand starting at position 3411 of SEQ ID NO: 588319
gcugaagaauaccuuggau

SEQ ID NO: 909677 - RNA, 19 nt, Artificial Sequence
  Description of Artificial Sequence: Synthetic oligonucleotide
  Antisense strand to SEQ ID NO: 909676
auccaagguauucuucagc

SEQ ID NO: 909678 - RNA, 19 nt, Artificial Sequence
  Description of Artificial Sequence: Synthetic oligonucleotide
  Sense strand starting at position 3483 of SEQ ID NO: 588319
agaugcaaucuuugauauc

SEQ ID NO: 909679 - RNA, 19 nt, Artificial Sequence
  Description of Artificial Sequence: Synthetic oligonucleotide
  Antisense strand to SEQ ID NO: 909678
gauaucaaagauugcaucu

SEQ ID NO: 909680 - RNA, 19 nt, Artificial Sequence
  Description of Artificial Sequence: Synthetic oligonucleotide
  Sense strand starting at position 3753 of SEQ ID NO: 588319
augugaggaugucugguau

SEQ ID NO: 909681 - RNA, 19 nt, Artificial Sequence
  Description of Artificial Sequence: Synthetic oligonucleotide
  Antisense strand to SEQ ID NO: 909680
auaccagacauccucacau

SEQ ID NO: 909682 - RNA, 19 nt, Artificial Sequence
  Description of Artificial Sequence: Synthetic oligonucleotide
  Sense strand starting at position 3760 of SEQ ID NO: 588319
gaugucugguaucugacua

SEQ ID NO: 909683 - RNA, 19 nt, Artificial Sequence
  Description of Artificial Sequence: Synthetic oligonucleotide
  Antisense strand to SEQ ID NO: 909682
uagucagauaccagacauc

SEQ ID NO: 909684 - RNA, 19 nt, Artificial Sequence
  Description of Artificial Sequence: Synthetic oligonucleotide
  Sense strand starting at position 3764 of SEQ ID NO: 588319
ucugguaucugacuagaau

SEQ ID NO: 909685 - RNA, 19 nt, Artificial Sequence
  Description of Artificial Sequence: Synthetic oligonucleotide
  Antisense strand to SEQ ID NO: 909684
auucuagucagauaccaga

SEQ ID NO: 909686 - RNA, 19 nt, Artificial Sequence
  Description of Artificial Sequence: Synthetic oligonucleotide
  Sense strand starting at position 3878 of SEQ ID NO: 588319
agaacuguuguaugaauac

SEQ ID NO: 909687 - RNA, 19 nt, Artificial Sequence
  Description of Artificial Sequence: Synthetic oligonucleotide
  Antisense strand to SEQ ID NO: 909686
guauucauacaacaguucu

SEQ ID NO: 909688 - RNA, 19 nt, Artificial Sequence
  Description of Artificial Sequence: Synthetic oligonucleotide
  Sense strand starting at position 3929 of SEQ ID NO: 588319
aggaauucccaaugauugu

SEQ ID NO: 909689 - RNA, 19 nt, Artificial Sequence
  Description of Artificial Sequence: Synthetic oligonucleotide
  Antisense strand to SEQ ID NO: 909688
acaaucauugggaauuccu

SEQ ID NO: 909690 - RNA, 19 nt, Artificial Sequence
  Description of Artificial Sequence: Synthetic oligonucleotide
  Sense strand starting at position 22 of SEQ ID NO: 588320
caagacugccuguaggauu

SEQ ID NO: 909691 - RNA, 19 nt, Artificial Sequence
  Description of Artificial Sequence: Synthetic oligonucleotide
  Antisense strand to SEQ ID NO: 909690
aauccuacaggcagucuug

SEQ ID NO: 909692 - RNA, 19 nt, Artificial Sequence
  Description of Artificial Sequence: Synthetic oligonucleotide
  Sense strand starting at position 33 of SEQ ID NO: 588320
guaggauuaguccgggucu

SEQ ID NO: 909693 - RNA, 19 nt, Artificial Sequence
  Description of Artificial Sequence: Synthetic oligonucleotide
  Antisense strand to SEQ ID NO: 909692
agacccggacuaauccuac

SEQ ID NO: 909694 - RNA, 19 nt, Artificial Sequence
  Description of Artificial Sequence: Synthetic oligonucleotide
  Sense strand starting at position 188 of SEQ ID NO: 588320
ucaguuugauucccuauac

SEQ ID NO: 909695 - RNA, 19 nt, Artificial Sequence
  Description of Artificial Sequence: Synthetic oligonucleotide
  Antisense strand to SEQ ID NO: 909694
guauagggaaucaaacuga

SEQ ID NO: 909696 - RNA, 19 nt, Artificial Sequence
  Description of Artificial Sequence: Synthetic oligonucleotide
  Sense strand starting at position 240 of SEQ ID NO: 588320
agcuaugaaccuuaaugua

SEQ ID NO: 909697 - RNA, 19 nt, Artificial Sequence
  Description of Artificial Sequence: Synthetic oligonucleotide
  Antisense strand to SEQ ID NO: 909696
uacauuaagguucauagcu

SEQ ID NO: 909698 - RNA, 19 nt, Artificial Sequence
  Description of Artificial Sequence: Synthetic oligonucleotide
  Sense strand starting at position 732 of SEQ ID NO: 588320
cuggcagucacguaucaag

SEQ ID NO: 909699 - RNA, 19 nt, Artificial Sequence
  Description of Artificial Sequence: Synthetic oligonucleotide
  Antisense strand to SEQ ID NO: 909698
cuugauacgugacugccag

SEQ ID NO: 909700 - RNA, 19 nt, Artificial Sequence
  Description of Artificial Sequence: Synthetic oligonucleotide
  Sense strand starting at position 739 of SEQ ID NO: 588320
ucacguaucaaguggaaau

SEQ ID NO: 909701 - RNA, 19 nt, Artificial Sequence
  Description of Artificial Sequence: Synthetic oligonucleotide
  Antisense strand to SEQ ID NO: 909700
auuuccacuugauacguga

SEQ ID NO: 909702 - RNA, 19 nt, Artificial Sequence
  Description of Artificial Sequence: Synthetic oligonucleotide
  Sense strand starting at position 764 of SEQ ID NO: 588320
gucaauaaagcucgauaug

SEQ ID NO: 909703 - RNA, 19 nt, Artificial Sequence
  Description of Artificial Sequence: Synthetic oligonucleotide
  Antisense strand to SEQ ID NO: 909702
cauaucgagcuuuauugac

SEQ ID NO: 909704 - RNA, 19 nt, Artificial Sequence
  Description of Artificial Sequence: Synthetic oligonucleotide
  Sense strand starting at position 776 of SEQ ID NO: 588320
cgauaugcccucuagaaga

SEQ ID NO: 909705 - RNA, 19 nt, Artificial Sequence
  Description of Artificial Sequence: Synthetic oligonucleotide
  Antisense strand to SEQ ID NO: 909704
ucuucuagagggcauaucg

SEQ ID NO: 909706 - RNA, 19 nt, Artificial Sequence
  Description of Artificial Sequence: Synthetic oligonucleotide
  Sense strand starting at position 894 of SEQ ID NO: 588320
ggcucagcuaagugaagau

SEQ ID NO: 909707 - RNA, 19 nt, Artificial Sequence
  Description of Artificial Sequence: Synthetic oligonucleotide
  Antisense strand to SEQ ID NO: 909706
aucuucacuuagcugagcc

SEQ ID NO: 909708 - RNA, 19 nt, Artificial Sequence
  Description of Artificial Sequence: Synthetic oligonucleotide
  Sense strand starting at position 928 of SEQ ID NO: 588320
cccugugggcaauagaaua

SEQ ID NO: 909709 - RNA, 19 nt, Artificial Sequence
  Description of Artificial Sequence: Synthetic oligonucleotide
  Antisense strand to SEQ ID NO: 909708
uauucuauugcccacaggg

SEQ ID NO: 909710 - RNA, 19 nt, Artificial Sequence
  Description of Artificial Sequence: Synthetic oligonucleotide
  Sense strand starting at position 936 of SEQ ID NO: 588320
gcaauagaauaaguugaca

SEQ ID NO: 909711 - RNA, 19 nt, Artificial Sequence
  Description of Artificial Sequence: Synthetic oligonucleotide
  Antisense strand to SEQ ID NO: 909710
ugucaacuuauucuauugc

SEQ ID NO: 909712 - RNA, 19 nt, Artificial Sequence
  Description of Artificial Sequence: Synthetic oligonucleotide
  Sense strand starting at position 951 of SEQ ID NO: 588320
gacacuuuagaaugaguuu

SEQ ID NO: 909713 - RNA, 19 nt, Artificial Sequence
  Description of Artificial Sequence: Synthetic oligonucleotide
  Antisense strand to SEQ ID NO: 909712
aaacucauucuaaaguguc

SEQ ID NO: 909714 - RNA, 19 nt, Artificial Sequence
  Description of Artificial Sequence: Synthetic oligonucleotide
  Sense strand starting at position 995 of SEQ ID NO: 588320
uagcuuucucagggcaaga

SEQ ID NO: 909715 - RNA, 19 nt, Artificial Sequence
  Description of Artificial Sequence: Synthetic oligonucleotide
  Antisense strand to SEQ ID NO: 909714
ucuugcccugagaaagcua

SEQ ID NO: 909716 - RNA, 19 nt, Artificial Sequence
  Description of Artificial Sequence: Synthetic oligonucleotide
  Sense strand starting at position 997 of SEQ ID NO: 588320
gcuuucucagggcaagaca

SEQ ID NO: 909717 - RNA, 19 nt, Artificial Sequence
  Description of Artificial Sequence: Synthetic oligonucleotide
  Antisense strand to SEQ ID NO: 909716
ugucuugcccugagaaagc

SEQ ID NO: 909718 - RNA, 19 nt, Artificial Sequence
  Description of Artificial Sequence: Synthetic oligonucleotide
  Sense strand starting at position 1081 of SEQ ID NO: 588320
ugagaacuuugagcaguaa

SEQ ID NO: 909719 - RNA, 19 nt, Artificial Sequence
  Description of Artificial Sequence: Synthetic oligonucleotide
  Antisense strand to SEQ ID NO: 909718
uuacugcucaaaguucuca

SEQ ID NO: 909720 - RNA, 19 nt, Artificial Sequence
  Description of Artificial Sequence: Synthetic oligonucleotide
  Sense strand starting at position 1092 of SEQ ID NO: 588320
agcaguaaaugugcuuaca

SEQ ID NO: 909721 - RNA, 19 nt, Artificial Sequence
  Description of Artificial Sequence: Synthetic oligonucleotide
  Antisense strand to SEQ ID NO: 909720
uguaagcacauuuacugcu

SEQ ID NO: 909722 - RNA, 19 nt, Artificial Sequence
  Description of Artificial Sequence: Synthetic oligonucleotide
  Sense strand starting at position 1095 of SEQ ID NO: 588320
aguaaaugugcuuacauau

SEQ ID NO: 909723 - RNA, 19 nt, Artificial Sequence
  Description of Artificial Sequence: Synthetic oligonucleotide
  Antisense strand to SEQ ID NO: 909722
auauguaagcacauuuacu

SEQ ID NO: 909724 - RNA, 19 nt, Artificial Sequence
  Description of Artificial Sequence: Synthetic oligonucleotide
  Sense strand starting at position 1102 of SEQ ID NO: 588320
gugcuuacauauuuaguuu

SEQ ID NO: 909725 - RNA, 19 nt, Artificial Sequence
  Description of Artificial Sequence: Synthetic oligonucleotide
  Antisense strand to SEQ ID NO: 909724
aaacuaaauauguaagcac

SEQ ID NO: 909726 - RNA, 19 nt, Artificial Sequence
  Description of Artificial Sequence: Synthetic oligonucleotide
  Sense strand starting at position 1108 of SEQ ID NO: 588320
acauauuuaguuugugcaa

SEQ ID NO: 909727 - RNA, 19 nt, Artificial Sequence
  Description of Artificial Sequence: Synthetic oligonucleotide
  Antisense strand to SEQ ID NO: 909726
uugcacaaacuaaauaugu

SEQ ID NO: 909728 - RNA, 19 nt, Artificial Sequence
  Description of Artificial Sequence: Synthetic oligonucleotide
  Sense strand starting at position 1121 of SEQ ID NO: 588320
gugcaacuuugauuaggaa

SEQ ID NO: 909729 - RNA, 19 nt, Artificial Sequence
  Description of Artificial Sequence: Synthetic oligonucleotide
  Antisense strand to SEQ ID NO: 909728
uuccuaaucaaaguugcac

SEQ ID NO: 909730 - RNA, 19 nt, Artificial Sequence
  Description of Artificial Sequence: Synthetic oligonucleotide
  Sense strand starting at position 1134 of SEQ ID NO: 588320
uaggaauuggauggugagu

SEQ ID NO: 909731 - RNA, 19 nt, Artificial Sequence
  Description of Artificial Sequence: Synthetic oligonucleotide
  Antisense strand to SEQ ID NO: 909730
acucaccauccaauuccua

SEQ ID NO: 909732 - RNA, 19 nt, Artificial Sequence
  Description of Artificial Sequence: Synthetic oligonucleotide
  Sense strand starting at position 1179 of SEQ ID NO: 588320
gcuggaguucuguaaaucu

SEQ ID NO: 909733 - RNA, 19 nt, Artificial Sequence
  Description of Artificial Sequence: Synthetic oligonucleotide
  Antisense strand to SEQ ID NO: 909732
agauuuacagaacuccagc

SEQ ID NO: 909734 - RNA, 19 nt, Artificial Sequence
  Description of Artificial Sequence: Synthetic oligonucleotide
  Sense strand starting at position 1316 of SEQ ID NO: 588320
gagccaagcucuuucugga

SEQ ID NO: 909735 - RNA, 19 nt, Artificial Sequence
  Description of Artificial Sequence: Synthetic oligonucleotide
  Antisense strand to SEQ ID NO: 909734
uccagaaagagcuuggcuc

SEQ ID NO: 909736 - RNA, 19 nt, Artificial Sequence
  Description of Artificial Sequence: Synthetic oligonucleotide
  Sense strand starting at position 1437 of SEQ ID NO: 588320
cgcucagacuugccucaaa

SEQ ID NO: 909737 - RNA, 19 nt, Artificial Sequence
  Description of Artificial Sequence: Synthetic oligonucleotide
  Antisense strand to SEQ ID NO: 909736
uuugaggcaagucugagcg

SEQ ID NO: 909738 - RNA, 19 nt, Artificial Sequence
  Description of Artificial Sequence: Synthetic oligonucleotide
  Sense strand starting at position 1453 of SEQ ID NO: 588320
aaaggaaggagccguuuau

SEQ ID NO: 909739 - RNA, 19 nt, Artificial Sequence
  Description of Artificial Sequence: Synthetic oligonucleotide
  Antisense strand to SEQ ID NO: 909738
auaaacggcuccuuccuuu

SEQ ID NO: 909740 - RNA, 19 nt, Artificial Sequence
  Description of Artificial Sequence: Synthetic oligonucleotide
  Sense strand starting at position 1457 of SEQ ID NO: 588320
gaaggagccguuuaugaga

SEQ ID NO: 909741 - RNA, 19 nt, Artificial Sequence
  Description of Artificial Sequence: Synthetic oligonucleotide
  Antisense strand to SEQ ID NO: 909740
ucucauaaacggcuccuuc

SEQ ID NO: 909742 - RNA, 19 nt, Artificial Sequence
  Description of Artificial Sequence: Synthetic oligonucleotide
  Sense strand starting at position 1828 of SEQ ID NO: 588320
gcgucuuaccuguugaucu

SEQ ID NO: 909743 - RNA, 19 nt, Artificial Sequence
  Description of Artificial Sequence: Synthetic oligonucleotide
  Antisense strand to SEQ ID NO: 909742
agaucaacagguaagacgc

SEQ ID NO: 909744 - RNA, 19 nt, Artificial Sequence
  Description of Artificial Sequence: Synthetic oligonucleotide
  Sense strand starting at position 2363 of SEQ ID NO: 588320
gguguuauuaaggguugac

SEQ ID NO: 909745 - RNA, 19 nt, Artificial Sequence
  Description of Artificial Sequence: Synthetic oligonucleotide
  Antisense strand to SEQ ID NO: 909744
gucaacccuuaauaacacc

SEQ ID NO: 909746 - RNA, 19 nt, Artificial Sequence
  Description of Artificial Sequence: Synthetic oligonucleotide
  Sense strand starting at position 2621 of SEQ ID NO: 588320
cgcugcguccagguuuauu

SEQ ID NO: 909747 - RNA, 19 nt, Artificial Sequence
  Description of Artificial Sequence: Synthetic oligonucleotide
  Antisense strand to SEQ ID NO: 909746
aauaaaccuggacgcagcg

SEQ ID NO: 909748 - RNA, 19 nt, Artificial Sequence
  Description of Artificial Sequence: Synthetic oligonucleotide
  Sense strand starting at position 2781 of SEQ ID NO: 588320
ucgagcacucuccauauaa

SEQ ID NO: 909749 - RNA, 19 nt, Artificial Sequence
  Description of Artificial Sequence: Synthetic oligonucleotide
  Antisense strand to SEQ ID NO: 909748
uuauauggagagugcucga

SEQ ID NO: 909750 - RNA, 19 nt, Artificial Sequence
  Description of Artificial Sequence: Synthetic oligonucleotide
  Sense strand starting at position 3217 of SEQ ID NO: 588320
gcauuaugguuagucugaa

SEQ ID NO: 909751 - RNA, 19 nt, Artificial Sequence
  Description of Artificial Sequence: Synthetic oligonucleotide
  Antisense strand to SEQ ID NO: 909750
uucagacuaaccauaaugc

SEQ ID NO: 909752 - RNA, 19 nt, Artificial Sequence
  Description of Artificial Sequence: Synthetic oligonucleotide
  Sense strand starting at position 3218 of SEQ ID NO: 588320
cauuaugguuagucugaau

SEQ ID NO: 909753 - RNA, 19 nt, Artificial Sequence
  Description of Artificial Sequence: Synthetic oligonucleotide
  Antisense strand to SEQ ID NO: 909752
auucagacuaaccauaaug

SEQ ID NO: 909754 - RNA, 19 nt, Artificial Sequence
  Description of Artificial Sequence: Synthetic oligonucleotide
  Sense strand starting at position 3239 of SEQ ID NO: 588320
cccacugcuggauguguaa

SEQ ID NO: 909755 - RNA, 19 nt, Artificial Sequence
  Description of Artificial Sequence: Synthetic oligonucleotide
  Antisense strand to SEQ ID NO: 909754
uuacacauccagcaguggg

SEQ ID NO: 909756 - RNA, 19 nt, Artificial Sequence
  Description of Artificial Sequence: Synthetic oligonucleotide
  Sense strand starting at position 3336 of SEQ ID NO: 588320
guuaaaugauacuuuggau

SEQ ID NO: 909757 - RNA, 19 nt, Artificial Sequence
  Description of Artificial Sequence: Synthetic oligonucleotide
  Antisense strand to SEQ ID NO: 909756
auccaaaguaucauuuaac

SEQ ID NO: 909758 - RNA, 19 nt, Artificial Sequence
  Description of Artificial Sequence: Synthetic oligonucleotide
  Sense strand starting at position 3451 of SEQ ID NO: 588320
ucacauuugugagccucau

SEQ ID NO: 909759 - RNA, 19 nt, Artificial Sequence
  Description of Artificial Sequence: Synthetic oligonucleotide
  Antisense strand to SEQ ID NO: 909758
augaggcucacaaauguga

SEQ ID NO: 909760 - RNA, 19 nt, Artificial Sequence
  Description of Artificial Sequence: Synthetic oligonucleotide
  Sense strand starting at position 3457 of SEQ ID NO: 588320
uugugagccucauuauauu

SEQ ID NO: 909761 - RNA, 19 nt, Artificial Sequence
  Description of Artificial Sequence: Synthetic oligonucleotide
  Antisense strand to SEQ ID NO: 909760
aauauaaugaggcucacaa

SEQ ID NO: 909762 - RNA, 19 nt, Artificial Sequence
  Description of Artificial Sequence: Synthetic oligonucleotide
  Sense strand starting at position 3584 of SEQ ID NO: 588320
agcugugucagguaguuua

SEQ ID NO: 909763 - RNA, 19 nt, Artificial Sequence
  Description of Artificial Sequence: Synthetic oligonucleotide
  Antisense strand to SEQ ID NO: 909762
uaaacuaccugacacagcu

SEQ ID NO: 909764 - RNA, 19 nt, Artificial Sequence
  Description of Artificial Sequence: Synthetic oligonucleotide
  Sense strand starting at position 3795 of SEQ ID NO: 588320
auuggaauuuaugagcaaa

SEQ ID NO: 909765 - RNA, 19 nt, Artificial Sequence
  Description of Artificial Sequence: Synthetic oligonucleotide
  Antisense strand to SEQ ID NO: 909764
uuugcucauaaauuccaau

SEQ ID NO: 909766 - RNA, 19 nt, Artificial Sequence
  Description of Artificial Sequence: Synthetic oligonucleotide
  Sense strand starting at position 3836 of SEQ ID NO: 588320
gagaacaaauguguaagua

SEQ ID NO: 909767 - RNA, 19 nt, Artificial Sequence
  Description of Artificial Sequence: Synthetic oligonucleotide
  Antisense strand to SEQ ID NO: 909766
uacuuacacauuuguucuc

SEQ ID NO: 909768 - RNA, 19 nt, Artificial Sequence
  Description of Artificial Sequence: Synthetic oligonucleotide
  Sense strand starting at position 3952 of SEQ ID NO: 588320
cucugaauuucugaauguu

SEQ ID NO: 909769 - RNA, 19 nt, Artificial Sequence
  Description of Artificial Sequence: Synthetic oligonucleotide
  Antisense strand to SEQ ID NO: 909768
aacauucagaaauucagag

SEQ ID NO: 909770 - RNA, 19 nt, Artificial Sequence
  Description of Artificial Sequence: Synthetic oligonucleotide
  Sense strand starting at position 42 of SEQ ID NO: 588345
gccaaucaccacuguugua

SEQ ID NO: 909771 - RNA, 19 nt, Artificial Sequence
  Description of Artificial Sequence: Synthetic oligonucleotide
  Antisense strand to SEQ ID NO: 909770
uacaacaguggugauuggc

SEQ ID NO: 909772 - RNA, 19 nt, Artificial Sequence
  Description of Artificial Sequence: Synthetic oligonucleotide
  Sense strand starting at position 52 of SEQ ID NO: 588345
acuguuguacuuuaggcaa

SEQ ID NO: 909773 - RNA, 19 nt, Artificial Sequence
  Description of Artificial Sequence: Synthetic oligonucleotide
  Antisense strand to SEQ ID NO: 909772
uugccuaaaguacaacagu

SEQ ID NO: 909774 - RNA, 19 nt, Artificial Sequence
  Description of Artificial Sequence: Synthetic oligonucleotide
  Sense strand starting at position 55 of SEQ ID NO: 588345
guuguacuuuaggcaaaua

SEQ ID NO: 909775 - RNA, 19 nt, Artificial Sequence
  Description of Artificial Sequence: Synthetic oligonucleotide
  Antisense strand to SEQ ID NO: 909774
uauuugccuaaaguacaac

SEQ ID NO: 909776 - RNA, 19 nt, Artificial Sequence
  Description of Artificial Sequence: Synthetic oligonucleotide
  Sense strand starting at position 66 of SEQ ID NO: 588345
ggcaaauaaucaggccaaa

SEQ ID NO: 909777 - RNA, 19 nt, Artificial Sequence
  Description of Artificial Sequence: Synthetic oligonucleotide
  Antisense strand to SEQ ID NO: 909776
uuuggccugauuauuugcc

SEQ ID NO: 909778 - RNA, 19 nt, Artificial Sequence
  Description of Artificial Sequence: Synthetic oligonucleotide
  Sense strand starting at position 110 of SEQ ID NO: 588345
guaaauuggucuuaccaag

SEQ ID NO: 909779 - RNA, 19 nt, Artificial Sequence
  Description of Artificial Sequence: Synthetic oligonucleotide
  Antisense strand to SEQ ID NO: 909778
cuugguaagaccaauuuac

SEQ ID NO: 909780 - RNA, 19 nt, Artificial Sequence
  Description of Artificial Sequence: Synthetic oligonucleotide
  Sense strand starting at position 186 of SEQ ID NO: 588345
cagcauaccuguuacugga

SEQ ID NO: 909781 - RNA, 19 nt, Artificial Sequence
  Description of Artificial Sequence: Synthetic oligonucleotide
  Antisense strand to SEQ ID NO: 909780
uccaguaacagguaugcug

SEQ ID NO: 909782 - RNA, 19 nt, Artificial Sequence
  Description of Artificial Sequence: Synthetic oligonucleotide
  Sense strand starting at position 188 of SEQ ID NO: 588345
gcauaccuguuacuggauu

SEQ ID NO: 909783 - RNA, 19 nt, Artificial Sequence
  Description of Artificial Sequence: Synthetic oligonucleotide
  Antisense strand to SEQ ID NO: 909782
aauccaguaacagguaugc

SEQ ID NO: 909784 - RNA, 19 nt, Artificial Sequence
  Description of Artificial Sequence: Synthetic oligonucleotide
  Sense strand starting at position 199 of SEQ ID NO: 588345
acuggauucuagcccugau

SEQ ID NO: 909785 - RNA, 19 nt, Artificial Sequence
  Description of Artificial Sequence: Synthetic oligonucleotide
  Antisense strand to SEQ ID NO: 909784
aucagggcuagaauccagu

SEQ ID NO: 909786 - RNA, 19 nt, Artificial Sequence
  Description of Artificial Sequence: Synthetic oligonucleotide
  Sense strand starting at position 202 of SEQ ID NO: 588345
ggauucuagcccugaucau

SEQ ID NO: 909787 - RNA, 19 nt, Artificial Sequence
  Description of Artificial Sequence: Synthetic oligonucleotide
  Antisense strand to SEQ ID NO: 909786
augaucagggcuagaaucc

SEQ ID NO: 909788 - RNA, 19 nt, Artificial Sequence
  Description of Artificial Sequence: Synthetic oligonucleotide
  Sense strand starting at position 209 of SEQ ID NO: 588345
agcccugaucauuguauuu

SEQ ID NO: 909789 - RNA, 19 nt, Artificial Sequence
  Description of Artificial Sequence: Synthetic oligonucleotide
  Antisense strand to SEQ ID NO: 909788
aaauacaaugaucagggcu

SEQ ID NO: 909790 - RNA, 19 nt, Artificial Sequence
  Description of Artificial Sequence: Synthetic oligonucleotide
  Sense strand starting at position 245 of SEQ ID NO: 588345
uggacuaaauccugaacaa

SEQ ID NO: 909791 - RNA, 19 nt, Artificial Sequence
  Description of Artificial Sequence: Synthetic oligonucleotide
  Antisense strand to SEQ ID NO: 909790
uuguucaggauuuagucca

SEQ ID NO: 909792 - RNA, 19 nt, Artificial Sequence
  Description of Artificial Sequence: Synthetic oligonucleotide
  Sense strand starting at position 688 of SEQ ID NO: 588345
guuauaguccuauguguua

SEQ ID NO: 909793 - RNA, 19 nt, Artificial Sequence
  Description of Artificial Sequence: Synthetic oligonucleotide
  Antisense strand to SEQ ID NO: 909792
uaacacauaggacuauaac

SEQ ID NO: 909794 - RNA, 19 nt, Artificial Sequence
  Description of Artificial Sequence: Synthetic oligonucleotide
  Sense strand starting at position 695 of SEQ ID NO: 588345
uccuauguguuacuucuga

SEQ ID NO: 909795 - RNA, 19 nt, Artificial Sequence
  Description of Artificial Sequence: Synthetic oligonucleotide
  Antisense strand to SEQ ID NO: 909794
ucagaaguaacacauagga

SEQ ID NO: 909796 - RNA, 19 nt, Artificial Sequence
  Description of Artificial Sequence: Synthetic oligonucleotide
  Sense strand starting at position 761 of SEQ ID NO: 588345
ggugacagcaguuguauaa

SEQ ID NO: 909797 - RNA, 19 nt, Artificial Sequence
  Description of Artificial Sequence: Synthetic oligonucleotide
  Antisense strand to SEQ ID NO: 909796
uuauacaacugcugucacc

SEQ ID NO: 909798 - RNA, 19 nt, Artificial Sequence
  Description of Artificial Sequence: Synthetic oligonucleotide
  Sense strand starting at position 765 of SEQ ID NO: 588345
acagcaguuguauaaauua

SEQ ID NO: 909799 - RNA, 19 nt, Artificial Sequence
  Description of Artificial Sequence: Synthetic oligonucleotide
  Antisense strand to SEQ ID NO: 909798
uaauuuauacaacugcugu

SEQ ID NO: 909800 - RNA, 19 nt, Artificial Sequence
  Description of Artificial Sequence: Synthetic oligonucleotide
  Sense strand starting at position 1075 of SEQ ID NO: 588345
cccagaaagcuugauguua

SEQ ID NO: 909801 - RNA, 19 nt, Artificial Sequence
  Description of Artificial Sequence: Synthetic oligonucleotide
  Antisense strand to SEQ ID NO: 909800
uaacaucaagcuuucuggg

SEQ ID NO: 909802 - RNA, 19 nt, Artificial Sequence
  Description of Artificial Sequence: Synthetic oligonucleotide
  Sense strand starting at position 1084 of SEQ ID NO: 588345
cuugauguuaagugccaga

SEQ ID NO: 909803 - RNA, 19 nt, Artificial Sequence
  Description of Artificial Sequence: Synthetic oligonucleotide
  Antisense strand to SEQ ID NO: 909802
ucuggcacuuaacaucaag

SEQ ID NO: 909804 - RNA, 19 nt, Artificial Sequence
  Description of Artificial Sequence: Synthetic oligonucleotide
  Sense strand starting at position 1087 of SEQ ID NO: 588345
gauguuaagugccagaaag

SEQ ID NO: 909805 - RNA, 19 nt, Artificial Sequence
  Description of Artificial Sequence: Synthetic oligonucleotide
  Antisense strand to SEQ ID NO: 909804
cuuucuggcacuuaacauc

SEQ ID NO: 909806 - RNA, 19 nt, Artificial Sequence
  Description of Artificial Sequence: Synthetic oligonucleotide
  Sense strand starting at position 1089 of SEQ ID NO: 588345
uguuaagugccagaaagca

SEQ ID NO: 909807 - RNA, 19 nt, Artificial Sequence
  Description of Artificial Sequence: Synthetic oligonucleotide
  Antisense strand to SEQ ID NO: 909806
ugcuuucuggcacuuaaca

SEQ ID NO: 909808 - RNA, 19 nt, Artificial Sequence
  Description of Artificial Sequence: Synthetic oligonucleotide
  Sense strand starting at position 1149 of SEQ ID NO: 588345
guaacuauccacugaugac

SEQ ID NO: 909809 - RNA, 19 nt, Artificial Sequence
  Description of Artificial Sequence: Synthetic oligonucleotide
  Antisense strand to SEQ ID NO: 909808
gucaucaguggauaguuac

SEQ ID NO: 909810 - RNA, 19 nt, Artificial Sequence
  Description of Artificial Sequence: Synthetic oligonucleotide
  Sense strand starting at position 1166 of SEQ ID NO: 588345
acaccaagccguggucaau

SEQ ID NO: 909811 - RNA, 19 nt, Artificial Sequence
  Description of Artificial Sequence: Synthetic oligonucleotide
  Antisense strand to SEQ ID NO: 909810
auugaccacggcuuggugu

SEQ ID NO: 909812 - RNA, 19 nt, Artificial Sequence
  Description of Artificial Sequence: Synthetic oligonucleotide
  Sense strand starting at position 1176 of SEQ ID NO: 588345
guggucaaucgcgaaccaa

SEQ ID NO: 909813 - RNA, 19 nt, Artificial Sequence
  Description of Artificial Sequence: Synthetic oligonucleotide
  Antisense strand to SEQ ID NO: 909812
uugguucgcgauugaccac

SEQ ID NO: 909814 - RNA, 19 nt, Artificial Sequence
  Description of Artificial Sequence: Synthetic oligonucleotide
  Sense strand starting at position 1325 of SEQ ID NO: 588345
cgaccucugugccugaaua

SEQ ID NO: 909815 - RNA, 19 nt, Artificial Sequence
  Description of Artificial Sequence: Synthetic oligonucleotide
  Antisense strand to SEQ ID NO: 909814
uauucaggcacagaggucg

SEQ ID NO: 909816 - RNA, 19 nt, Artificial Sequence
  Description of Artificial Sequence: Synthetic oligonucleotide
  Sense strand starting at position 1326 of SEQ ID NO: 588345
gaccucugugccugaauaa

SEQ ID NO: 909817 - RNA, 19 nt, Artificial Sequence
  Description of Artificial Sequence: Synthetic oligonucleotide
  Antisense strand to SEQ ID NO: 909816
uuauucaggcacagagguc

SEQ ID NO: 909818 - RNA, 19 nt, Artificial Sequence
  Description of Artificial Sequence: Synthetic oligonucleotide
  Sense strand starting at position 1327 of SEQ ID NO: 588345
accucugugccugaauaaa

SEQ ID NO: 909819 - RNA, 19 nt, Artificial Sequence
  Description of Artificial Sequence: Synthetic oligonucleotide
  Antisense strand to SEQ ID NO: 909818
uuuauucaggcacagaggu

SEQ ID NO: 909820 - RNA, 19 nt, Artificial Sequence
  Description of Artificial Sequence: Synthetic oligonucleotide
  Sense strand starting at position 1543 of SEQ ID NO: 588345
ugugauguccgugcucgga

SEQ ID NO: 909821 - RNA, 19 nt, Artificial Sequence
  Description of Artificial Sequence: Synthetic oligonucleotide
  Antisense strand to SEQ ID NO: 909820
uccgagcacggacaucaca

SEQ ID NO: 909822 - RNA, 19 nt, Artificial Sequence
  Description of Artificial Sequence: Synthetic oligonucleotide
  Sense strand starting at position 1544 of SEQ ID NO: 588345
gugauguccgugcucggaa

SEQ ID NO: 909823 - RNA, 19 nt, Artificial Sequence
  Description of Artificial Sequence: Synthetic oligonucleotide
  Antisense strand to SEQ ID NO: 909822
uuccgagcacggacaucac

SEQ ID NO: 909824 - RNA, 19 nt, Artificial Sequence
  Description of Artificial Sequence: Synthetic oligonucleotide
  Sense strand starting at position 1929 of SEQ ID NO: 588345
gcuuuauccggcgcaccaa

SEQ ID NO: 909825 - RNA, 19 nt, Artificial Sequence
  Description of Artificial Sequence: Synthetic oligonucleotide
  Antisense strand to SEQ ID NO: 909824
uuggugcgccggauaaagc

SEQ ID NO: 909826 - RNA, 19 nt, Artificial Sequence
  Description of Artificial Sequence: Synthetic oligonucleotide
  Sense strand starting at position 2993 of SEQ ID NO: 588345
uacugaaggcucggugaca

SEQ ID NO: 909827 - RNA, 19 nt, Artificial Sequence
  Description of Artificial Sequence: Synthetic oligonucleotide
  Antisense strand to SEQ ID NO: 909826
ugucaccgagccuucagua

SEQ ID NO: 909828 - RNA, 19 nt, Artificial Sequence
  Description of Artificial Sequence: Synthetic oligonucleotide
  Sense strand starting at position 3004 of SEQ ID NO: 588345
cggugacagcagugauuua

SEQ ID NO: 909829 - RNA, 19 nt, Artificial Sequence
  Description of Artificial Sequence: Synthetic oligonucleotide
  Antisense strand to SEQ ID NO: 909828
uaaaucacugcugucaccg

SEQ ID NO: 909830 - RNA, 19 nt, Artificial Sequence
  Description of Artificial Sequence: Synthetic oligonucleotide
  Sense strand starting at position 3127 of SEQ ID NO: 588345
ugucuuaaagcugcguaca

SEQ ID NO: 909831 - RNA, 19 nt, Artificial Sequence
  Description of Artificial Sequence: Synthetic oligonucleotide
  Antisense strand to SEQ ID NO: 909830
uguacgcagcuuuaagaca

SEQ ID NO: 909832 - RNA, 19 nt, Artificial Sequence
  Description of Artificial Sequence: Synthetic oligonucleotide
  Sense strand starting at position 3128 of SEQ ID NO: 588345
gucuuaaagcugcguacaa

SEQ ID NO: 909833 - RNA, 19 nt, Artificial Sequence
  Description of Artificial Sequence: Synthetic oligonucleotide
  Antisense strand to SEQ ID NO: 909832
uuguacgcagcuuuaagac

SEQ ID NO: 909834 - RNA, 19 nt, Artificial Sequence
  Description of Artificial Sequence: Synthetic oligonucleotide
  Sense strand starting at position 3129 of SEQ ID NO: 588345
ucuuaaagcugcguacaaa

SEQ ID NO: 909835 - RNA, 19 nt, Artificial Sequence
  Description of Artificial Sequence: Synthetic oligonucleotide
  Antisense strand to SEQ ID NO: 909834
uuuguacgcagcuuuaaga

SEQ ID NO: 909836 - RNA, 19 nt, Artificial Sequence
  Description of Artificial Sequence: Synthetic oligonucleotide
  Sense strand starting at position 3130 of SEQ ID NO: 588345
cuuaaagcugcguacaaau

SEQ ID NO: 909837 - RNA, 19 nt, Artificial Sequence
  Description of Artificial Sequence: Synthetic oligonucleotide
  Antisense strand to SEQ ID NO: 909836
auuuguacgcagcuuuaag

SEQ ID NO: 909838 - RNA, 19 nt, Artificial Sequence
  Description of Artificial Sequence: Synthetic oligonucleotide
  Sense strand starting at position 3432 of SEQ ID NO: 588345
acccauaguggugggauua

SEQ ID NO: 909839 - RNA, 19 nt, Artificial Sequence
  Description of Artificial Sequence: Synthetic oligonucleotide
  Antisense strand to SEQ ID NO: 909838
uaaucccaccacuaugggu

SEQ ID NO: 909840 - RNA, 19 nt, Artificial Sequence
  Description of Artificial Sequence: Synthetic oligonucleotide
  Sense strand starting at position 3617 of SEQ ID NO: 588345
cagugaaagucauacgacu

SEQ ID NO: 909841 - RNA, 19 nt, Artificial Sequence
  Description of Artificial Sequence: Synthetic oligonucleotide
  Antisense strand to SEQ ID NO: 909840
agucguaugacuuucacug

SEQ ID NO: 909842 - RNA, 19 nt, Artificial Sequence
  Description of Artificial Sequence: Synthetic oligonucleotide
  Sense strand starting at position 3619 of SEQ ID NO: 588345
gugaaagucauacgacuaa

SEQ ID NO: 909843 - RNA, 19 nt, Artificial Sequence
  Description of Artificial Sequence: Synthetic oligonucleotide
  Antisense strand to SEQ ID NO: 909842
uuagucguaugacuuucac

SEQ ID NO: 909844 - RNA, 19 nt, Artificial Sequence
  Description of Artificial Sequence: Synthetic oligonucleotide
  Sense strand starting at position 3647 of SEQ ID NO: 588345
uaugcauguuaggaauaug

SEQ ID NO: 909845 - RNA, 19 nt, Artificial Sequence
  Description of Artificial Sequence: Synthetic oligonucleotide
  Antisense strand to SEQ ID NO: 909844
cauauuccuaacaugcaua

SEQ ID NO: 909846 - RNA, 19 nt, Artificial Sequence
  Description of Artificial Sequence: Synthetic oligonucleotide
  Sense strand starting at position 3655 of SEQ ID NO: 588345
uuaggaauaugggaacuua

SEQ ID NO: 909847 - RNA, 19 nt, Artificial Sequence
  Description of Artificial Sequence: Synthetic oligonucleotide
  Antisense strand to SEQ ID NO: 909846
uaaguucccauauuccuaa

SEQ ID NO: 909848 - RNA, 19 nt, Artificial Sequence
  Description of Artificial Sequence: Synthetic oligonucleotide
  Sense strand starting at position 3907 of SEQ ID NO: 588345
cagccagauuugugaaaga

SEQ ID NO: 909849 - RNA, 19 nt, Artificial Sequence
  Description of Artificial Sequence: Synthetic oligonucleotide
  Antisense strand to SEQ ID NO: 909848
ucuuucacaaaucuggcug

SEQ ID NO: 909850 - RNA, 19 nt, Artificial Sequence
  Description of Artificial Sequence: Synthetic oligonucleotide
  Sense strand starting at position 63 of SEQ ID NO: 588389
acugccucucuuuggaauu

SEQ ID NO: 909851 - RNA, 19 nt, Artificial Sequence
  Description of Artificial Sequence: Synthetic oligonucleotide
  Antisense strand to SEQ ID NO: 909850
aauuccaaagagaggcagu

SEQ ID NO: 909852 - RNA, 19 nt, Artificial Sequence
  Description of Artificial Sequence: Synthetic oligonucleotide
  Sense strand starting at position 109 of SEQ ID NO: 588389
ugaacuguccaccaaggua

SEQ ID NO: 909853 - RNA, 19 nt, Artificial Sequence
  Description of Artificial Sequence: Synthetic oligonucleotide
  Antisense strand to SEQ ID NO: 909852
uaccuugguggacaguuca

SEQ ID NO: 909854 - RNA, 19 nt, Artificial Sequence
  Description of Artificial Sequence: Synthetic oligonucleotide
  Sense strand starting at position 130 of SEQ ID NO: 588389
guguucggucccuauuuca

SEQ ID NO: 909855 - RNA, 19 nt, Artificial Sequence
  Description of Artificial Sequence: Synthetic oligonucleotide
  Antisense strand to SEQ ID NO: 909854
ugaaauagggaccgaacac

SEQ ID NO: 909856 - RNA, 19 nt, Artificial Sequence
  Description of Artificial Sequence: Synthetic oligonucleotide
  Sense strand starting at position 358 of SEQ ID NO: 588389
ccuaaacuggugugugcaa

SEQ ID NO: 909857 - RNA, 19 nt, Artificial Sequence
  Description of Artificial Sequence: Synthetic oligonucleotide
  Antisense strand to SEQ ID NO: 909856
uugcacacaccaguuuagg

SEQ ID NO: 909858 - RNA, 19 nt, Artificial Sequence
  Description of Artificial Sequence: Synthetic oligonucleotide
  Sense strand starting at position 359 of SEQ ID NO: 588389
cuaaacuggugugugcaaa

SEQ ID NO: 909859 - RNA, 19 nt, Artificial Sequence
  Description of Artificial Sequence: Synthetic oligonucleotide
  Antisense strand to SEQ ID NO: 909858
uuugcacacaccaguuuag

SEQ ID NO: 909860 - RNA, 19 nt, Artificial Sequence
  Description of Artificial Sequence: Synthetic oligonucleotide
  Sense strand starting at position 360 of SEQ ID NO: 588389
uaaacuggugugugcaaau

SEQ ID NO: 909861 - RNA, 19 nt, Artificial Sequence
  Description of Artificial Sequence: Synthetic oligonucleotide
  Antisense strand to SEQ ID NO: 909860
auuugcacacaccaguuua

SEQ ID NO: 909862 - RNA, 19 nt, Artificial Sequence
  Description of Artificial Sequence: Synthetic oligonucleotide
  Sense strand starting at position 411 of SEQ ID NO: 588389
uuguaaacaucagcggaaa

SEQ ID NO: 909863 - RNA, 19 nt, Artificial Sequence
  Description of Artificial Sequence: Synthetic oligonucleotide
  Antisense strand to SEQ ID NO: 909862
uuuccgcugauguuuacaa

SEQ ID NO: 909864 - RNA, 19 nt, Artificial Sequence
  Description of Artificial Sequence: Synthetic oligonucleotide
  Sense strand starting at position 412 of SEQ ID NO: 588389
uguaaacaucagcggaaau

SEQ ID NO: 909865 - RNA, 19 nt, Artificial Sequence
  Description of Artificial Sequence: Synthetic oligonucleotide
  Antisense strand to SEQ ID NO: 909864
auuuccgcugauguuuaca

SEQ ID NO: 909866 - RNA, 19 nt, Artificial Sequence
  Description of Artificial Sequence: Synthetic oligonucleotide
  Sense strand starting at position 413 of SEQ ID NO: 588389
guaaacaucagcggaaauu

SEQ ID NO: 909867 - RNA, 19 nt, Artificial Sequence
  Description of Artificial Sequence: Synthetic oligonucleotide
  Antisense strand to SEQ ID NO: 909866
aauuuccgcugauguuuac

SEQ ID NO: 909868 - RNA, 19 nt, Artificial Sequence
  Description of Artificial Sequence: Synthetic oligonucleotide
  Sense strand starting at position 451 of SEQ ID NO: 588389
ggcagaagauguuuauaaa

SEQ ID NO: 909869 - RNA, 19 nt, Artificial Sequence
  Description of Artificial Sequence: Synthetic oligonucleotide
  Antisense strand to SEQ ID NO: 909868
uuuauaaacaucuucugcc

SEQ ID NO: 909870 - RNA, 19 nt, Artificial Sequence
  Description of Artificial Sequence: Synthetic oligonucleotide
  Sense strand starting at position 492 of SEQ ID NO: 588389
agcuauugcccucaggauu

SEQ ID NO: 909871 - RNA, 19 nt, Artificial Sequence
  Description of Artificial Sequence: Synthetic oligonucleotide
  Antisense strand to SEQ ID NO: 909870
aauccugagggcaauagcu

SEQ ID NO: 909872 - RNA, 19 nt, Artificial Sequence
  Description of Artificial Sequence: Synthetic oligonucleotide
  Sense strand starting at position 541 of SEQ ID NO: 588389
ccuaacaaaugguuaugua

SEQ ID NO: 909873 - RNA, 19 nt, Artificial Sequence
  Description of Artificial Sequence: Synthetic oligonucleotide
  Antisense strand to SEQ ID NO: 909872
uacauaaccauuuguuagg

SEQ ID NO: 909874 - RNA, 19 nt, Artificial Sequence
  Description of Artificial Sequence: Synthetic oligonucleotide
  Sense strand starting at position 605 of SEQ ID NO: 588389
ugugcucuguuucuguaau

SEQ ID NO: 909875 - RNA, 19 nt, Artificial Sequence
  Description of Artificial Sequence: Synthetic oligonucleotide
  Antisense strand to SEQ ID NO: 909874
auuacagaaacagagcaca

SEQ ID NO: 909876 - RNA, 19 nt, Artificial Sequence
  Description of Artificial Sequence: Synthetic oligonucleotide
  Sense strand starting at position 759 of SEQ ID NO: 588389
ugggaaauggcucaucuug

SEQ ID NO: 909877 - RNA, 19 nt, Artificial Sequence
  Description of Artificial Sequence: Synthetic oligonucleotide
  Antisense strand to SEQ ID NO: 909876
caagaugagccauuuccca

SEQ ID NO: 909878 - RNA, 19 nt, Artificial Sequence
  Description of Artificial Sequence: Synthetic oligonucleotide
  Sense strand starting at position 761 of SEQ ID NO: 588389
ggaaauggcucaucuugag

SEQ ID NO: 909879 - RNA, 19 nt, Artificial Sequence
  Description of Artificial Sequence: Synthetic oligonucleotide
  Antisense strand to SEQ ID NO: 909878
cucaagaugagccauuucc

SEQ ID NO: 909880 - RNA, 19 nt, Artificial Sequence
  Description of Artificial Sequence: Synthetic oligonucleotide
  Sense strand starting at position 778 of SEQ ID NO: 588389
agggcauuucagugcagua

SEQ ID NO: 909881 - RNA, 19 nt, Artificial Sequence
  Description of Artificial Sequence: Synthetic oligonucleotide
  Antisense strand to SEQ ID NO: 909880
uacugcacugaaaugcccu

SEQ ID NO: 909882 - RNA, 19 nt, Artificial Sequence
  Description of Artificial Sequence: Synthetic oligonucleotide
  Sense strand starting at position 799 of SEQ ID NO: 588389
ugagauuucgucugcuccu

SEQ ID NO: 909883 - RNA, 19 nt, Artificial Sequence
  Description of Artificial Sequence: Synthetic oligonucleotide
  Antisense strand to SEQ ID NO: 909882
aggagcagacgaaaucuca

SEQ ID NO: 909884 - RNA, 19 nt, Artificial Sequence
  Description of Artificial Sequence: Synthetic oligonucleotide
  Sense strand starting at position 800 of SEQ ID NO: 588389
gagauuucgucugcuccuu

SEQ ID NO: 909885 - RNA, 19 nt, Artificial Sequence
  Description of Artificial Sequence: Synthetic oligonucleotide
  Antisense strand to SEQ ID NO: 909884
aaggagcagacgaaaucuc

SEQ ID NO: 909886 - RNA, 19 nt, Artificial Sequence
  Description of Artificial Sequence: Synthetic oligonucleotide
  Sense strand starting at position 1013 of SEQ ID NO: 588389
acuggaaacuauucuccga

SEQ ID NO: 909887 - RNA, 19 nt, Artificial Sequence
  Description of Artificial Sequence: Synthetic oligonucleotide
  Antisense strand to SEQ ID NO: 909886
ucggagaauaguuuccagu

SEQ ID NO: 909888 - RNA, 19 nt, Artificial Sequence
  Description of Artificial Sequence: Synthetic oligonucleotide
  Sense strand starting at position 1016 of SEQ ID NO: 588389
ggaaacuauucuccgagca

SEQ ID NO: 909889 - RNA, 19 nt, Artificial Sequence
  Description of Artificial Sequence: Synthetic oligonucleotide
  Antisense strand to SEQ ID NO: 909888
ugcucggagaauaguuucc

SEQ ID NO: 909890 - RNA, 19 nt, Artificial Sequence
  Description of Artificial Sequence: Synthetic oligonucleotide
  Sense strand starting at position 1028 of SEQ ID NO: 588389
ccgagcaaccguuaaagau

SEQ ID NO: 909891 - RNA, 19 nt, Artificial Sequence
  Description of Artificial Sequence: Synthetic oligonucleotide
  Antisense strand to SEQ ID NO: 909890
aucuuuaacgguugcucgg

SEQ ID NO: 909892 - RNA, 19 nt, Artificial Sequence
  Description of Artificial Sequence: Synthetic oligonucleotide
  Sense strand starting at position 1072 of SEQ ID NO: 588389
ugagguagaucacguaaga

SEQ ID NO: 909893 - RNA, 19 nt, Artificial Sequence
  Description of Artificial Sequence: Synthetic oligonucleotide
  Antisense strand to SEQ ID NO: 909892
ucuuacgugaucuaccuca

SEQ ID NO: 909894 - RNA, 19 nt, Artificial Sequence
  Description of Artificial Sequence: Synthetic oligonucleotide
  Sense strand starting at position 2553 of SEQ ID NO: 588389
gggcgugcacccagugauu

SEQ ID NO: 909895 - RNA, 19 nt, Artificial Sequence
  Description of Artificial Sequence: Synthetic oligonucleotide
  Antisense strand to SEQ ID NO: 909894
aaucacugggugcacgccc

SEQ ID NO: 909896 - RNA, 19 nt, Artificial Sequence
  Description of Artificial Sequence: Synthetic oligonucleotide
  Sense strand starting at position 2615 of SEQ ID NO: 588389
aacucucaggcgugaaauc

SEQ ID NO: 909897 - RNA, 19 nt, Artificial Sequence
  Description of Artificial Sequence: Synthetic oligonucleotide
  Antisense strand to SEQ ID NO: 909896
gauuucacgccugagaguu

SEQ ID NO: 909898 - RNA, 19 nt, Artificial Sequence
  Description of Artificial Sequence: Synthetic oligonucleotide
  Sense strand starting at position 2616 of SEQ ID NO: 588389
acucucaggcgugaaauca

SEQ ID NO: 909899 - RNA, 19 nt, Artificial Sequence
  Description of Artificial Sequence: Synthetic oligonucleotide
  Antisense strand to SEQ ID NO: 909898
ugauuucacgccugagagu

SEQ ID NO: 909900 - RNA, 19 nt, Artificial Sequence
  Description of Artificial Sequence: Synthetic oligonucleotide
  Sense strand starting at position 2674 of SEQ ID NO: 588389
acagauaacuuguuugguu

SEQ ID NO: 909901 - RNA, 19 nt, Artificial Sequence
  Description of Artificial Sequence: Synthetic oligonucleotide
  Antisense strand to SEQ ID NO: 909900
aaccaaacaaguuaucugu

SEQ ID NO: 909902 - RNA, 19 nt, Artificial Sequence
  Description of Artificial Sequence: Synthetic oligonucleotide
  Sense strand starting at position 2731 of SEQ ID NO: 588389
ggacaauugcuccaccucu

SEQ ID NO: 909903 - RNA, 19 nt, Artificial Sequence
  Description of Artificial Sequence: Synthetic oligonucleotide
  Antisense strand to SEQ ID NO: 909902
agagguggagcaauugucc

SEQ ID NO: 909904 - RNA, 19 nt, Artificial Sequence
  Description of Artificial Sequence: Synthetic oligonucleotide
  Sense strand starting at position 2779 of SEQ ID NO: 588389
aggcaaauaacguguccau

SEQ ID NO: 909905 - RNA, 19 nt, Artificial Sequence
  Description of Artificial Sequence: Synthetic oligonucleotide
  Antisense strand to SEQ ID NO: 909904
auggacacguuauuugccu

SEQ ID NO: 909906 - RNA, 19 nt, Artificial Sequence
  Description of Artificial Sequence: Synthetic oligonucleotide
  Sense strand starting at position 2875 of SEQ ID NO: 588389
cggacucccucucuauaua

SEQ ID NO: 909907 - RNA, 19 nt, Artificial Sequence
  Description of Artificial Sequence: Synthetic oligonucleotide
  Antisense strand to SEQ ID NO: 909906
uauauagagagggaguccg

SEQ ID NO: 909908 - RNA, 19 nt, Artificial Sequence
  Description of Artificial Sequence: Synthetic oligonucleotide
  Sense strand starting at position 2893 of SEQ ID NO: 588389
auccaaaggucugcacaaa

SEQ ID NO: 909909 - RNA, 19 nt, Artificial Sequence
  Description of Artificial Sequence: Synthetic oligonucleotide
  Antisense strand to SEQ ID NO: 909908
uuugugcagaccuuuggau

SEQ ID NO: 909910 - RNA, 19 nt, Artificial Sequence
  Description of Artificial Sequence: Synthetic oligonucleotide
  Sense strand starting at position 2894 of SEQ ID NO: 588389
uccaaaggucugcacaaau

SEQ ID NO: 909911 - RNA, 19 nt, Artificial Sequence
  Description of Artificial Sequence: Synthetic oligonucleotide
  Antisense strand to SEQ ID NO: 909910
auuugugcagaccuuugga

SEQ ID NO: 909912 - RNA, 19 nt, Artificial Sequence
  Description of Artificial Sequence: Synthetic oligonucleotide
  Sense strand starting at position 2905 of SEQ ID NO: 588389
gcacaaauguuccugacaa

SEQ ID NO: 909913 - RNA, 19 nt, Artificial Sequence
  Description of Artificial Sequence: Synthetic oligonucleotide
  Antisense strand to SEQ ID NO: 909912
uugucaggaacauuugugc

SEQ ID NO: 909914 - RNA, 19 nt, Artificial Sequence
  Description of Artificial Sequence: Synthetic oligonucleotide
  Sense strand starting at position 2982 of SEQ ID NO: 588389
aucuuucucccucgguuaa

SEQ ID NO: 909915 - RNA, 19 nt, Artificial Sequence
  Description of Artificial Sequence: Synthetic oligonucleotide
  Antisense strand to SEQ ID NO: 909914
uuaaccgagggagaaagau

SEQ ID NO: 909916 - RNA, 19 nt, Artificial Sequence
  Description of Artificial Sequence: Synthetic oligonucleotide
  Sense strand starting at position 2983 of SEQ ID NO: 588389
ucuuucucccucgguuaau

SEQ ID NO: 909917 - RNA, 19 nt, Artificial Sequence
  Description of Artificial Sequence: Synthetic oligonucleotide
  Antisense strand to SEQ ID NO: 909916
auuaaccgagggagaaaga

SEQ ID NO: 909918 - RNA, 19 nt, Artificial Sequence
  Description of Artificial Sequence: Synthetic oligonucleotide
  Sense strand starting at position 2995 of SEQ ID NO: 588389
gguuaaugcuacuacugga

SEQ ID NO: 909919 - RNA, 19 nt, Artificial Sequence
  Description of Artificial Sequence: Synthetic oligonucleotide
  Antisense strand to SEQ ID NO: 909918
uccaguaguagcauuaacc

SEQ ID NO: 909920 - RNA, 19 nt, Artificial Sequence
  Description of Artificial Sequence: Synthetic oligonucleotide
  Sense strand starting at position 3355 of SEQ ID NO: 588389
agccuagaagguugaaguu

SEQ ID NO: 909921 - RNA, 19 nt, Artificial Sequence
  Description of Artificial Sequence: Synthetic oligonucleotide
  Antisense strand to SEQ ID NO: 909920
aacuucaaccuucuaggcu

SEQ ID NO: 909922 - RNA, 19 nt, Artificial Sequence
  Description of Artificial Sequence: Synthetic oligonucleotide
  Sense strand starting at position 3505 of SEQ ID NO: 588389
gcagaagugaguggaucau

SEQ ID NO: 909923 - RNA, 19 nt, Artificial Sequence
  Description of Artificial Sequence: Synthetic oligonucleotide
  Antisense strand to SEQ ID NO: 909922
augauccacucacuucugc

SEQ ID NO: 909924 - RNA, 19 nt, Artificial Sequence
  Description of Artificial Sequence: Synthetic oligonucleotide
  Sense strand starting at position 3771 of SEQ ID NO: 588389
aaauuaagagguggagcua

SEQ ID NO: 909925 - RNA, 19 nt, Artificial Sequence
  Description of Artificial Sequence: Synthetic oligonucleotide
  Antisense strand to SEQ ID NO: 909924
uagcuccaccucuuaauuu

SEQ ID NO: 909926 - RNA, 19 nt, Artificial Sequence
  Description of Artificial Sequence: Synthetic oligonucleotide
  Sense strand starting at position 3845 of SEQ ID NO: 588389
uuccuuuguugggcaguua

SEQ ID NO: 909927 - RNA, 19 nt, Artificial Sequence
  Description of Artificial Sequence: Synthetic oligonucleotide
  Antisense strand to SEQ ID NO: 909926
uaacugcccaacaaaggaa

SEQ ID NO: 909928 - RNA, 19 nt, Artificial Sequence
  Description of Artificial Sequence: Synthetic oligonucleotide
  Sense strand starting at position 3936 of SEQ ID NO: 588389
ccauucuugugucuguaua

SEQ ID NO: 909929 - RNA, 19 nt, Artificial Sequence
  Description of Artificial Sequence: Synthetic oligonucleotide
  Antisense strand to SEQ ID NO: 909928
uauacagacacaagaaugg

SEQ ID NO: 909930 - RNA, 19 nt, Artificial Sequence
  Description of Artificial Sequence: Synthetic oligonucleotide
  Sense strand starting at position 7 of SEQ ID NO: 588390
caccauaggucauuguaag

SEQ ID NO: 909931 - RNA, 19 nt, Artificial Sequence
  Description of Artificial Sequence: Synthetic oligonucleotide
  Antisense strand to SEQ ID NO: 909930
cuuacaaugaccuauggug

SEQ ID NO: 909932 - RNA, 19 nt, Artificial Sequence
  Description of Artificial Sequence: Synthetic oligonucleotide
  Sense strand starting at position 13 of SEQ ID NO: 588390
aggucauuguaaggauaug

SEQ ID NO: 909933 - RNA, 19 nt, Artificial Sequence
  Description of Artificial Sequence: Synthetic oligonucleotide
  Antisense strand to SEQ ID NO: 909932
cauauccuuacaaugaccu

SEQ ID NO: 909934 - RNA, 19 nt, Artificial Sequence
  Description of Artificial Sequence: Synthetic oligonucleotide
  Sense strand starting at position 14 of SEQ ID NO: 588390
ggucauuguaaggauaugu

SEQ ID NO: 909935 - RNA, 19 nt, Artificial Sequence
  Description of Artificial Sequence: Synthetic oligonucleotide
  Antisense strand to SEQ ID NO: 909934
acauauccuuacaaugacc

SEQ ID NO: 909936 - RNA, 19 nt, Artificial Sequence
  Description of Artificial Sequence: Synthetic oligonucleotide
  Sense strand starting at position 18 of SEQ ID NO: 588390
auuguaaggauaugugaca

SEQ ID NO: 909937 - RNA, 19 nt, Artificial Sequence
  Description of Artificial Sequence: Synthetic oligonucleotide
  Antisense strand to SEQ ID NO: 909936
ugucacauauccuuacaau

SEQ ID NO: 909938 - RNA, 19 nt, Artificial Sequence
  Description of Artificial Sequence: Synthetic oligonucleotide
  Sense strand starting at position 19 of SEQ ID NO: 588390
uuguaaggauaugugacau

SEQ ID NO: 909939 - RNA, 19 nt, Artificial Sequence
  Description of Artificial Sequence: Synthetic oligonucleotide
  Antisense strand to SEQ ID NO: 909938
augucacauauccuuacaa

SEQ ID NO: 909940 - RNA, 19 nt, Artificial Sequence
  Description of Artificial Sequence: Synthetic oligonucleotide
  Sense strand starting at position 23 of SEQ ID NO: 588390
aaggauaugugacauccaa

SEQ ID NO: 909941 - RNA, 19 nt, Artificial Sequence
  Description of Artificial Sequence: Synthetic oligonucleotide
  Antisense strand to SEQ ID NO: 909940
uuggaugucacauauccuu

SEQ ID NO: 909942 - RNA, 19 nt, Artificial Sequence
  Description of Artificial Sequence: Synthetic oligonucleotide
  Sense strand starting at position 53 of SEQ ID NO: 588390
uauugcuuggcgccugaua

SEQ ID NO: 909943 - RNA, 19 nt, Artificial Sequence
  Description of Artificial Sequence: Synthetic oligonucleotide
  Antisense strand to SEQ ID NO: 909942
uaucaggcgccaagcaaua

SEQ ID NO: 909944 - RNA, 19 nt, Artificial Sequence
  Description of Artificial Sequence: Synthetic oligonucleotide
  Sense strand starting at position 55 of SEQ ID NO: 588390
uugcuuggcgccugauaag

SEQ ID NO: 909945 - RNA, 19 nt, Artificial Sequence
  Description of Artificial Sequence: Synthetic oligonucleotide
  Antisense strand to SEQ ID NO: 909944
cuuaucaggcgccaagcaa

SEQ ID NO: 909946 - RNA, 19 nt, Artificial Sequence
  Description of Artificial Sequence: Synthetic oligonucleotide
  Sense strand starting at position 65 of SEQ ID NO: 588390
ccugauaagcccuagguua

SEQ ID NO: 909947 - RNA, 19 nt, Artificial Sequence
  Description of Artificial Sequence: Synthetic oligonucleotide
  Antisense strand to SEQ ID NO: 909946
uaaccuagggcuuaucagg

SEQ ID NO: 909948 - RNA, 19 nt, Artificial Sequence
  Description of Artificial Sequence: Synthetic oligonucleotide
  Sense strand starting at position 67 of SEQ ID NO: 588390
ugauaagcccuagguuaag

SEQ ID NO: 909949 - RNA, 19 nt, Artificial Sequence
  Description of Artificial Sequence: Synthetic oligonucleotide
  Antisense strand to SEQ ID NO: 909948
cuuaaccuagggcuuauca

SEQ ID NO: 909950 - RNA, 19 nt, Artificial Sequence
  Description of Artificial Sequence: Synthetic oligonucleotide
  Sense strand starting at position 73 of SEQ ID NO: 588390
gcccuagguuaaguguuaa

SEQ ID NO: 909951 - RNA, 19 nt, Artificial Sequence
  Description of Artificial Sequence: Synthetic oligonucleotide
  Antisense strand to SEQ ID NO: 909950
uuaacacuuaaccuagggc

SEQ ID NO: 909952 - RNA, 19 nt, Artificial Sequence
  Description of Artificial Sequence: Synthetic oligonucleotide
  Sense strand starting at position 77 of SEQ ID NO: 588390
uagguuaaguguuaaccau

SEQ ID NO: 909953 - RNA, 19 nt, Artificial Sequence
  Description of Artificial Sequence: Synthetic oligonucleotide
  Antisense strand to SEQ ID NO: 909952
augguuaacacuuaaccua

SEQ ID NO: 909954 - RNA, 19 nt, Artificial Sequence
  Description of Artificial Sequence: Synthetic oligonucleotide
  Sense strand starting at position 98 of SEQ ID NO: 588390
cuacuauuauugcuguuau

SEQ ID NO: 909955 - RNA, 19 nt, Artificial Sequence
  Description of Artificial Sequence: Synthetic oligonucleotide
  Antisense strand to SEQ ID NO: 909954
auaacagcaauaauaguag

SEQ ID NO: 909956 - RNA, 19 nt, Artificial Sequence
  Description of Artificial Sequence: Synthetic oligonucleotide
  Sense strand starting at position 108 of SEQ ID NO: 588390
ugcuguuauuauugcugau

SEQ ID NO: 909957 - RNA, 19 nt, Artificial Sequence
  Description of Artificial Sequence: Synthetic oligonucleotide
  Antisense strand to SEQ ID NO: 909956
aucagcaauaauaacagca

SEQ ID NO: 909958 - RNA, 19 nt, Artificial Sequence
  Description of Artificial Sequence: Synthetic oligonucleotide
  Sense strand starting at position 121 of SEQ ID NO: 588390
gcugauggcucacaaguua

SEQ ID NO: 909959 - RNA, 19 nt, Artificial Sequence
  Description of Artificial Sequence: Synthetic oligonucleotide
  Antisense strand to SEQ ID NO: 909958
uaacuugugagccaucagc

SEQ ID NO: 909960 - RNA, 19 nt, Artificial Sequence
  Description of Artificial Sequence: Synthetic oligonucleotide
  Sense strand starting at position 134 of SEQ ID NO: 588390
aaguuauugucuguagccu

SEQ ID NO: 909961 - RNA, 19 nt, Artificial Sequence
  Description of Artificial Sequence: Synthetic oligonucleotide
  Antisense strand to SEQ ID NO: 909960
aggcuacagacaauaacuu

SEQ ID NO: 909962 - RNA, 19 nt, Artificial Sequence
  Description of Artificial Sequence: Synthetic oligonucleotide
  Sense strand starting at position 304 of SEQ ID NO: 588390
aggccuugauggcauauua

SEQ ID NO: 909963 - RNA, 19 nt, Artificial Sequence
  Description of Artificial Sequence: Synthetic oligonucleotide
  Antisense strand to SEQ ID NO: 909962
uaauaugccaucaaggccu

SEQ ID NO: 909964 - RNA, 19 nt, Artificial Sequence
  Description of Artificial Sequence: Synthetic oligonucleotide
  Sense strand starting at position 434 of SEQ ID NO: 588390
uggucacugccuuagucaa

SEQ ID NO: 909965 - RNA, 19 nt, Artificial Sequence
  Description of Artificial Sequence: Synthetic oligonucleotide
  Antisense strand to SEQ ID NO: 909964
uugacuaaggcagugacca

SEQ ID NO: 909966 - RNA, 19 nt, Artificial Sequence
  Description of Artificial Sequence: Synthetic oligonucleotide
  Sense strand starting at position 462 of SEQ ID NO: 588390
aucucuugccuagacugau

SEQ ID NO: 909967 - RNA, 19 nt, Artificial Sequence
  Description of Artificial Sequence: Synthetic oligonucleotide
  Antisense strand to SEQ ID NO: 909966
aucagucuaggcaagagau

SEQ ID NO: 909968 - RNA, 19 nt, Artificial Sequence
  Description of Artificial Sequence: Synthetic oligonucleotide
  Sense strand starting at position 468 of SEQ ID NO: 588390
ugccuagacugaugcaaua

SEQ ID NO: 909969 - RNA, 19 nt, Artificial Sequence
  Description of Artificial Sequence: Synthetic oligonucleotide
  Antisense strand to SEQ ID NO: 909968
uauugcaucagucuaggca

SEQ ID NO: 909970 - RNA, 19 nt, Artificial Sequence
  Description of Artificial Sequence: Synthetic oligonucleotide
  Sense strand starting at position 548 of SEQ ID NO: 588390
augacugcuucccugcaua

SEQ ID NO: 909971 - RNA, 19 nt, Artificial Sequence
  Description of Artificial Sequence: Synthetic oligonucleotide
  Antisense strand to SEQ ID NO: 909970
uaugcagggaagcagucau

SEQ ID NO: 909972 - RNA, 19 nt, Artificial Sequence
  Description of Artificial Sequence: Synthetic oligonucleotide
  Sense strand starting at position 586 of SEQ ID NO: 588390
acuacauuaguuugcuaca

SEQ ID NO: 909973 - RNA, 19 nt, Artificial Sequence
  Description of Artificial Sequence: Synthetic oligonucleotide
  Antisense strand to SEQ ID NO: 909972
uguagcaaacuaauguagu

SEQ ID NO: 909974 - RNA, 19 nt, Artificial Sequence
  Description of Artificial Sequence: Synthetic oligonucleotide
  Sense strand starting at position 629 of SEQ ID NO: 588390
uugggugacuuagacaaca

SEQ ID NO: 909975 - RNA, 19 nt, Artificial Sequence
  Description of Artificial Sequence: Synthetic oligonucleotide
  Antisense strand to SEQ ID NO: 909974
uguugucuaagucacccaa

SEQ ID NO: 909976 - RNA, 19 nt, Artificial Sequence
  Description of Artificial Sequence: Synthetic oligonucleotide
  Sense strand starting at position 721 of SEQ ID NO: 588390
aggccuagcuccuugacau

SEQ ID NO: 909977 - RNA, 19 nt, Artificial Sequence
  Description of Artificial Sequence: Synthetic oligonucleotide
  Antisense strand to SEQ ID NO: 909976
augucaaggagcuaggccu

SEQ ID NO: 909978 - RNA, 19 nt, Artificial Sequence
  Description of Artificial Sequence: Synthetic oligonucleotide
  Sense strand starting at position 722 of SEQ ID NO: 588390
ggccuagcuccuugacaug

SEQ ID NO: 909979 - RNA, 19 nt, Artificial Sequence
  Description of Artificial Sequence: Synthetic oligonucleotide
  Antisense strand to SEQ ID NO: 909978
caugucaaggagcuaggcc

SEQ ID NO: 909980 - RNA, 19 nt, Artificial Sequence
  Description of Artificial Sequence: Synthetic oligonucleotide
  Sense strand starting at position 800 of SEQ ID NO: 588390
gggugucucuuuggccaaa

SEQ ID NO: 909981 - RNA, 19 nt, Artificial Sequence
  Description of Artificial Sequence: Synthetic oligonucleotide
  Antisense strand to SEQ ID NO: 909980
uuuggccaaagagacaccc

SEQ ID NO: 909982 - RNA, 19 nt, Artificial Sequence
  Description of Artificial Sequence: Synthetic oligonucleotide
  Sense strand starting at position 802 of SEQ ID NO: 588390
gugucucuuuggccaaacu

SEQ ID NO: 909983 - RNA, 19 nt, Artificial Sequence
  Description of Artificial Sequence: Synthetic oligonucleotide
  Antisense strand to SEQ ID NO: 909982
aguuuggccaaagagacac

SEQ ID NO: 909984 - RNA, 19 nt, Artificial Sequence
  Description of Artificial Sequence: Synthetic oligonucleotide
  Sense strand starting at position 803 of SEQ ID NO: 588390
ugucucuuuggccaaacuu

SEQ ID NO: 909985 - RNA, 19 nt, Artificial Sequence
  Description of Artificial Sequence: Synthetic oligonucleotide
  Antisense strand to SEQ ID NO: 909984
aaguuuggccaaagagaca

SEQ ID NO: 909986 - RNA, 19 nt, Artificial Sequence
  Description of Artificial Sequence: Synthetic oligonucleotide
  Sense strand starting at position 1007 of SEQ ID NO: 588390
uccgaauuagcuggaacua

SEQ ID NO: 909987 - RNA, 19 nt, Artificial Sequence
  Description of Artificial Sequence: Synthetic oligonucleotide
  Antisense strand to SEQ ID NO: 909986
uaguuccagcuaauucgga

SEQ ID NO: 909988 - RNA, 19 nt, Artificial Sequence
  Description of Artificial Sequence: Synthetic oligonucleotide
  Sense strand starting at position 1167 of SEQ ID NO: 588390
gguuuaagugauuauccuu

SEQ ID NO: 909989 - RNA, 19 nt, Artificial Sequence
  Description of Artificial Sequence: Synthetic oligonucleotide
  Antisense strand to SEQ ID NO: 909988
aaggauaaucacuuaaacc

SEQ ID NO: 909990 - RNA, 19 nt, Artificial Sequence
  Description of Artificial Sequence: Synthetic oligonucleotide
  Sense strand starting at position 3517 of SEQ ID NO: 588390
cgcuauuaacuuuaaaugu

SEQ ID NO: 909991 - RNA, 19 nt, Artificial Sequence
  Description of Artificial Sequence: Synthetic oligonucleotide
  Antisense strand to SEQ ID NO: 909990
acauuuaaaguuaauagcg

SEQ ID NO: 909992 - RNA, 19 nt, Artificial Sequence
  Description of Artificial Sequence: Synthetic oligonucleotide
  Sense strand starting at position 141 of SEQ ID NO: 588412
gagcguacugcacaggaaa

SEQ ID NO: 909993 - RNA, 19 nt, Artificial Sequence
  Description of Artificial Sequence: Synthetic oligonucleotide
  Antisense strand to SEQ ID NO: 909992
uuuccugugcaguacgcuc

SEQ ID NO: 909994 - RNA, 19 nt, Artificial Sequence
  Description of Artificial Sequence: Synthetic oligonucleotide
  Sense strand starting at position 446 of SEQ ID NO: 588412
aagccugagccgugagaaa

SEQ ID NO: 909995 - RNA, 19 nt, Artificial Sequence
  Description of Artificial Sequence: Synthetic oligonucleotide
  Antisense strand to SEQ ID NO: 909994
uuucucacggcucaggcuu

SEQ ID NO: 909996 - RNA, 19 nt, Artificial Sequence
  Description of Artificial Sequence: Synthetic oligonucleotide
  Sense strand starting at position 538 of SEQ ID NO: 588412
ggcacuuucugagcaacua

SEQ ID NO: 909997 - RNA, 19 nt, Artificial Sequence
  Description of Artificial Sequence: Synthetic oligonucleotide
  Antisense strand to SEQ ID NO: 909996
uaguugcucagaaagugcc

SEQ ID NO: 909998 - RNA, 19 nt, Artificial Sequence
  Description of Artificial Sequence: Synthetic oligonucleotide
  Sense strand starting at position 539 of SEQ ID NO: 588412
gcacuuucugagcaacuaa

SEQ ID NO: 909999 - RNA, 19 nt, Artificial Sequence
  Description of Artificial Sequence: Synthetic oligonucleotide
  Antisense strand to SEQ ID NO: 909998
uuaguugcucagaaagugc

SEQ ID NO: 910000 - RNA, 19 nt, Artificial Sequence
  Description of Artificial Sequence: Synthetic oligonucleotide
  Sense strand starting at position 1145 of SEQ ID NO: 588412
ggagguugccuguguccaa

SEQ ID NO: 910001 - RNA, 19 nt, Artificial Sequence
  Description of Artificial Sequence: Synthetic oligonucleotide
  Antisense strand to SEQ ID NO: 910000
uuggacacaggcaaccucc

SEQ ID NO: 910002 - RNA, 19 nt, Artificial Sequence
  Description of Artificial Sequence: Synthetic oligonucleotide
  Sense strand starting at position 1146 of SEQ ID NO: 588412
gagguugccuguguccaaa

SEQ ID NO: 910003 - RNA, 19 nt, Artificial Sequence
  Description of Artificial Sequence: Synthetic oligonucleotide
  Antisense strand to SEQ ID NO: 910002
uuuggacacaggcaaccuc

SEQ ID NO: 910004 - RNA, 19 nt, Artificial Sequence
  Description of Artificial Sequence: Synthetic oligonucleotide
  Sense strand starting at position 1260 of SEQ ID NO: 588412
aggagugacucguugcgga

SEQ ID NO: 910005 - RNA, 19 nt, Artificial Sequence
  Description of Artificial Sequence: Synthetic oligonucleotide
  Antisense strand to SEQ ID NO: 910004
uccgcaacgagucacuccu

SEQ ID NO: 910006 - RNA, 19 nt, Artificial Sequence
  Description of Artificial Sequence: Synthetic oligonucleotide
  Sense strand starting at position 1261 of SEQ ID NO: 588412
ggagugacucguugcggau

SEQ ID NO: 910007 - RNA, 19 nt, Artificial Sequence
  Description of Artificial Sequence: Synthetic oligonucleotide
  Antisense strand to SEQ ID NO: 910006
auccgcaacgagucacucc

SEQ ID NO: 910008 - RNA, 19 nt, Artificial Sequence
  Description of Artificial Sequence: Synthetic oligonucleotide
  Sense strand starting at position 1723 of SEQ ID NO: 588412
gcgcccgugacggaucaau

SEQ ID NO: 910009 - RNA, 19 nt, Artificial Sequence
  Description of Artificial Sequence: Synthetic oligonucleotide
  Antisense strand to SEQ ID NO: 910008
auugauccgucacgggcgc

SEQ ID NO: 910010 - RNA, 19 nt, Artificial Sequence
  Description of Artificial Sequence: Synthetic oligonucleotide
  Sense strand starting at position 2303 of SEQ ID NO: 588412
aaggucugggcaggagaau

SEQ ID NO: 910011 - RNA, 19 nt, Artificial Sequence
  Description of Artificial Sequence: Synthetic oligonucleotide
  Antisense strand to SEQ ID NO: 910010
auucuccugcccagaccuu

SEQ ID NO: 910012 - RNA, 19 nt, Artificial Sequence
  Description of Artificial Sequence: Synthetic oligonucleotide
  Sense strand starting at position 2314 of SEQ ID NO: 588412
aggagaauguuccacgaag

SEQ ID NO: 910013 - RNA, 19 nt, Artificial Sequence
  Description of Artificial Sequence: Synthetic oligonucleotide
  Antisense strand to SEQ ID NO: 910012
cuucguggaacauucuccu

SEQ ID NO: 910014 - RNA, 19 nt, Artificial Sequence
  Description of Artificial Sequence: Synthetic oligonucleotide
  Sense strand starting at position 2805 of SEQ ID NO: 588412
uaggaaacgugaucauuaa

SEQ ID NO: 910015 - RNA, 19 nt, Artificial Sequence
  Description of Artificial Sequence: Synthetic oligonucleotide
  Antisense strand to SEQ ID NO: 910014
uuaaugaucacguuuccua

SEQ ID NO: 910016 - RNA, 19 nt, Artificial Sequence
  Description of Artificial Sequence: Synthetic oligonucleotide
  Sense strand starting at position 2812 of SEQ ID NO: 588412
cgugaucauuaaucuauaa

SEQ ID NO: 910017 - RNA, 19 nt, Artificial Sequence
  Description of Artificial Sequence: Synthetic oligonucleotide
  Antisense strand to SEQ ID NO: 910016
uuauagauuaaugaucacg

SEQ ID NO: 910018 - RNA, 19 nt, Artificial Sequence
  Description of Artificial Sequence: Synthetic oligonucleotide
  Sense strand starting at position 2843 of SEQ ID NO: 588412
ugauuaaugcgaggaacac

SEQ ID NO: 910019 - RNA, 19 nt, Artificial Sequence
  Description of Artificial Sequence: Synthetic oligonucleotide
  Antisense strand to SEQ ID NO: 910018
guguuccucgcauuaauca

SEQ ID NO: 910020 - RNA, 19 nt, Artificial Sequence
  Description of Artificial Sequence: Synthetic oligonucleotide
  Sense strand starting at position 2911 of SEQ ID NO: 588412
ggaagauaucgacgaccuu

SEQ ID NO: 910021 - RNA, 19 nt, Artificial Sequence
  Description of Artificial Sequence: Synthetic oligonucleotide
  Antisense strand to SEQ ID NO: 910020
aaggucgucgauaucuucc

SEQ ID NO: 910022 - RNA, 19 nt, Artificial Sequence
  Description of Artificial Sequence: Synthetic oligonucleotide
  Sense strand starting at position 2961 of SEQ ID NO: 588412
guacuuacugugugccuua

SEQ ID NO: 910023 - RNA, 19 nt, Artificial Sequence
  Description of Artificial Sequence: Synthetic oligonucleotide
  Antisense strand to SEQ ID NO: 910022
uaaggcacacaguaaguac

SEQ ID NO: 910024 - RNA, 19 nt, Artificial Sequence
  Description of Artificial Sequence: Synthetic oligonucleotide
  Sense strand starting at position 2966 of SEQ ID NO: 588412
uacugugugccuuaugaug

SEQ ID NO: 910025 - RNA, 19 nt, Artificial Sequence
  Description of Artificial Sequence: Synthetic oligonucleotide
  Antisense strand to SEQ ID NO: 910024
caucauaaggcacacagua

SEQ ID NO: 910026 - RNA, 19 nt, Artificial Sequence
  Description of Artificial Sequence: Synthetic oligonucleotide
  Sense strand starting at position 2968 of SEQ ID NO: 588412
cugugugccuuaugaugua

SEQ ID NO: 910027 - RNA, 19 nt, Artificial Sequence
  Description of Artificial Sequence: Synthetic oligonucleotide
  Antisense strand to SEQ ID NO: 910026
uacaucauaaggcacacag

SEQ ID NO: 910028 - RNA, 19 nt, Artificial Sequence
  Description of Artificial Sequence: Synthetic oligonucleotide
  Sense strand starting at position 2993 of SEQ ID NO: 588412
acaacugcccuguaagcau

SEQ ID NO: 910029 - RNA, 19 nt, Artificial Sequence
  Description of Artificial Sequence: Synthetic oligonucleotide
  Antisense strand to SEQ ID NO: 910028
augcuuacagggcaguugu

SEQ ID NO: 910030 - RNA, 19 nt, Artificial Sequence
  Description of Artificial Sequence: Synthetic oligonucleotide
  Sense strand starting at position 3002 of SEQ ID NO: 588412
cuguaagcauacuguguua

SEQ ID NO: 910031 - RNA, 19 nt, Artificial Sequence
  Description of Artificial Sequence: Synthetic oligonucleotide
  Antisense strand to SEQ ID NO: 910030
uaacacaguaugcuuacag

SEQ ID NO: 910032 - RNA, 19 nt, Artificial Sequence
  Description of Artificial Sequence: Synthetic oligonucleotide
  Sense strand starting at position 3004 of SEQ ID NO: 588412
guaagcauacuguguuacu

SEQ ID NO: 910033 - RNA, 19 nt, Artificial Sequence
  Description of Artificial Sequence: Synthetic oligonucleotide
  Antisense strand to SEQ ID NO: 910032
aguaacacaguaugcuuac

SEQ ID NO: 910034 - RNA, 19 nt, Artificial Sequence
  Description of Artificial Sequence: Synthetic oligonucleotide
  Sense strand starting at position 3043 of SEQ ID NO: 588412
auacacuggugcucagaga

SEQ ID NO: 910035 - RNA, 19 nt, Artificial Sequence
  Description of Artificial Sequence: Synthetic oligonucleotide
  Antisense strand to SEQ ID NO: 910034
ucucugagcaccaguguau

SEQ ID NO: 910036 - RNA, 19 nt, Artificial Sequence
  Description of Artificial Sequence: Synthetic oligonucleotide
  Sense strand starting at position 3056 of SEQ ID NO: 588412
cagagagguucuguagcua

SEQ ID NO: 910037 - RNA, 19 nt, Artificial Sequence
  Description of Artificial Sequence: Synthetic oligonucleotide
  Antisense strand to SEQ ID NO: 910036
uagcuacagaaccucucug

SEQ ID NO: 910038 - RNA, 19 nt, Artificial Sequence
  Description of Artificial Sequence: Synthetic oligonucleotide
  Sense strand starting at position 3214 of SEQ ID NO: 588412
aucgauucccuccggcaua

SEQ ID NO: 910039 - RNA, 19 nt, Artificial Sequence
  Description of Artificial Sequence: Synthetic oligonucleotide
  Antisense strand to SEQ ID NO: 910038
uaugccggagggaaucgau

SEQ ID NO: 910040 - RNA, 19 nt, Artificial Sequence
  Description of Artificial Sequence: Synthetic oligonucleotide
  Sense strand starting at position 3215 of SEQ ID NO: 588412
ucgauucccuccggcauau

SEQ ID NO: 910041 - RNA, 19 nt, Artificial Sequence
  Description of Artificial Sequence: Synthetic oligonucleotide
  Antisense strand to SEQ ID NO: 910040
auaugccggagggaaucga

SEQ ID NO: 910042 - RNA, 19 nt, Artificial Sequence
  Description of Artificial Sequence: Synthetic oligonucleotide
  Sense strand starting at position 3310 of SEQ ID NO: 588412
aauccaggcugaguuguua

SEQ ID NO: 910043 - RNA, 19 nt, Artificial Sequence
  Description of Artificial Sequence: Synthetic oligonucleotide
  Antisense strand to SEQ ID NO: 910042
uaacaacucagccuggauu

SEQ ID NO: 910044 - RNA, 19 nt, Artificial Sequence
  Description of Artificial Sequence: Synthetic oligonucleotide
  Sense strand starting at position 3314 of SEQ ID NO: 588412
caggcugaguuguuaggaa

SEQ ID NO: 910045 - RNA, 19 nt, Artificial Sequence
  Description of Artificial Sequence: Synthetic oligonucleotide
  Antisense strand to SEQ ID NO: 910044
uuccuaacaacucagccug

SEQ ID NO: 910046 - RNA, 19 nt, Artificial Sequence
  Description of Artificial Sequence: Synthetic oligonucleotide
  Sense strand starting at position 3489 of SEQ ID NO: 588412
gcuggaggguuugcaugaa

SEQ ID NO: 910047 - RNA, 19 nt, Artificial Sequence
  Description of Artificial Sequence: Synthetic oligonucleotide
  Antisense strand to SEQ ID NO: 910046
uucaugcaaacccuccagc

SEQ ID NO: 910048 - RNA, 19 nt, Artificial Sequence
  Description of Artificial Sequence: Synthetic oligonucleotide
  Sense strand starting at position 3590 of SEQ ID NO: 588412
cccagauacucgcucaacu

SEQ ID NO: 910049 - RNA, 19 nt, Artificial Sequence
  Description of Artificial Sequence: Synthetic oligonucleotide
  Antisense strand to SEQ ID NO: 910048
aguugagcgaguaucuggg

SEQ ID NO: 910050 - RNA, 19 nt, Artificial Sequence
  Description of Artificial Sequence: Synthetic oligonucleotide
  Sense strand starting at position 3639 of SEQ ID NO: 588412
cagucauagucuucuggca

SEQ ID NO: 910051 - RNA, 19 nt, Artificial Sequence
  Description of Artificial Sequence: Synthetic oligonucleotide
  Antisense strand to SEQ ID NO: 910050
ugccagaagacuaugacug

SEQ ID NO: 910052 - RNA, 19 nt, Artificial Sequence
  Description of Artificial Sequence: Synthetic oligonucleotide
  Sense strand starting at position 3683 of SEQ ID NO: 588412
cagguuucugaaugaacau

SEQ ID NO: 910053 - RNA, 19 nt, Artificial Sequence
  Description of Artificial Sequence: Synthetic oligonucleotide
  Antisense strand to SEQ ID NO: 910052
auguucauucagaaaccug

SEQ ID NO: 910054 - RNA, 19 nt, Artificial Sequence
  Description of Artificial Sequence: Synthetic oligonucleotide
  Sense strand starting at position 3741 of SEQ ID NO: 588412
agucauuuguguccuccuu

SEQ ID NO: 910055 - RNA, 19 nt, Artificial Sequence
  Description of Artificial Sequence: Synthetic oligonucleotide
  Antisense strand to SEQ ID NO: 910054
aaggaggacacaaaugacu

SEQ ID NO: 910056 - RNA, 19 nt, Artificial Sequence
  Description of Artificial Sequence: Synthetic oligonucleotide
  Sense strand starting at position 3757 of SEQ ID NO: 588412
cuugcaagcugugccaaua

SEQ ID NO: 910057 - RNA, 19 nt, Artificial Sequence
  Description of Artificial Sequence: Synthetic oligonucleotide
  Antisense strand to SEQ ID NO: 910056
uauuggcacagcuugcaag

SEQ ID NO: 910058 - RNA, 19 nt, Artificial Sequence
  Description of Artificial Sequence: Synthetic oligonucleotide
  Sense strand starting at position 341 of SEQ ID NO: 588436
ccagguaccuaauugaauc

SEQ ID NO: 910059 - RNA, 19 nt, Artificial Sequence
  Description of Artificial Sequence: Synthetic oligonucleotide
  Antisense strand to SEQ ID NO: 910058
gauucaauuagguaccugg

SEQ ID NO: 910060 - RNA, 19 nt, Artificial Sequence
  Description of Artificial Sequence: Synthetic oligonucleotide
  Sense strand starting at position 585 of SEQ ID NO: 588436
ggacaacgucuccgagacu

SEQ ID NO: 910061 - RNA, 19 nt, Artificial Sequence
  Description of Artificial Sequence: Synthetic oligonucleotide
  Antisense strand to SEQ ID NO: 910060
agucucggagacguugucc

SEQ ID NO: 910062 - RNA, 19 nt, Artificial Sequence
  Description of Artificial Sequence: Synthetic oligonucleotide
  Sense strand starting at position 594 of SEQ ID NO: 588436
cuccgagacugagacauuu

SEQ ID NO: 910063 - RNA, 19 nt, Artificial Sequence
  Description of Artificial Sequence: Synthetic oligonucleotide
  Antisense strand to SEQ ID NO: 910062
aaaugucucagucucggag

SEQ ID NO: 910064 - RNA, 19 nt, Artificial Sequence
  Description of Artificial Sequence: Synthetic oligonucleotide
  Sense strand starting at position 649 of SEQ ID NO: 588436
aaauguaaacgcgagguga

SEQ ID NO: 910065 - RNA, 19 nt, Artificial Sequence
  Description of Artificial Sequence: Synthetic oligonucleotide
  Antisense strand to SEQ ID NO: 910064
ucaccucgcguuuacauuu

SEQ ID NO: 910066 - RNA, 19 nt, Artificial Sequence
  Description of Artificial Sequence: Synthetic oligonucleotide
  Sense strand starting at position 1040 of SEQ ID NO: 588436
cccgcucuacuugaaauga

SEQ ID NO: 910067 - RNA, 19 nt, Artificial Sequence
  Description of Artificial Sequence: Synthetic oligonucleotide
  Antisense strand to SEQ ID NO: 910066
ucauuucaaguagagcggg

SEQ ID NO: 910068 - RNA, 19 nt, Artificial Sequence
  Description of Artificial Sequence: Synthetic oligonucleotide
  Sense strand starting at position 1148 of SEQ ID NO: 588436
ugguuugaacccuaauugu

SEQ ID NO: 910069 - RNA, 19 nt, Artificial Sequence
  Description of Artificial Sequence: Synthetic oligonucleotide
  Antisense strand to SEQ ID NO: 910068
acaauuaggguucaaacca

SEQ ID NO: 910070 - RNA, 19 nt, Artificial Sequence
  Description of Artificial Sequence: Synthetic oligonucleotide
  Sense strand starting at position 1294 of SEQ ID NO: 588436
gcgucucugagcuuuaacu

SEQ ID NO: 910071 - RNA, 19 nt, Artificial Sequence
  Description of Artificial Sequence: Synthetic oligonucleotide
  Antisense strand to SEQ ID NO: 910070
aguuaaagcucagagacgc

SEQ ID NO: 910072 - RNA, 19 nt, Artificial Sequence
  Description of Artificial Sequence: Synthetic oligonucleotide
  Sense strand starting at position 2281 of SEQ ID NO: 588436
uggccuuauuuguuaaacu

SEQ ID NO: 910073 - RNA, 19 nt, Artificial Sequence
  Description of Artificial Sequence: Synthetic oligonucleotide
  Antisense strand to SEQ ID NO: 910072
aguuuaacaaauaaggcca

SEQ ID NO: 910074 - RNA, 19 nt, Artificial Sequence
  Description of Artificial Sequence: Synthetic oligonucleotide
  Sense strand starting at position 2320 of SEQ ID NO: 588436
aguguuaguguuuagacag

SEQ ID NO: 910075 - RNA, 19 nt, Artificial Sequence
  Description of Artificial Sequence: Synthetic oligonucleotide
  Antisense strand to SEQ ID NO: 910074
cugucuaaacacuaacacu

SEQ ID NO: 910076 - RNA, 19 nt, Artificial Sequence
  Description of Artificial Sequence: Synthetic oligonucleotide
  Sense strand starting at position 2337 of SEQ ID NO: 588436
aggauuugaugucagguca

SEQ ID NO: 910077 - RNA, 19 nt, Artificial Sequence
  Description of Artificial Sequence: Synthetic oligonucleotide
  Antisense strand to SEQ ID NO: 910076
ugaccugacaucaaauccu

SEQ ID NO: 910078 - RNA, 19 nt, Artificial Sequence
  Description of Artificial Sequence: Synthetic oligonucleotide
  Sense strand starting at position 2431 of SEQ ID NO: 588436
guugcuuugaaauaucgga

SEQ ID NO: 910079 - RNA, 19 nt, Artificial Sequence
  Description of Artificial Sequence: Synthetic oligonucleotide
  Antisense strand to SEQ ID NO: 910078
uccgauauuucaaagcaac

SEQ ID NO: 910080 - RNA, 19 nt, Artificial Sequence
  Description of Artificial Sequence: Synthetic oligonucleotide
  Sense strand starting at position 2458 of SEQ ID NO: 588436
acaugacagcuucgaaacu

SEQ ID NO: 910081 - RNA, 19 nt, Artificial Sequence
  Description of Artificial Sequence: Synthetic oligonucleotide
  Antisense strand to SEQ ID NO: 910080
aguuucgaagcugucaugu

SEQ ID NO: 910082 - RNA, 19 nt, Artificial Sequence
  Description of Artificial Sequence: Synthetic oligonucleotide
  Sense strand starting at position 2540 of SEQ ID NO: 588436
aggugauggaaguguuaga

SEQ ID NO: 910083 - RNA, 19 nt, Artificial Sequence
  Description of Artificial Sequence: Synthetic oligonucleotide
  Antisense strand to SEQ ID NO: 910082
ucuaacacuuccaucaccu

SEQ ID NO: 910084 - RNA, 19 nt, Artificial Sequence
  Description of Artificial Sequence: Synthetic oligonucleotide
  Sense strand starting at position 2549 of SEQ ID NO: 588436
aaguguuagaaggguauaa

SEQ ID NO: 910085 - RNA, 19 nt, Artificial Sequence
  Description of Artificial Sequence: Synthetic oligonucleotide
  Antisense strand to SEQ ID NO: 910084
uuauacccuucuaacacuu

SEQ ID NO: 910086 - RNA, 19 nt, Artificial Sequence
  Description of Artificial Sequence: Synthetic oligonucleotide
  Sense strand starting at position 2582 of SEQ ID NO: 588436
gcuguuaagaauggaggua

SEQ ID NO: 910087 - RNA, 19 nt, Artificial Sequence
  Description of Artificial Sequence: Synthetic oligonucleotide
  Antisense strand to SEQ ID NO: 910086
uaccuccauucuuaacagc

SEQ ID NO: 910088 - RNA, 19 nt, Artificial Sequence
  Description of Artificial Sequence: Synthetic oligonucleotide
  Sense strand starting at position 2609 of SEQ ID NO: 588436
gcguauguuacgucuauaa

SEQ ID NO: 910089 - RNA, 19 nt, Artificial Sequence
  Description of Artificial Sequence: Synthetic oligonucleotide
  Antisense strand to SEQ ID NO: 910088
uuauagacguaacauacgc

SEQ ID NO: 910090 - RNA, 19 nt, Artificial Sequence
  Description of Artificial Sequence: Synthetic oligonucleotide
  Sense strand starting at position 2611 of SEQ ID NO: 588436
guauguuacgucuauaaag

SEQ ID NO: 910091 - RNA, 19 nt, Artificial Sequence
  Description of Artificial Sequence: Synthetic oligonucleotide
  Antisense strand to SEQ ID NO: 910090
cuuuauagacguaacauac

SEQ ID NO: 910092 - RNA, 19 nt, Artificial Sequence
  Description of Artificial Sequence: Synthetic oligonucleotide
  Sense strand starting at position 2613 of SEQ ID NO: 588436
auguuacgucuauaaagug

SEQ ID NO: 910093 - RNA, 19 nt, Artificial Sequence
  Description of Artificial Sequence: Synthetic oligonucleotide
  Antisense strand to SEQ ID NO: 910092
cacuuuauagacguaacau

SEQ ID NO: 910094 - RNA, 19 nt, Artificial Sequence
  Description of Artificial Sequence: Synthetic oligonucleotide
  Sense strand starting at position 2631 of SEQ ID NO: 588436
ggcacuuuauccuuaugaa

SEQ ID NO: 910095 - RNA, 19 nt, Artificial Sequence
  Description of Artificial Sequence: Synthetic oligonucleotide
  Antisense strand to SEQ ID NO: 910094
uucauaaggauaaagugcc

SEQ ID NO: 910096 - RNA, 19 nt, Artificial Sequence
  Description of Artificial Sequence: Synthetic oligonucleotide
  Sense strand starting at position 2700 of SEQ ID NO: 588436
ucugcuuguguugaccaga

SEQ ID NO: 910097 - RNA, 19 nt, Artificial Sequence
  Description of Artificial Sequence: Synthetic oligonucleotide
  Antisense strand to SEQ ID NO: 910096
ucuggucaacacaagcaga

SEQ ID NO: 910098 - RNA, 19 nt, Artificial Sequence
  Description of Artificial Sequence: Synthetic oligonucleotide
  Sense strand starting at position 2736 of SEQ ID NO: 588436
acaagaaagucugcuccua

SEQ ID NO: 910099 - RNA, 19 nt, Artificial Sequence
  Description of Artificial Sequence: Synthetic oligonucleotide
  Antisense strand to SEQ ID NO: 910098
uaggagcagacuuucuugu

SEQ ID NO: 910100 - RNA, 19 nt, Artificial Sequence
  Description of Artificial Sequence: Synthetic oligonucleotide
  Sense strand starting at position 2738 of SEQ ID NO: 588436
aagaaagucugcuccuagu

SEQ ID NO: 910101 - RNA, 19 nt, Artificial Sequence
  Description of Artificial Sequence: Synthetic oligonucleotide
  Antisense strand to SEQ ID NO: 910100
acuaggagcagacuuucuu

SEQ ID NO: 910102 - RNA, 19 nt, Artificial Sequence
  Description of Artificial Sequence: Synthetic oligonucleotide
  Sense strand starting at position 2798 of SEQ ID NO: 588436
uugggaaucuagguaugua

SEQ ID NO: 910103 - RNA, 19 nt, Artificial Sequence
  Description of Artificial Sequence: Synthetic oligonucleotide
  Antisense strand to SEQ ID NO: 910102
uacauaccuagauucccaa

SEQ ID NO: 910104 - RNA, 19 nt, Artificial Sequence
  Description of Artificial Sequence: Synthetic oligonucleotide
  Sense strand starting at position 2801 of SEQ ID NO: 588436
ggaaucuagguauguaaug

SEQ ID NO: 910105 - RNA, 19 nt, Artificial Sequence
  Description of Artificial Sequence: Synthetic oligonucleotide
  Antisense strand to SEQ ID NO: 910104
cauuacauaccuagauucc

SEQ ID NO: 910106 - RNA, 19 nt, Artificial Sequence
  Description of Artificial Sequence: Synthetic oligonucleotide
  Sense strand starting at position 2810 of SEQ ID NO: 588436
guauguaaugcacacaaua

SEQ ID NO: 910107 - RNA, 19 nt, Artificial Sequence
  Description of Artificial Sequence: Synthetic oligonucleotide
  Antisense strand to SEQ ID NO: 910106
uauugugugcauuacauac

SEQ ID NO: 910108 - RNA, 19 nt, Artificial Sequence
  Description of Artificial Sequence: Synthetic oligonucleotide
  Sense strand starting at position 2848 of SEQ ID NO: 588436
ugcaguugacaguauuauu

SEQ ID NO: 910109 - RNA, 19 nt, Artificial Sequence
  Description of Artificial Sequence: Synthetic oligonucleotide
  Antisense strand to SEQ ID NO: 910108
aauaauacugucaacugca

SEQ ID NO: 910110 - RNA, 19 nt, Artificial Sequence
  Description of Artificial Sequence: Synthetic oligonucleotide
  Sense strand starting at position 2961 of SEQ ID NO: 588436
uuagcaaucagguaguaga

SEQ ID NO: 910111 - RNA, 19 nt, Artificial Sequence
  Description of Artificial Sequence: Synthetic oligonucleotide
  Antisense strand to SEQ ID NO: 910110
ucuacuaccugauugcuaa

SEQ ID NO: 910112 - RNA, 19 nt, Artificial Sequence
  Description of Artificial Sequence: Synthetic oligonucleotide
  Sense strand starting at position 3091 of SEQ ID NO: 588436
aggcuuggucuguauccau

SEQ ID NO: 910113 - RNA, 19 nt, Artificial Sequence
  Description of Artificial Sequence: Synthetic oligonucleotide
  Antisense strand to SEQ ID NO: 910112
auggauacagaccaagccu

SEQ ID NO: 910114 - RNA, 19 nt, Artificial Sequence
  Description of Artificial Sequence: Synthetic oligonucleotide
  Sense strand starting at position 3098 of SEQ ID NO: 588436
gucuguauccaugauauua

SEQ ID NO: 910115 - RNA, 19 nt, Artificial Sequence
  Description of Artificial Sequence: Synthetic oligonucleotide
  Antisense strand to SEQ ID NO: 910114
uaauaucauggauacagac

SEQ ID NO: 910116 - RNA, 19 nt, Artificial Sequence
  Description of Artificial Sequence: Synthetic oligonucleotide
  Sense strand starting at position 3227 of SEQ ID NO: 588436
guaagaggucaggauaugu

SEQ ID NO: 910117 - RNA, 19 nt, Artificial Sequence
  Description of Artificial Sequence: Synthetic oligonucleotide
  Antisense strand to SEQ ID NO: 910116
acauauccugaccucuuac

SEQ ID NO: 910118 - RNA, 19 nt, Artificial Sequence
  Description of Artificial Sequence: Synthetic oligonucleotide
  Sense strand starting at position 3231 of SEQ ID NO: 588436
gaggucaggauaugucauu

SEQ ID NO: 910119 - RNA, 19 nt, Artificial Sequence
  Description of Artificial Sequence: Synthetic oligonucleotide
  Antisense strand to SEQ ID NO: 910118
aaugacauauccugaccuc

SEQ ID NO: 910120 - RNA, 19 nt, Artificial Sequence
  Description of Artificial Sequence: Synthetic oligonucleotide
  Sense strand starting at position 3236 of SEQ ID NO: 588436
caggauaugucauucuguc

SEQ ID NO: 910121 - RNA, 19 nt, Artificial Sequence
  Description of Artificial Sequence: Synthetic oligonucleotide
  Antisense strand to SEQ ID NO: 910120
gacagaaugacauauccug

SEQ ID NO: 910122 - RNA, 19 nt, Artificial Sequence
  Description of Artificial Sequence: Synthetic oligonucleotide
  Sense strand starting at position 3323 of SEQ ID NO: 588436
ggcucaaccacacguaaga

SEQ ID NO: 910123 - RNA, 19 nt, Artificial Sequence
  Description of Artificial Sequence: Synthetic oligonucleotide
  Antisense strand to SEQ ID NO: 910122
ucuuacgugugguugagcc

SEQ ID NO: 910124 - RNA, 19 nt, Artificial Sequence
  Description of Artificial Sequence: Synthetic oligonucleotide
  Sense strand starting at position 3392 of SEQ ID NO: 588436
aaaccaagugguggaaauu

SEQ ID NO: 910125 - RNA, 19 nt, Artificial Sequence
  Description of Artificial Sequence: Synthetic oligonucleotide
  Antisense strand to SEQ ID NO: 910124
aauuuccaccacuugguuu

SEQ ID NO: 910126 - RNA, 19 nt, Artificial Sequence
  Description of Artificial Sequence: Synthetic oligonucleotide
  Sense strand starting at position 3403 of SEQ ID NO: 588436
uggaaauugccaugacuau

SEQ ID NO: 910127 - RNA, 19 nt, Artificial Sequence
  Description of Artificial Sequence: Synthetic oligonucleotide
  Antisense strand to SEQ ID NO: 910126
auagucauggcaauuucca

SEQ ID NO: 910128 - RNA, 19 nt, Artificial Sequence
  Description of Artificial Sequence: Synthetic oligonucleotide
  Sense strand starting at position 3807 of SEQ ID NO: 588436
agucaucaaccuggagauc

SEQ ID NO: 910129 - RNA, 19 nt, Artificial Sequence
  Description of Artificial Sequence: Synthetic oligonucleotide
  Antisense strand to SEQ ID NO: 910128
gaucuccagguugaugacu

SEQ ID NO: 910130 - RNA, 19 nt, Artificial Sequence
  Description of Artificial Sequence: Synthetic oligonucleotide
  Sense strand starting at position 3841 of SEQ ID NO: 588436
uuuauaagagcccaagagu

SEQ ID NO: 910131 - RNA, 19 nt, Artificial Sequence
  Description of Artificial Sequence: Synthetic oligonucleotide
  Antisense strand to SEQ ID NO: 910130
acucuugggcucuuauaaa

SEQ ID NO: 910132 - RNA, 19 nt, Artificial Sequence
  Description of Artificial Sequence: Synthetic oligonucleotide
  Sense strand starting at position 3934 of SEQ ID NO: 588436
uagugcuuugguugaauuu

SEQ ID NO: 910133 - RNA, 19 nt, Artificial Sequence
  Description of Artificial Sequence: Synthetic oligonucleotide
  Antisense strand to SEQ ID NO: 910132
aaauucaaccaaagcacua

SEQ ID NO: 910134 - RNA, 19 nt, Artificial Sequence
  Description of Artificial Sequence: Synthetic oligonucleotide
  Sense strand starting at position 3979 of SEQ ID NO: 588436
gaauguagaucugcaaugu

SEQ ID NO: 910135 - RNA, 19 nt, Artificial Sequence
  Description of Artificial Sequence: Synthetic oligonucleotide
  Antisense strand to SEQ ID NO: 910134
acauugcagaucuacauuc

SEQ ID NO: 910136 - RNA, 19 nt, Artificial Sequence
  Description of Artificial Sequence: Synthetic oligonucleotide
  Sense strand starting at position 3980 of SEQ ID NO: 588436
aauguagaucugcaauguu

SEQ ID NO: 910137 - RNA, 19 nt, Artificial Sequence
  Description of Artificial Sequence: Synthetic oligonucleotide
  Antisense strand to SEQ ID NO: 910136
aacauugcagaucuacauu

SEQ ID NO: 910138 - RNA, 19 nt, Artificial Sequence
  Description of Artificial Sequence: Synthetic oligonucleotide
  Sense strand starting at position 216 of SEQ ID NO: 588439
cugagagccuucucuauau

SEQ ID NO: 910139 - RNA, 19 nt, Artificial Sequence
  Description of Artificial Sequence: Synthetic oligonucleotide
  Antisense strand to SEQ ID NO: 910138
auauagagaaggcucucag

SEQ ID NO: 910140 - RNA, 19 nt, Artificial Sequence
  Description of Artificial Sequence: Synthetic oligonucleotide
  Sense strand starting at position 268 of SEQ ID NO: 588439
agcuuucugggagggugau

SEQ ID NO: 910141 - RNA, 19 nt, Artificial Sequence
  Description of Artificial Sequence: Synthetic oligonucleotide
  Antisense strand to SEQ ID NO: 910140
aucacccucccagaaagcu

SEQ ID NO: 910142 - RNA, 19 nt, Artificial Sequence
  Description of Artificial Sequence: Synthetic oligonucleotide
  Sense strand starting at position 274 of SEQ ID NO: 588439
cugggagggugauuccuau

SEQ ID NO: 910143 - RNA, 19 nt, Artificial Sequence
  Description of Artificial Sequence: Synthetic oligonucleotide
  Antisense strand to SEQ ID NO: 910142
auaggaaucacccucccag

SEQ ID NO: 910144 - RNA, 19 nt, Artificial Sequence
  Description of Artificial Sequence: Synthetic oligonucleotide
  Sense strand starting at position 372 of SEQ ID NO: 588439
cuuuguggcuaucuagaaa

SEQ ID NO: 910145 - RNA, 19 nt, Artificial Sequence
  Description of Artificial Sequence: Synthetic oligonucleotide
  Antisense strand to SEQ ID NO: 910144
uuucuagauagccacaaag

SEQ ID NO: 910146 - RNA, 19 nt, Artificial Sequence
  Description of Artificial Sequence: Synthetic oligonucleotide
  Sense strand starting at position 400 of SEQ ID NO: 588439
agcugauaucauggucuga

SEQ ID NO: 910147 - RNA, 19 nt, Artificial Sequence
  Description of Artificial Sequence: Synthetic oligonucleotide
  Antisense strand to SEQ ID NO: 910146
ucagaccaugauaucagcu

SEQ ID NO: 910148 - RNA, 19 nt, Artificial Sequence
  Description of Artificial Sequence: Synthetic oligonucleotide
  Sense strand starting at position 402 of SEQ ID NO: 588439
cugauaucauggucugaaa

SEQ ID NO: 910149 - RNA, 19 nt, Artificial Sequence
  Description of Artificial Sequence: Synthetic oligonucleotide
  Antisense strand to SEQ ID NO: 910148
uuucagaccaugauaucag

SEQ ID NO: 910150 - RNA, 19 nt, Artificial Sequence
  Description of Artificial Sequence: Synthetic oligonucleotide
  Sense strand starting at position 500 of SEQ ID NO: 588439
auggcauaacuugggcaaa

SEQ ID NO: 910151 - RNA, 19 nt, Artificial Sequence
  Description of Artificial Sequence: Synthetic oligonucleotide
  Antisense strand to SEQ ID NO: 910150
uuugcccaaguuaugccau

SEQ ID NO: 910152 - RNA, 19 nt, Artificial Sequence
  Description of Artificial Sequence: Synthetic oligonucleotide
  Sense strand starting at position 542 of SEQ ID NO: 588439
uuugaaaguggauguccua

SEQ ID NO: 910153 - RNA, 19 nt, Artificial Sequence
  Description of Artificial Sequence: Synthetic oligonucleotide
  Antisense strand to SEQ ID NO: 910152
uaggacauccacuuucaaa

SEQ ID NO: 910154 - RNA, 19 nt, Artificial Sequence
  Description of Artificial Sequence: Synthetic oligonucleotide
  Sense strand starting at position 855 of SEQ ID NO: 588439
cuagaauagcgauaucacc

SEQ ID NO: 910155 - RNA, 19 nt, Artificial Sequence
  Description of Artificial Sequence: Synthetic oligonucleotide
  Antisense strand to SEQ ID NO: 910154
ggugauaucgcuauucuag

SEQ ID NO: 910156 - RNA, 19 nt, Artificial Sequence
  Description of Artificial Sequence: Synthetic oligonucleotide
  Sense strand starting at position 890 of SEQ ID NO: 588439
uggugaugcccuuaagaac

SEQ ID NO: 910157 - RNA, 19 nt, Artificial Sequence
  Description of Artificial Sequence: Synthetic oligonucleotide
  Antisense strand to SEQ ID NO: 910156
guucuuaagggcaucacca

SEQ ID NO: 910158 - RNA, 19 nt, Artificial Sequence
  Description of Artificial Sequence: Synthetic oligonucleotide
  Sense strand starting at position 929 of SEQ ID NO: 588439
guaaauucucaagaugcuu

SEQ ID NO: 910159 - RNA, 19 nt, Artificial Sequence
  Description of Artificial Sequence: Synthetic oligonucleotide
  Antisense strand to SEQ ID NO: 910158
aagcaucuugagaauuuac

SEQ ID NO: 910160 - RNA, 19 nt, Artificial Sequence
  Description of Artificial Sequence: Synthetic oligonucleotide
  Sense strand starting at position 993 of SEQ ID NO: 588439
agaugugggucaccacaga

SEQ ID NO: 910161 - RNA, 19 nt, Artificial Sequence
  Description of Artificial Sequence: Synthetic oligonucleotide
  Antisense strand to SEQ ID NO: 910160
ucuguggugacccacaucu

SEQ ID NO: 910162 - RNA, 19 nt, Artificial Sequence
  Description of Artificial Sequence: Synthetic oligonucleotide
  Sense strand starting at position 1091 of SEQ ID NO: 588439
cggucaagagguuaagugu

SEQ ID NO: 910163 - RNA, 19 nt, Artificial Sequence
  Description of Artificial Sequence: Synthetic oligonucleotide
  Antisense strand to SEQ ID NO: 910162
acacuuaaccucuugaccg

SEQ ID NO: 910164 - RNA, 19 nt, Artificial Sequence
  Description of Artificial Sequence: Synthetic oligonucleotide
  Sense strand starting at position 2020 of SEQ ID NO: 588439
agcguuuguggcucuaagu

SEQ ID NO: 910165 - RNA, 19 nt, Artificial Sequence
  Description of Artificial Sequence: Synthetic oligonucleotide
  Antisense strand to SEQ ID NO: 910164
acuuagagccacaaacgcu

SEQ ID NO: 910166 - RNA, 19 nt, Artificial Sequence
  Description of Artificial Sequence: Synthetic oligonucleotide
  Sense strand starting at position 2225 of SEQ ID NO: 588439
caagguuugcuguaaucug

SEQ ID NO: 910167 - RNA, 19 nt, Artificial Sequence
  Description of Artificial Sequence: Synthetic oligonucleotide
  Antisense strand to SEQ ID NO: 910166
cagauuacagcaaaccuug

SEQ ID NO: 910168 - RNA, 19 nt, Artificial Sequence
  Description of Artificial Sequence: Synthetic oligonucleotide
  Sense strand starting at position 2486 of SEQ ID NO: 588439
uuggucagcucggcaauuu

SEQ ID NO: 910169 - RNA, 19 nt, Artificial Sequence
  Description of Artificial Sequence: Synthetic oligonucleotide
  Antisense strand to SEQ ID NO: 910168
aaauugccgagcugaccaa

SEQ ID NO: 910170 - RNA, 19 nt, Artificial Sequence
  Description of Artificial Sequence: Synthetic oligonucleotide
  Sense strand starting at position 2495 of SEQ ID NO: 588439
ucggcaauuugccuguaaa

SEQ ID NO: 910171 - RNA, 19 nt, Artificial Sequence
  Description of Artificial Sequence: Synthetic oligonucleotide
  Antisense strand to SEQ ID NO: 910170
uuuacaggcaaauugccga

SEQ ID NO: 910172 - RNA, 19 nt, Artificial Sequence
  Description of Artificial Sequence: Synthetic oligonucleotide
  Sense strand starting at position 2496 of SEQ ID NO: 588439
cggcaauuugccuguaaag

SEQ ID NO: 910173 - RNA, 19 nt, Artificial Sequence
  Description of Artificial Sequence: Synthetic oligonucleotide
  Antisense strand to SEQ ID NO: 910172
cuuuacaggcaaauugccg

SEQ ID NO: 910174 - RNA, 19 nt, Artificial Sequence
  Description of Artificial Sequence: Synthetic oligonucleotide
  Sense strand starting at position 2588 of SEQ ID NO: 588439
gcaagagcccaggguaaau

SEQ ID NO: 910175 - RNA, 19 nt, Artificial Sequence
  Description of Artificial Sequence: Synthetic oligonucleotide
  Antisense strand to SEQ ID NO: 910174
auuuacccugggcucuugc

SEQ ID NO: 910176 - RNA, 19 nt, Artificial Sequence
  Description of Artificial Sequence: Synthetic oligonucleotide
  Sense strand starting at position 2650 of SEQ ID NO: 588439
ggcugauugcuuugcauuu

SEQ ID NO: 910177 - RNA, 19 nt, Artificial Sequence
  Description of Artificial Sequence: Synthetic oligonucleotide
  Antisense strand to SEQ ID NO: 910176
aaaugcaaagcaaucagcc

SEQ ID NO: 910178 - RNA, 19 nt, Artificial Sequence
  Description of Artificial Sequence: Synthetic oligonucleotide
  Sense strand starting at position 2680 of SEQ ID NO: 588439
agacaccugcuuuguagaa

SEQ ID NO: 910179 - RNA, 19 nt, Artificial Sequence
  Description of Artificial Sequence: Synthetic oligonucleotide
  Antisense strand to SEQ ID NO: 910178
uucuacaaagcaggugucu

SEQ ID NO: 910180 - RNA, 19 nt, Artificial Sequence
  Description of Artificial Sequence: Synthetic oligonucleotide
  Sense strand starting at position 2681 of SEQ ID NO: 588439
gacaccugcuuuguagaaa

SEQ ID NO: 910181 - RNA, 19 nt, Artificial Sequence
  Description of Artificial Sequence: Synthetic oligonucleotide
  Antisense strand to SEQ ID NO: 910180
uuucuacaaagcagguguc

SEQ ID NO: 910182 - RNA, 19 nt, Artificial Sequence
  Description of Artificial Sequence: Synthetic oligonucleotide
  Sense strand starting at position 2818 of SEQ ID NO: 588439
aaguuugagcagcauuaau

SEQ ID NO: 910183 - RNA, 19 nt, Artificial Sequence
  Description of Artificial Sequence: Synthetic oligonucleotide
  Antisense strand to SEQ ID NO: 910182
auuaaugcugcucaaacuu

SEQ ID NO: 910184 - RNA, 19 nt, Artificial Sequence
  Description of Artificial Sequence: Synthetic oligonucleotide
  Sense strand starting at position 2952 of SEQ ID NO: 588439
uccuauuggccacagcaau

SEQ ID NO: 910185 - RNA, 19 nt, Artificial Sequence
  Description of Artificial Sequence: Synthetic oligonucleotide
  Antisense strand to SEQ ID NO: 910184
auugcuguggccaauagga

SEQ ID NO: 910186 - RNA, 19 nt, Artificial Sequence
  Description of Artificial Sequence: Synthetic oligonucleotide
  Sense strand starting at position 2993 of SEQ ID NO: 588439
caguauaggccauaugcua

SEQ ID NO: 910187 - RNA, 19 nt, Artificial Sequence
  Description of Artificial Sequence: Synthetic oligonucleotide
  Antisense strand to SEQ ID NO: 910186
uagcauauggccuauacug

SEQ ID NO: 910188 - RNA, 19 nt, Artificial Sequence
  Description of Artificial Sequence: Synthetic oligonucleotide
  Sense strand starting at position 3107 of SEQ ID NO: 588439
ggagcacauugaguggaau

SEQ ID NO: 910189 - RNA, 19 nt, Artificial Sequence
  Description of Artificial Sequence: Synthetic oligonucleotide
  Antisense strand to SEQ ID NO: 910188
auuccacucaaugugcucc

SEQ ID NO: 910190 - RNA, 19 nt, Artificial Sequence
  Description of Artificial Sequence: Synthetic oligonucleotide
  Sense strand starting at position 3398 of SEQ ID NO: 588439
auaagaucucuuggcuucu

SEQ ID NO: 910191 - RNA, 19 nt, Artificial Sequence
  Description of Artificial Sequence: Synthetic oligonucleotide
  Antisense strand to SEQ ID NO: 910190
agaagccaagagaucuuau

SEQ ID NO: 910192 - RNA, 19 nt, Artificial Sequence
  Description of Artificial Sequence: Synthetic oligonucleotide
  Sense strand starting at position 3526 of SEQ ID NO: 588439
cugaccuauuagguuuaaa

SEQ ID NO: 910193 - RNA, 19 nt, Artificial Sequence
  Description of Artificial Sequence: Synthetic oligonucleotide
  Antisense strand to SEQ ID NO: 910192
uuuaaaccuaauaggucag

SEQ ID NO: 910194 - RNA, 19 nt, Artificial Sequence
  Description of Artificial Sequence: Synthetic oligonucleotide
  Sense strand starting at position 3529 of SEQ ID NO: 588439
accuauuagguuuaaaguu

SEQ ID NO: 910195 - RNA, 19 nt, Artificial Sequence
  Description of Artificial Sequence: Synthetic oligonucleotide
  Antisense strand to SEQ ID NO: 910194
aacuuuaaaccuaauaggu

SEQ ID NO: 910196 - RNA, 19 nt, Artificial Sequence
  Description of Artificial Sequence: Synthetic oligonucleotide
  Sense strand starting at position 3536 of SEQ ID NO: 588439
agguuuaaaguuggcaaga

SEQ ID NO: 910197 - RNA, 19 nt, Artificial Sequence
  Description of Artificial Sequence: Synthetic oligonucleotide
  Antisense strand to SEQ ID NO: 910196
ucuugccaacuuuaaaccu

SEQ ID NO: 910198 - RNA, 19 nt, Artificial Sequence
  Description of Artificial Sequence: Synthetic oligonucleotide
  Sense strand starting at position 3537 of SEQ ID NO: 588439
gguuuaaaguuggcaagau

SEQ ID NO: 910199 - RNA, 19 nt, Artificial Sequence
  Description of Artificial Sequence: Synthetic oligonucleotide
  Antisense strand to SEQ ID NO: 910198
aucuugccaacuuuaaacc

SEQ ID NO: 910200 - RNA, 19 nt, Artificial Sequence
  Description of Artificial Sequence: Synthetic oligonucleotide
  Sense strand starting at position 3585 of SEQ ID NO: 588439
agggcaaaucuguacaacu

SEQ ID NO: 910201 - RNA, 19 nt, Artificial Sequence
  Description of Artificial Sequence: Synthetic oligonucleotide
  Antisense strand to SEQ ID NO: 910200
aguuguacagauuugcccu

SEQ ID NO: 910202 - RNA, 19 nt, Artificial Sequence
  Description of Artificial Sequence: Synthetic oligonucleotide
  Sense strand starting at position 3587 of SEQ ID NO: 588439
ggcaaaucuguacaacuuu

SEQ ID NO: 910203 - RNA, 19 nt, Artificial Sequence
  Description of Artificial Sequence: Synthetic oligonucleotide
  Antisense strand to SEQ ID NO: 910202
aaaguuguacagauuugcc

SEQ ID NO: 910204 - RNA, 19 nt, Artificial Sequence
  Description of Artificial Sequence: Synthetic oligonucleotide
  Sense strand starting at position 3616 of SEQ ID NO: 588439
ucagcuuggcaguauauau

SEQ ID NO: 910205 - RNA, 19 nt, Artificial Sequence
  Description of Artificial Sequence: Synthetic oligonucleotide
  Antisense strand to SEQ ID NO: 910204
auauauacugccaagcuga

SEQ ID NO: 910206 - RNA, 19 nt, Artificial Sequence
  Description of Artificial Sequence: Synthetic oligonucleotide
  Sense strand starting at position 3830 of SEQ ID NO: 588439
gccauuaaauauguggaua

SEQ ID NO: 910207 - RNA, 19 nt, Artificial Sequence
  Description of Artificial Sequence: Synthetic oligonucleotide
  Antisense strand to SEQ ID NO: 910206
uauccacauauuuaauggc

SEQ ID NO: 910208 - RNA, 19 nt, Artificial Sequence
  Description of Artificial Sequence: Synthetic oligonucleotide
  Sense strand starting at position 3835 of SEQ ID NO: 588439
uaaauauguggauaugcga

SEQ ID NO: 910209 - RNA, 19 nt, Artificial Sequence
  Description of Artificial Sequence: Synthetic oligonucleotide
  Antisense strand to SEQ ID NO: 910208
ucgcauauccacauauuua

SEQ ID NO: 910210 - RNA, 19 nt, Artificial Sequence
  Description of Artificial Sequence: Synthetic oligonucleotide
  Sense strand starting at position 3841 of SEQ ID NO: 588439
uguggauaugcgaguagua

SEQ ID NO: 910211 - RNA, 19 nt, Artificial Sequence
  Description of Artificial Sequence: Synthetic oligonucleotide
  Antisense strand to SEQ ID NO: 910210
uacuacucgcauauccaca

SEQ ID NO: 910212 - RNA, 19 nt, Artificial Sequence
  Description of Artificial Sequence: Synthetic oligonucleotide
  Sense strand starting at position 3843 of SEQ ID NO: 588439
uggauaugcgaguaguaaa

SEQ ID NO: 910213 - RNA, 19 nt, Artificial Sequence
  Description of Artificial Sequence: Synthetic oligonucleotide
  Antisense strand to SEQ ID NO: 910212
uuuacuacucgcauaucca

SEQ ID NO: 910214 - RNA, 19 nt, Artificial Sequence
  Description of Artificial Sequence: Synthetic oligonucleotide
  Sense strand starting at position 3850 of SEQ ID NO: 588439
gcgaguaguaaacauguga

SEQ ID NO: 910215 - RNA, 19 nt, Artificial Sequence
  Description of Artificial Sequence: Synthetic oligonucleotide
  Antisense strand to SEQ ID NO: 910214
ucacauguuuacuacucgc

SEQ ID NO: 910216 - RNA, 19 nt, Artificial Sequence
  Description of Artificial Sequence: Synthetic oligonucleotide
  Sense strand starting at position 3949 of SEQ ID NO: 588439
guauaagaauacgcauaca

SEQ ID NO: 910217 - RNA, 19 nt, Artificial Sequence
  Description of Artificial Sequence: Synthetic oligonucleotide
  Antisense strand to SEQ ID NO: 910216
uguaugcguauucuuauac

SEQ ID NO: 910218 - RNA, 19 nt, Artificial Sequence
  Description of Artificial Sequence: Synthetic oligonucleotide
  Sense strand starting at position 269 of SEQ ID NO: 588455
guugcucuugggaguguga

SEQ ID NO: 910219 - RNA, 19 nt, Artificial Sequence
  Description of Artificial Sequence: Synthetic oligonucleotide
  Antisense strand to SEQ ID NO: 910218
ucacacucccaagagcaac

SEQ ID NO: 910220 - RNA, 19 nt, Artificial Sequence
  Description of Artificial Sequence: Synthetic oligonucleotide
  Sense strand starting at position 493 of SEQ ID NO: 588455
uuuccauccgcgcuuuaaa

SEQ ID NO: 910221 - RNA, 19 nt, Artificial Sequence
  Description of Artificial Sequence: Synthetic oligonucleotide
  Antisense strand to SEQ ID NO: 910220
uuuaaagcgcggauggaaa

SEQ ID NO: 910222 - RNA, 19 nt, Artificial Sequence
  Description of Artificial Sequence: Synthetic oligonucleotide
  Sense strand starting at position 494 of SEQ ID NO: 588455
uuccauccgcgcuuuaaau

SEQ ID NO: 910223 - RNA, 19 nt, Artificial Sequence
  Description of Artificial Sequence: Synthetic oligonucleotide
  Antisense strand to SEQ ID NO: 910222
auuuaaagcgcggauggaa

SEQ ID NO: 910224 - RNA, 19 nt, Artificial Sequence
  Description of Artificial Sequence: Synthetic oligonucleotide
  Sense strand starting at position 568 of SEQ ID NO: 588455
aucguuaagcaauaucaaa

SEQ ID NO: 910225 - RNA, 19 nt, Artificial Sequence
  Description of Artificial Sequence: Synthetic oligonucleotide
  Antisense strand to SEQ ID NO: 910224
uuugauauugcuuaacgau

SEQ ID NO: 910226 - RNA, 19 nt, Artificial Sequence
  Description of Artificial Sequence: Synthetic oligonucleotide
  Sense strand starting at position 730 of SEQ ID NO: 588455
cgaugcugaucacuggaau

SEQ ID NO: 910227 - RNA, 19 nt, Artificial Sequence
  Description of Artificial Sequence: Synthetic oligonucleotide
  Antisense strand to SEQ ID NO: 910226
auuccagugaucagcaucg

SEQ ID NO: 910228 - RNA, 19 nt, Artificial Sequence
  Description of Artificial Sequence: Synthetic oligonucleotide
  Sense strand starting at position 731 of SEQ ID NO: 588455
gaugcugaucacuggaaug

SEQ ID NO: 910229 - RNA, 19 nt, Artificial Sequence
  Description of Artificial Sequence: Synthetic oligonucleotide
  Antisense strand to SEQ ID NO: 910228
cauuccagugaucagcauc

SEQ ID NO: 910230 - RNA, 19 nt, Artificial Sequence
  Description of Artificial Sequence: Synthetic oligonucleotide
  Sense strand starting at position 742 of SEQ ID NO: 588455
cuggaaugugcaggacuaa

SEQ ID NO: 910231 - RNA, 19 nt, Artificial Sequence
  Description of Artificial Sequence: Synthetic oligonucleotide
  Antisense strand to SEQ ID NO: 910230
uuaguccugcacauuccag

SEQ ID NO: 910232 - RNA, 19 nt, Artificial Sequence
  Description of Artificial Sequence: Synthetic oligonucleotide
  Sense strand starting at position 2294 of SEQ ID NO: 588455
cuaugagccggugagaauu

SEQ ID NO: 910233 - RNA, 19 nt, Artificial Sequence
  Description of Artificial Sequence: Synthetic oligonucleotide
  Antisense strand to SEQ ID NO: 910232
aauucucaccggcucauag

SEQ ID NO: 910234 - RNA, 19 nt, Artificial Sequence
  Description of Artificial Sequence: Synthetic oligonucleotide
  Sense strand starting at position 2421 of SEQ ID NO: 588455
ucuagcuaaggguauuaaa

SEQ ID NO: 910235 - RNA, 19 nt, Artificial Sequence
  Description of Artificial Sequence: Synthetic oligonucleotide
  Antisense strand to SEQ ID NO: 910234
uuuaauacccuuagcuaga

SEQ ID NO: 910236 - RNA, 19 nt, Artificial Sequence
  Description of Artificial Sequence: Synthetic oligonucleotide
  Sense strand starting at position 2487 of SEQ ID NO: 588455
gcaugugagccuuugcauu

SEQ ID NO: 910237 - RNA, 19 nt, Artificial Sequence
  Description of Artificial Sequence: Synthetic oligonucleotide
  Antisense strand to SEQ ID NO: 910236
aaugcaaaggcucacaugc

SEQ ID NO: 910238 - RNA, 19 nt, Artificial Sequence
  Description of Artificial Sequence: Synthetic oligonucleotide
  Sense strand starting at position 2637 of SEQ ID NO: 588455
cccaguuuagaucaagagu

SEQ ID NO: 910239 - RNA, 19 nt, Artificial Sequence
  Description of Artificial Sequence: Synthetic oligonucleotide
  Antisense strand to SEQ ID NO: 910238
acucuugaucuaaacuggg

SEQ ID NO: 910240 - RNA, 19 nt, Artificial Sequence
  Description of Artificial Sequence: Synthetic oligonucleotide
  Sense strand starting at position 2660 of SEQ ID NO: 588455
agaucacaguuuguacuaa

SEQ ID NO: 910241 - RNA, 19 nt, Artificial Sequence
  Description of Artificial Sequence: Synthetic oligonucleotide
  Antisense strand to SEQ ID NO: 910240
uuaguacaaacugugaucu

SEQ ID NO: 910242 - RNA, 19 nt, Artificial Sequence
  Description of Artificial Sequence: Synthetic oligonucleotide
  Sense strand starting at position 2693 of SEQ ID NO: 588455
augguaauacagugaaguc

SEQ ID NO: 910243 - RNA, 19 nt, Artificial Sequence
  Description of Artificial Sequence: Synthetic oligonucleotide
  Antisense strand to SEQ ID NO: 910242
gacuucacuguauuaccau

SEQ ID NO: 910244 - RNA, 19 nt, Artificial Sequence
  Description of Artificial Sequence: Synthetic oligonucleotide
  Sense strand starting at position 2694 of SEQ ID NO: 588455
ugguaauacagugaaguca

SEQ ID NO: 910245 - RNA, 19 nt, Artificial Sequence
  Description of Artificial Sequence: Synthetic oligonucleotide
  Antisense strand to SEQ ID NO: 910244
ugacuucacuguauuacca

SEQ ID NO: 910246 - RNA, 19 nt, Artificial Sequence
  Description of Artificial Sequence: Synthetic oligonucleotide
  Sense strand starting at position 2793 of SEQ ID NO: 588455
gugguuugcacauauacag

SEQ ID NO: 910247 - RNA, 19 nt, Artificial Sequence
  Description of Artificial Sequence: Synthetic oligonucleotide
  Antisense strand to SEQ ID NO: 910246
cuguauaugugcaaaccac

SEQ ID NO: 910248 - RNA, 19 nt, Artificial Sequence
  Description of Artificial Sequence: Synthetic oligonucleotide
  Sense strand starting at position 2800 of SEQ ID NO: 588455
gcacauauacaguagauua

SEQ ID NO: 910249 - RNA, 19 nt, Artificial Sequence
  Description of Artificial Sequence: Synthetic oligonucleotide
  Antisense strand to SEQ ID NO: 910248
uaaucuacuguauaugugc

SEQ ID NO: 910250 - RNA, 19 nt, Artificial Sequence
  Description of Artificial Sequence: Synthetic oligonucleotide
  Sense strand starting at position 3070 of SEQ ID NO: 588455
aagagacucuaguuaagua

SEQ ID NO: 910251 - RNA, 19 nt, Artificial Sequence
  Description of Artificial Sequence: Synthetic oligonucleotide
  Antisense strand to SEQ ID NO: 910250
uacuuaacuagagucucuu

SEQ ID NO: 910252 - RNA, 19 nt, Artificial Sequence
  Description of Artificial Sequence: Synthetic oligonucleotide
  Sense strand starting at position 3129 of SEQ ID NO: 588455
agcccagaucuuuaaaggu

SEQ ID NO: 910253 - RNA, 19 nt, Artificial Sequence
  Description of Artificial Sequence: Synthetic oligonucleotide
  Antisense strand to SEQ ID NO: 910252
accuuuaaagaucugggcu

SEQ ID NO: 910254 - RNA, 19 nt, Artificial Sequence
  Description of Artificial Sequence: Synthetic oligonucleotide
  Sense strand starting at position 3242 of SEQ ID NO: 588455
auaguagugggcugaauga

SEQ ID NO: 910255 - RNA, 19 nt, Artificial Sequence
  Description of Artificial Sequence: Synthetic oligonucleotide
  Antisense strand to SEQ ID NO: 910254
ucauucagcccacuacuau

SEQ ID NO: 910256 - RNA, 19 nt, Artificial Sequence
  Description of Artificial Sequence: Synthetic oligonucleotide
  Sense strand starting at position 3275 of SEQ ID NO: 588455
ccuccugaagccugagaga

SEQ ID NO: 910257 - RNA, 19 nt, Artificial Sequence
  Description of Artificial Sequence: Synthetic oligonucleotide
  Antisense strand to SEQ ID NO: 910256
ucucucaggcuucaggagg

SEQ ID NO: 910258 - RNA, 19 nt, Artificial Sequence
  Description of Artificial Sequence: Synthetic oligonucleotide
  Sense strand starting at position 3355 of SEQ ID NO: 588455
gauuccacugauugagauc

SEQ ID NO: 910259 - RNA, 19 nt, Artificial Sequence
  Description of Artificial Sequence: Synthetic oligonucleotide
  Antisense strand to SEQ ID NO: 910258
gaucucaaucaguggaauc

SEQ ID NO: 910260 - RNA, 19 nt, Artificial Sequence
  Description of Artificial Sequence: Synthetic oligonucleotide
  Sense strand starting at position 3404 of SEQ ID NO: 588455
cuugcauugcaggaagauu

SEQ ID NO: 910261 - RNA, 19 nt, Artificial Sequence
  Description of Artificial Sequence: Synthetic oligonucleotide
  Antisense strand to SEQ ID NO: 910260
aaucuuccugcaaugcaag

SEQ ID NO: 910262 - RNA, 19 nt, Artificial Sequence
  Description of Artificial Sequence: Synthetic oligonucleotide
  Sense strand starting at position 3417 of SEQ ID NO: 588455
aagauuggguaucuacuaa

SEQ ID NO: 910263 - RNA, 19 nt, Artificial Sequence
  Description of Artificial Sequence: Synthetic oligonucleotide
  Antisense strand to SEQ ID NO: 910262
uuaguagauacccaaucuu

SEQ ID NO: 910264 - RNA, 19 nt, Artificial Sequence
  Description of Artificial Sequence: Synthetic oligonucleotide
  Sense strand starting at position 3429 of SEQ ID NO: 588455
cuacuaauuguguaguaag

SEQ ID NO: 910265 - RNA, 19 nt, Artificial Sequence
  Description of Artificial Sequence: Synthetic oligonucleotide
  Antisense strand to SEQ ID NO: 910264
cuuacuacacaauuaguag

SEQ ID NO: 910266 - RNA, 19 nt, Artificial Sequence
  Description of Artificial Sequence: Synthetic oligonucleotide
  Sense strand starting at position 3436 of SEQ ID NO: 588455
uuguguaguaaggagguau

SEQ ID NO: 910267 - RNA, 19 nt, Artificial Sequence
  Description of Artificial Sequence: Synthetic oligonucleotide
  Antisense strand to SEQ ID NO: 910266
auaccuccuuacuacacaa

SEQ ID NO: 910268 - RNA, 19 nt, Artificial Sequence
  Description of Artificial Sequence: Synthetic oligonucleotide
  Sense strand starting at position 3449 of SEQ ID NO: 588455
agguauauuugucuguacu

SEQ ID NO: 910269 - RNA, 19 nt, Artificial Sequence
  Description of Artificial Sequence: Synthetic oligonucleotide
  Antisense strand to SEQ ID NO: 910268
aguacagacaaauauaccu

SEQ ID NO: 910270 - RNA, 19 nt, Artificial Sequence
  Description of Artificial Sequence: Synthetic oligonucleotide
  Sense strand starting at position 3450 of SEQ ID NO: 588455
gguauauuugucuguacuc

SEQ ID NO: 910271 - RNA, 19 nt, Artificial Sequence
  Description of Artificial Sequence: Synthetic oligonucleotide
  Antisense strand to SEQ ID NO: 910270
gaguacagacaaauauacc

SEQ ID NO: 910272 - RNA, 19 nt, Artificial Sequence
  Description of Artificial Sequence: Synthetic oligonucleotide
  Sense strand starting at position 3496 of SEQ ID NO: 588455
auaacuuucuagguuauga

SEQ ID NO: 910273 - RNA, 19 nt, Artificial Sequence
  Description of Artificial Sequence: Synthetic oligonucleotide
  Antisense strand to SEQ ID NO: 910272
ucauaaccuagaaaguuau

SEQ ID NO: 910274 - RNA, 19 nt, Artificial Sequence
  Description of Artificial Sequence: Synthetic oligonucleotide
  Sense strand starting at position 3562 of SEQ ID NO: 588455
cagaucagguucucaagaa

SEQ ID NO: 910275 - RNA, 19 nt, Artificial Sequence
  Description of Artificial Sequence: Synthetic oligonucleotide
  Antisense strand to SEQ ID NO: 910274
uucuugagaaccugaucug

SEQ ID NO: 910276 - RNA, 19 nt, Artificial Sequence
  Description of Artificial Sequence: Synthetic oligonucleotide
  Sense strand starting at position 3592 of SEQ ID NO: 588455
uggagaauaguuugaucug

SEQ ID NO: 910277 - RNA, 19 nt, Artificial Sequence
  Description of Artificial Sequence: Synthetic oligonucleotide
  Antisense strand to SEQ ID NO: 910276
cagaucaaacuauucucca

SEQ ID NO: 910278 - RNA, 19 nt, Artificial Sequence
  Description of Artificial Sequence: Synthetic oligonucleotide
  Sense strand starting at position 3595 of SEQ ID NO: 588455
agaauaguuugaucugauc

SEQ ID NO: 910279 - RNA, 19 nt, Artificial Sequence
  Description of Artificial Sequence: Synthetic oligonucleotide
  Antisense strand to SEQ ID NO: 910278
gaucagaucaaacuauucu

SEQ ID NO: 910280 - RNA, 19 nt, Artificial Sequence
  Description of Artificial Sequence: Synthetic oligonucleotide
  Sense strand starting at position 3601 of SEQ ID NO: 588455
guuugaucugaucauuaau

SEQ ID NO: 910281 - RNA, 19 nt, Artificial Sequence
  Description of Artificial Sequence: Synthetic oligonucleotide
  Antisense strand to SEQ ID NO: 910280
auuaaugaucagaucaaac

SEQ ID NO: 910282 - RNA, 19 nt, Artificial Sequence
  Description of Artificial Sequence: Synthetic oligonucleotide
  Sense strand starting at position 3635 of SEQ ID NO: 588455
cucuauaugcauuagguuu

SEQ ID NO: 910283 - RNA, 19 nt, Artificial Sequence
  Description of Artificial Sequence: Synthetic oligonucleotide
  Antisense strand to SEQ ID NO: 910282
aaaccuaaugcauauagag

SEQ ID NO: 910284 - RNA, 19 nt, Artificial Sequence
  Description of Artificial Sequence: Synthetic oligonucleotide
  Sense strand starting at position 3663 of SEQ ID NO: 588455
ucaugacugccuugaggga

SEQ ID NO: 910285 - RNA, 19 nt, Artificial Sequence
  Description of Artificial Sequence: Synthetic oligonucleotide
  Antisense strand to SEQ ID NO: 910284
ucccucaaggcagucauga

SEQ ID NO: 910286 - RNA, 19 nt, Artificial Sequence
  Description of Artificial Sequence: Synthetic oligonucleotide
  Sense strand starting at position 3667 of SEQ ID NO: 588455
gacugccuugagggaauaa

SEQ ID NO: 910287 - RNA, 19 nt, Artificial Sequence
  Description of Artificial Sequence: Synthetic oligonucleotide
  Antisense strand to SEQ ID NO: 910286
uuauucccucaaggcaguc

SEQ ID NO: 910288 - RNA, 19 nt, Artificial Sequence
  Description of Artificial Sequence: Synthetic oligonucleotide
  Sense strand starting at position 3757 of SEQ ID NO: 588455
cuacuuaaaccuggugaau

SEQ ID NO: 910289 - RNA, 19 nt, Artificial Sequence
  Description of Artificial Sequence: Synthetic oligonucleotide
  Antisense strand to SEQ ID NO: 910288
auucaccagguuuaaguag

SEQ ID NO: 910290 - RNA, 19 nt, Artificial Sequence
  Description of Artificial Sequence: Synthetic oligonucleotide
  Sense strand starting at position 3769 of SEQ ID NO: 588455
ggugaauacugagugaaca

SEQ ID NO: 910291 - RNA, 19 nt, Artificial Sequence
  Description of Artificial Sequence: Synthetic oligonucleotide
  Antisense strand to SEQ ID NO: 910290
uguucacucaguauucacc

SEQ ID NO: 910292 - RNA, 19 nt, Artificial Sequence
  Description of Artificial Sequence: Synthetic oligonucleotide
  Sense strand starting at position 3770 of SEQ ID NO: 588455
gugaauacugagugaacaa

SEQ ID NO: 910293 - RNA, 19 nt, Artificial Sequence
  Description of Artificial Sequence: Synthetic oligonucleotide
  Antisense strand to SEQ ID NO: 910292
uuguucacucaguauucac

SEQ ID NO: 910294 - RNA, 19 nt, Artificial Sequence
  Description of Artificial Sequence: Synthetic oligonucleotide
  Sense strand starting at position 3889 of SEQ ID NO: 588455
uuucuuuguccauaucaug

SEQ ID NO: 910295 - RNA, 19 nt, Artificial Sequence
  Description of Artificial Sequence: Synthetic oligonucleotide
  Antisense strand to SEQ ID NO: 910294
caugauauggacaaagaaa

SEQ ID NO: 910296 - RNA, 19 nt, Artificial Sequence
  Description of Artificial Sequence: Synthetic oligonucleotide
  Sense strand starting at position 3911 of SEQ ID NO: 588455
gucugagcauaucugacaa

SEQ ID NO: 910297 - RNA, 19 nt, Artificial Sequence
  Description of Artificial Sequence: Synthetic oligonucleotide
  Antisense strand to SEQ ID NO: 910296
uugucagauaugcucagac

SEQ ID NO: 910298 - RNA, 19 nt, Artificial Sequence
  Description of Artificial Sequence: Synthetic oligonucleotide
  Sense strand starting at position 345 of SEQ ID NO: 588462
cuguuuagauaggcucaga

SEQ ID NO: 910299 - RNA, 19 nt, Artificial Sequence
  Description of Artificial Sequence: Synthetic oligonucleotide
  Antisense strand to SEQ ID NO: 910298
ucugagccuaucuaaacag

SEQ ID NO: 910300 - RNA, 19 nt, Artificial Sequence
  Description of Artificial Sequence: Synthetic oligonucleotide
  Sense strand starting at position 382 of SEQ ID NO: 588462
agugucgugagauaguaaa

SEQ ID NO: 910301 - RNA, 19 nt, Artificial Sequence
  Description of Artificial Sequence: Synthetic oligonucleotide
  Antisense strand to SEQ ID NO: 910300
uuuacuaucucacgacacu

SEQ ID NO: 910302 - RNA, 19 nt, Artificial Sequence
  Description of Artificial Sequence: Synthetic oligonucleotide
  Sense strand starting at position 424 of SEQ ID NO: 588462
ucaacaucuuuauuguagu

SEQ ID NO: 910303 - RNA, 19 nt, Artificial Sequence
  Description of Artificial Sequence: Synthetic oligonucleotide
  Antisense strand to SEQ ID NO: 910302
acuacaauaaagauguuga

SEQ ID NO: 910304 - RNA, 19 nt, Artificial Sequence
  Description of Artificial Sequence: Synthetic oligonucleotide
  Sense strand starting at position 441 of SEQ ID NO: 588462
gugacuugauucucaagug

SEQ ID NO: 910305 - RNA, 19 nt, Artificial Sequence
  Description of Artificial Sequence: Synthetic oligonucleotide
  Antisense strand to SEQ ID NO: 910304
cacuugagaaucaagucac

SEQ ID NO: 910306 - RNA, 19 nt, Artificial Sequence
  Description of Artificial Sequence: Synthetic oligonucleotide
  Sense strand starting at position 525 of SEQ ID NO: 588462
auacuuaaaccugagacgu

SEQ ID NO: 910307 - RNA, 19 nt, Artificial Sequence
  Description of Artificial Sequence: Synthetic oligonucleotide
  Antisense strand to SEQ ID NO: 910306
acgucucagguuuaaguau

SEQ ID NO: 910308 - RNA, 19 nt, Artificial Sequence
  Description of Artificial Sequence: Synthetic oligonucleotide
  Sense strand starting at position 738 of SEQ ID NO: 588462
acgcaguucggugagagaa

SEQ ID NO: 910309 - RNA, 19 nt, Artificial Sequence
  Description of Artificial Sequence: Synthetic oligonucleotide
  Antisense strand to SEQ ID NO: 910308
uucucucaccgaacugcgu

SEQ ID NO: 910310 - RNA, 19 nt, Artificial Sequence
  Description of Artificial Sequence: Synthetic oligonucleotide
  Sense strand starting at position 739 of SEQ ID NO: 588462
cgcaguucggugagagaau

SEQ ID NO: 910311 - RNA, 19 nt, Artificial Sequence
  Description of Artificial Sequence: Synthetic oligonucleotide
  Antisense strand to SEQ ID NO: 910310
auucucucaccgaacugcg

SEQ ID NO: 910312 - RNA, 19 nt, Artificial Sequence
  Description of Artificial Sequence: Synthetic oligonucleotide
  Sense strand starting at position 845 of SEQ ID NO: 588462
cgaauauucuugcuggaaa

SEQ ID NO: 910313 - RNA, 19 nt, Artificial Sequence
  Description of Artificial Sequence: Synthetic oligonucleotide
  Antisense strand to SEQ ID NO: 910312
uuuccagcaagaauauucg

SEQ ID NO: 910314 - RNA, 19 nt, Artificial Sequence
  Description of Artificial Sequence: Synthetic oligonucleotide
  Sense strand starting at position 848 of SEQ ID NO: 588462
auauucuugcuggaaaggu

SEQ ID NO: 910315 - RNA, 19 nt, Artificial Sequence
  Description of Artificial Sequence: Synthetic oligonucleotide
  Antisense strand to SEQ ID NO: 910314
accuuuccagcaagaauau

SEQ ID NO: 910316 - RNA, 19 nt, Artificial Sequence
  Description of Artificial Sequence: Synthetic oligonucleotide
  Sense strand starting at position 852 of SEQ ID NO: 588462
ucuugcuggaaagguuaaa

SEQ ID NO: 910317 - RNA, 19 nt, Artificial Sequence
  Description of Artificial Sequence: Synthetic oligonucleotide
  Antisense strand to SEQ ID NO: 910316
uuuaaccuuuccagcaaga

SEQ ID NO: 910318 - RNA, 19 nt, Artificial Sequence
  Description of Artificial Sequence: Synthetic oligonucleotide
  Sense strand starting at position 2296 of SEQ ID NO: 588462
uuugaagcuuauguauaca

SEQ ID NO: 910319 - RNA, 19 nt, Artificial Sequence
  Description of Artificial Sequence: Synthetic oligonucleotide
  Antisense strand to SEQ ID NO: 910318
uguauacauaagcuucaaa

SEQ ID NO: 910320 - RNA, 19 nt, Artificial Sequence
  Description of Artificial Sequence: Synthetic oligonucleotide
  Sense strand starting at position 2311 of SEQ ID NO: 588462
uacauuuagccgugcaaca

SEQ ID NO: 910321 - RNA, 19 nt, Artificial Sequence
  Description of Artificial Sequence: Synthetic oligonucleotide
  Antisense strand to SEQ ID NO: 910320
uguugcacggcuaaaugua

SEQ ID NO: 910322 - RNA, 19 nt, Artificial Sequence
  Description of Artificial Sequence: Synthetic oligonucleotide
  Sense strand starting at position 2361 of SEQ ID NO: 588462
cauuauguuguaggaaaua

SEQ ID NO: 910323 - RNA, 19 nt, Artificial Sequence
  Description of Artificial Sequence: Synthetic oligonucleotide
  Antisense strand to SEQ ID NO: 910322
uauuuccuacaacauaaug

SEQ ID NO: 910324 - RNA, 19 nt, Artificial Sequence
  Description of Artificial Sequence: Synthetic oligonucleotide
  Sense strand starting at position 2397 of SEQ ID NO: 588462
cagaucugagucuguagau

SEQ ID NO: 910325 - RNA, 19 nt, Artificial Sequence
  Description of Artificial Sequence: Synthetic oligonucleotide
  Antisense strand to SEQ ID NO: 910324
aucuacagacucagaucug

SEQ ID NO: 910326 - RNA, 19 nt, Artificial Sequence
  Description of Artificial Sequence: Synthetic oligonucleotide
  Sense strand starting at position 2398 of SEQ ID NO: 588462
agaucugagucuguagaug

SEQ ID NO: 910327 - RNA, 19 nt, Artificial Sequence
  Description of Artificial Sequence: Synthetic oligonucleotide
  Antisense strand to SEQ ID NO: 910326
caucuacagacucagaucu

SEQ ID NO: 910328 - RNA, 19 nt, Artificial Sequence
  Description of Artificial Sequence: Synthetic oligonucleotide
  Sense strand starting at position 2403 of SEQ ID NO: 588462
ugagucuguagauggagaa

SEQ ID NO: 910329 - RNA, 19 nt, Artificial Sequence
  Description of Artificial Sequence: Synthetic oligonucleotide
  Antisense strand to SEQ ID NO: 910328
uucuccaucuacagacuca

SEQ ID NO: 910330 - RNA, 19 nt, Artificial Sequence
  Description of Artificial Sequence: Synthetic oligonucleotide
  Sense strand starting at position 2404 of SEQ ID NO: 588462
gagucuguagauggagaaa

SEQ ID NO: 910331 - RNA, 19 nt, Artificial Sequence
  Description of Artificial Sequence: Synthetic oligonucleotide
  Antisense strand to SEQ ID NO: 910330
uuucuccaucuacagacuc

SEQ ID NO: 910332 - RNA, 19 nt, Artificial Sequence
  Description of Artificial Sequence: Synthetic oligonucleotide
  Sense strand starting at position 2464 of SEQ ID NO: 588462
agcaaagggaucugaccua

SEQ ID NO: 910333 - RNA, 19 nt, Artificial Sequence
  Description of Artificial Sequence: Synthetic oligonucleotide
  Antisense strand to SEQ ID NO: 910332
uaggucagaucccuuugcu

SEQ ID NO: 910334 - RNA, 19 nt, Artificial Sequence
  Description of Artificial Sequence: Synthetic oligonucleotide
  Sense strand starting at position 2591 of SEQ ID NO: 588462
aguggucucuauucuaaga

SEQ ID NO: 910335 - RNA, 19 nt, Artificial Sequence
  Description of Artificial Sequence: Synthetic oligonucleotide
  Antisense strand to SEQ ID NO: 910334
ucuuagaauagagaccacu

SEQ ID NO: 910336 - RNA, 19 nt, Artificial Sequence
  Description of Artificial Sequence: Synthetic oligonucleotide
  Sense strand starting at position 2750 of SEQ ID NO: 588462
aguugauagugacugggau

SEQ ID NO: 910337 - RNA, 19 nt, Artificial Sequence
  Description of Artificial Sequence: Synthetic oligonucleotide
  Antisense strand to SEQ ID NO: 910336
aucccagucacuaucaacu

SEQ ID NO: 910338 - RNA, 19 nt, Artificial Sequence
  Description of Artificial Sequence: Synthetic oligonucleotide
  Sense strand starting at position 2751 of SEQ ID NO: 588462
guugauagugacugggauu

SEQ ID NO: 910339 - RNA, 19 nt, Artificial Sequence
  Description of Artificial Sequence: Synthetic oligonucleotide
  Antisense strand to SEQ ID NO: 910338
aaucccagucacuaucaac

SEQ ID NO: 910340 - RNA, 19 nt, Artificial Sequence
  Description of Artificial Sequence: Synthetic oligonucleotide
  Sense strand starting at position 2752 of SEQ ID NO: 588462
uugauagugacugggauua

SEQ ID NO: 910341 - RNA, 19 nt, Artificial Sequence
  Description of Artificial Sequence: Synthetic oligonucleotide
  Antisense strand to SEQ ID NO: 910340
uaaucccagucacuaucaa

SEQ ID NO: 910342 - RNA, 19 nt, Artificial Sequence
  Description of Artificial Sequence: Synthetic oligonucleotide
  Sense strand starting at position 2850 of SEQ ID NO: 588462
aagauacggugacucuuau

SEQ ID NO: 910343 - RNA, 19 nt, Artificial Sequence
  Description of Artificial Sequence: Synthetic oligonucleotide
  Antisense strand to SEQ ID NO: 910342
auaagagucaccguaucuu

SEQ ID NO: 910344 - RNA, 19 nt, Artificial Sequence
  Description of Artificial Sequence: Synthetic oligonucleotide
  Sense strand starting at position 2875 of SEQ ID NO: 588462
ggcuccagcaucugaauga

SEQ ID NO: 910345 - RNA, 19 nt, Artificial Sequence
  Description of Artificial Sequence: Synthetic oligonucleotide
  Antisense strand to SEQ ID NO: 910344
ucauucagaugcuggagcc

SEQ ID NO: 910346 - RNA, 19 nt, Artificial Sequence
  Description of Artificial Sequence: Synthetic oligonucleotide
  Sense strand starting at position 2982 of SEQ ID NO: 588462
uugagauauucaguugagg

SEQ ID NO: 910347 - RNA, 19 nt, Artificial Sequence
  Description of Artificial Sequence: Synthetic oligonucleotide
  Antisense strand to SEQ ID NO: 910346
ccucaacugaauaucucaa

SEQ ID NO: 910348 - RNA, 19 nt, Artificial Sequence
  Description of Artificial Sequence: Synthetic oligonucleotide
  Sense strand starting at position 2998 of SEQ ID NO: 588462
aggccuggagcuuagagaa

SEQ ID NO: 910349 - RNA, 19 nt, Artificial Sequence
  Description of Artificial Sequence: Synthetic oligonucleotide
  Antisense strand to SEQ ID NO: 910348
uucucuaagcuccaggccu

SEQ ID NO: 910350 - RNA, 19 nt, Artificial Sequence
  Description of Artificial Sequence: Synthetic oligonucleotide
  Sense strand starting at position 3026 of SEQ ID NO: 588462
ggacuuccuccaggaaauc

SEQ ID NO: 910351 - RNA, 19 nt, Artificial Sequence
  Description of Artificial Sequence: Synthetic oligonucleotide
  Antisense strand to SEQ ID NO: 910350
gauuuccuggaggaagucc

SEQ ID NO: 910352 - RNA, 19 nt, Artificial Sequence
  Description of Artificial Sequence: Synthetic oligonucleotide
  Sense strand starting at position 3035 of SEQ ID NO: 588462
ccaggaaaucuuugcauag

SEQ ID NO: 910353 - RNA, 19 nt, Artificial Sequence
  Description of Artificial Sequence: Synthetic oligonucleotide
  Antisense strand to SEQ ID NO: 910352
cuaugcaaagauuuccugg

SEQ ID NO: 910354 - RNA, 19 nt, Artificial Sequence
  Description of Artificial Sequence: Synthetic oligonucleotide
  Sense strand starting at position 3227 of SEQ ID NO: 588462
caguaauuggcuuaggaau

SEQ ID NO: 910355 - RNA, 19 nt, Artificial Sequence
  Description of Artificial Sequence: Synthetic oligonucleotide
  Antisense strand to SEQ ID NO: 910354
auuccuaagccaauuacug

SEQ ID NO: 910356 - RNA, 19 nt, Artificial Sequence
  Description of Artificial Sequence: Synthetic oligonucleotide
  Sense strand starting at position 3279 of SEQ ID NO: 588462
agaaguauucugggaaagu

SEQ ID NO: 910357 - RNA, 19 nt, Artificial Sequence
  Description of Artificial Sequence: Synthetic oligonucleotide
  Antisense strand to SEQ ID NO: 910356
acuuucccagaauacuucu

SEQ ID NO: 910358 - RNA, 19 nt, Artificial Sequence
  Description of Artificial Sequence: Synthetic oligonucleotide
  Sense strand starting at position 3353 of SEQ ID NO: 588462
gucuuuguuccaugagaag

SEQ ID NO: 910359 - RNA, 19 nt, Artificial Sequence
  Description of Artificial Sequence: Synthetic oligonucleotide
  Antisense strand to SEQ ID NO: 910358
cuucucauggaacaaagac

SEQ ID NO: 910360 - RNA, 19 nt, Artificial Sequence
  Description of Artificial Sequence: Synthetic oligonucleotide
  Sense strand starting at position 3434 of SEQ ID NO: 588462
aaggcuagauccuugauga

SEQ ID NO: 910361 - RNA, 19 nt, Artificial Sequence
  Description of Artificial Sequence: Synthetic oligonucleotide
  Antisense strand to SEQ ID NO: 910360
ucaucaaggaucuagccuu

SEQ ID NO: 910362 - RNA, 19 nt, Artificial Sequence
  Description of Artificial Sequence: Synthetic oligonucleotide
  Sense strand starting at position 3489 of SEQ ID NO: 588462
cuacuugaggcuuaugaug

SEQ ID NO: 910363 - RNA, 19 nt, Artificial Sequence
  Description of Artificial Sequence: Synthetic oligonucleotide
  Antisense strand to SEQ ID NO: 910362
caucauaagccucaaguag

SEQ ID NO: 910364 - RNA, 19 nt, Artificial Sequence
  Description of Artificial Sequence: Synthetic oligonucleotide
  Sense strand starting at position 3501 of SEQ ID NO: 588462
uaugauguaaggugacaga

SEQ ID NO: 910365 - RNA, 19 nt, Artificial Sequence
  Description of Artificial Sequence: Synthetic oligonucleotide
  Antisense strand to SEQ ID NO: 910364
ucugucaccuuacaucaua

SEQ ID NO: 910366 - RNA, 19 nt, Artificial Sequence
  Description of Artificial Sequence: Synthetic oligonucleotide
  Sense strand starting at position 3508 of SEQ ID NO: 588462
uaaggugacagaugugauu

SEQ ID NO: 910367 - RNA, 19 nt, Artificial Sequence
  Description of Artificial Sequence: Synthetic oligonucleotide
  Antisense strand to SEQ ID NO: 910366
aaucacaucugucaccuua

SEQ ID NO: 910368 - RNA, 19 nt, Artificial Sequence
  Description of Artificial Sequence: Synthetic oligonucleotide
  Sense strand starting at position 3519 of SEQ ID NO: 588462
augugauugcgcuuaguug

SEQ ID NO: 910369 - RNA, 19 nt, Artificial Sequence
  Description of Artificial Sequence: Synthetic oligonucleotide
  Antisense strand to SEQ ID NO: 910368
caacuaagcgcaaucacau

SEQ ID NO: 910370 - RNA, 19 nt, Artificial Sequence
  Description of Artificial Sequence: Synthetic oligonucleotide
  Sense strand starting at position 3528 of SEQ ID NO: 588462
cgcuuaguuguguuugcuu

SEQ ID NO: 910371 - RNA, 19 nt, Artificial Sequence
  Description of Artificial Sequence: Synthetic oligonucleotide
  Antisense strand to SEQ ID NO: 910370
aagcaaacacaacuaagcg

SEQ ID NO: 910372 - RNA, 19 nt, Artificial Sequence
  Description of Artificial Sequence: Synthetic oligonucleotide
  Sense strand starting at position 3634 of SEQ ID NO: 588462
uccuaaaugcuguaaaguc

SEQ ID NO: 910373 - RNA, 19 nt, Artificial Sequence
  Description of Artificial Sequence: Synthetic oligonucleotide
  Antisense strand to SEQ ID NO: 910372
gacuuuacagcauuuagga

SEQ ID NO: 910374 - RNA, 19 nt, Artificial Sequence
  Description of Artificial Sequence: Synthetic oligonucleotide
  Sense strand starting at position 3699 of SEQ ID NO: 588462
agggaugaugccugucuua

SEQ ID NO: 910375 - RNA, 19 nt, Artificial Sequence
  Description of Artificial Sequence: Synthetic oligonucleotide
  Antisense strand to SEQ ID NO: 910374
uaagacaggcaucaucccu

SEQ ID NO: 910376 - RNA, 19 nt, Artificial Sequence
  Description of Artificial Sequence: Synthetic oligonucleotide
  Sense strand starting at position 3749 of SEQ ID NO: 588462
guucuaagcagcuauagag

SEQ ID NO: 910377 - RNA, 19 nt, Artificial Sequence
  Description of Artificial Sequence: Synthetic oligonucleotide
  Antisense strand to SEQ ID NO: 910376
cucuauagcugcuuagaac

SEQ ID NO: 910378 - RNA, 19 nt, Artificial Sequence
  Description of Artificial Sequence: Synthetic oligonucleotide
  Sense strand starting at position 54 of SEQ ID NO: 588476
gcuuauuagagaugcagac

SEQ ID NO: 910379 - RNA, 19 nt, Artificial Sequence
  Description of Artificial Sequence: Synthetic oligonucleotide
  Antisense strand to SEQ ID NO: 910378
gucugcaucucuaauaagc

SEQ ID NO: 910380 - RNA, 19 nt, Artificial Sequence
  Description of Artificial Sequence: Synthetic oligonucleotide
  Sense strand starting at position 96 of SEQ ID NO: 588476
cgagucagaaccugcauuu

SEQ ID NO: 910381 - RNA, 19 nt, Artificial Sequence
  Description of Artificial Sequence: Synthetic oligonucleotide
  Antisense strand to SEQ ID NO: 910380
aaaugcagguucugacucg

SEQ ID NO: 910382 - RNA, 19 nt, Artificial Sequence
  Description of Artificial Sequence: Synthetic oligonucleotide
  Sense strand starting at position 373 of SEQ ID NO: 588476
caguuuagcccgccaagua

SEQ ID NO: 910383 - RNA, 19 nt, Artificial Sequence
  Description of Artificial Sequence: Synthetic oligonucleotide
  Antisense strand to SEQ ID NO: 910382
uacuuggcgggcuaaacug

SEQ ID NO: 910384 - RNA, 19 nt, Artificial Sequence
  Description of Artificial Sequence: Synthetic oligonucleotide
  Sense strand starting at position 676 of SEQ ID NO: 588476
guauaacagcauugacuau

SEQ ID NO: 910385 - RNA, 19 nt, Artificial Sequence
  Description of Artificial Sequence: Synthetic oligonucleotide
  Antisense strand to SEQ ID NO: 910384
auagucaaugcuguuauac

SEQ ID NO: 910386 - RNA, 19 nt, Artificial Sequence
  Description of Artificial Sequence: Synthetic oligonucleotide
  Sense strand starting at position 771 of SEQ ID NO: 588476
auugcuauggcccaucgaa

SEQ ID NO: 910387 - RNA, 19 nt, Artificial Sequence
  Description of Artificial Sequence: Synthetic oligonucleotide
  Antisense strand to SEQ ID NO: 910386
uucgaugggccauagcaau

SEQ ID NO: 910388 - RNA, 19 nt, Artificial Sequence
  Description of Artificial Sequence: Synthetic oligonucleotide
  Sense strand starting at position 797 of SEQ ID NO: 588476
gagagcuguccaugcacaa

SEQ ID NO: 910389 - RNA, 19 nt, Artificial Sequence
  Description of Artificial Sequence: Synthetic oligonucleotide
  Antisense strand to SEQ ID NO: 910388
uugugcauggacagcucuc

SEQ ID NO: 910390 - RNA, 19 nt, Artificial Sequence
  Description of Artificial Sequence: Synthetic oligonucleotide
  Sense strand starting at position 869 of SEQ ID NO: 588476
ccuuguugugcagagggau

SEQ ID NO: 910391 - RNA, 19 nt, Artificial Sequence
  Description of Artificial Sequence: Synthetic oligonucleotide
  Antisense strand to SEQ ID NO: 910390
aucccucugcacaacaagg

SEQ ID NO: 910392 - RNA, 19 nt, Artificial Sequence
  Description of Artificial Sequence: Synthetic oligonucleotide
  Sense strand starting at position 1165 of SEQ ID NO: 588476
auuacuuaggcaugacauu

SEQ ID NO: 910393 - RNA, 19 nt, Artificial Sequence
  Description of Artificial Sequence: Synthetic oligonucleotide
  Antisense strand to SEQ ID NO: 910392
aaugucaugccuaaguaau

SEQ ID NO: 910394 - RNA, 19 nt, Artificial Sequence
  Description of Artificial Sequence: Synthetic oligonucleotide
  Sense strand starting at position 1234 of SEQ ID NO: 588476
ucaagucauguggauccua

SEQ ID NO: 910395 - RNA, 19 nt, Artificial Sequence
  Description of Artificial Sequence: Synthetic oligonucleotide
  Antisense strand to SEQ ID NO: 910394
uaggauccacaugacuuga

SEQ ID NO: 910396 - RNA, 19 nt, Artificial Sequence
  Description of Artificial Sequence: Synthetic oligonucleotide
  Sense strand starting at position 1242 of SEQ ID NO: 588476
uguggauccuaccuauaag

SEQ ID NO: 910397 - RNA, 19 nt, Artificial Sequence
  Description of Artificial Sequence: Synthetic oligonucleotide
  Antisense strand to SEQ ID NO: 910396
cuuauagguaggauccaca

SEQ ID NO: 910398 - RNA, 19 nt, Artificial Sequence
  Description of Artificial Sequence: Synthetic oligonucleotide
  Sense strand starting at position 1342 of SEQ ID NO: 588476
agucaaauguaaccugaaa

SEQ ID NO: 910399 - RNA, 19 nt, Artificial Sequence
  Description of Artificial Sequence: Synthetic oligonucleotide
  Antisense strand to SEQ ID NO: 910398
uuucagguuacauuugacu

SEQ ID NO: 910400 - RNA, 19 nt, Artificial Sequence
  Description of Artificial Sequence: Synthetic oligonucleotide
  Sense strand starting at position 1465 of SEQ ID NO: 588476
ccgaauaauuguuucucca

SEQ ID NO: 910401 - RNA, 19 nt, Artificial Sequence
  Description of Artificial Sequence: Synthetic oligonucleotide
  Antisense strand to SEQ ID NO: 910400
uggagaaacaauuauucgg

SEQ ID NO: 910402 - RNA, 19 nt, Artificial Sequence
  Description of Artificial Sequence: Synthetic oligonucleotide
  Sense strand starting at position 1469 of SEQ ID NO: 588476
auaauuguuucuccaggca

SEQ ID NO: 910403 - RNA, 19 nt, Artificial Sequence
  Description of Artificial Sequence: Synthetic oligonucleotide
  Antisense strand to SEQ ID NO: 910402
ugccuggagaaacaauuau

SEQ ID NO: 910404 - RNA, 19 nt, Artificial Sequence
  Description of Artificial Sequence: Synthetic oligonucleotide
  Sense strand starting at position 1472 of SEQ ID NO: 588476
auuguuucuccaggcaaau

SEQ ID NO: 910405 - RNA, 19 nt, Artificial Sequence
  Description of Artificial Sequence: Synthetic oligonucleotide
  Antisense strand to SEQ ID NO: 910404
auuugccuggagaaacaau

SEQ ID NO: 910406 - RNA, 19 nt, Artificial Sequence
  Description of Artificial Sequence: Synthetic oligonucleotide
  Sense strand starting at position 1525 of SEQ ID NO: 588476
aguaaauuacgguacauca

SEQ ID NO: 910407 - RNA, 19 nt, Artificial Sequence
  Description of Artificial Sequence: Synthetic oligonucleotide
  Antisense strand to SEQ ID NO: 910406
ugauguaccguaauuuacu

SEQ ID NO: 910408 - RNA, 19 nt, Artificial Sequence
  Description of Artificial Sequence: Synthetic oligonucleotide
  Sense strand starting at position 1560 of SEQ ID NO: 588476
gcagccauugaagguaaua

SEQ ID NO: 910409 - RNA, 19 nt, Artificial Sequence
  Description of Artificial Sequence: Synthetic oligonucleotide
  Antisense strand to SEQ ID NO: 910408
uauuaccuucaauggcugc

SEQ ID NO: 910410 - RNA, 19 nt, Artificial Sequence
  Description of Artificial Sequence: Synthetic oligonucleotide
  Sense strand starting at position 1596 of SEQ ID NO: 588476
auacguauugccuauacau

SEQ ID NO: 910411 - RNA, 19 nt, Artificial Sequence
  Description of Artificial Sequence: Synthetic oligonucleotide
  Antisense strand to SEQ ID NO: 910410
auguauaggcaauacguau

SEQ ID NO: 910412 - RNA, 19 nt, Artificial Sequence
  Description of Artificial Sequence: Synthetic oligonucleotide
  Sense strand starting at position 1598 of SEQ ID NO: 588476
acguauugccuauacauaa

SEQ ID NO: 910413 - RNA, 19 nt, Artificial Sequence
  Description of Artificial Sequence: Synthetic oligonucleotide
  Antisense strand to SEQ ID NO: 910412
uuauguauaggcaauacgu

SEQ ID NO: 910414 - RNA, 19 nt, Artificial Sequence
  Description of Artificial Sequence: Synthetic oligonucleotide
  Sense strand starting at position 2294 of SEQ ID NO: 588476
caguauuuaucugacugga

SEQ ID NO: 910415 - RNA, 19 nt, Artificial Sequence
  Description of Artificial Sequence: Synthetic oligonucleotide
  Antisense strand to SEQ ID NO: 910414
uccagucagauaaauacug

SEQ ID NO: 910416 - RNA, 19 nt, Artificial Sequence
  Description of Artificial Sequence: Synthetic oligonucleotide
  Sense strand starting at position 2420 of SEQ ID NO: 588476
cauaaauggcuacgugaaa

SEQ ID NO: 910417 - RNA, 19 nt, Artificial Sequence
  Description of Artificial Sequence: Synthetic oligonucleotide
  Antisense strand to SEQ ID NO: 910416
uuucacguagccauuuaug

SEQ ID NO: 910418 - RNA, 19 nt, Artificial Sequence
  Description of Artificial Sequence: Synthetic oligonucleotide
  Sense strand starting at position 2427 of SEQ ID NO: 588476
ggcuacgugaaacgauaau

SEQ ID NO: 910419 - RNA, 19 nt, Artificial Sequence
  Description of Artificial Sequence: Synthetic oligonucleotide
  Antisense strand to SEQ ID NO: 910418
auuaucguuucacguagcc

SEQ ID NO: 910420 - RNA, 19 nt, Artificial Sequence
  Description of Artificial Sequence: Synthetic oligonucleotide
  Sense strand starting at position 2505 of SEQ ID NO: 588476
aaauguuuccgguaaugaa

SEQ ID NO: 910421 - RNA, 19 nt, Artificial Sequence
  Description of Artificial Sequence: Synthetic oligonucleotide
  Antisense strand to SEQ ID NO: 910420
uucauuaccggaaacauuu

SEQ ID NO: 910422 - RNA, 19 nt, Artificial Sequence
  Description of Artificial Sequence: Synthetic oligonucleotide
  Sense strand starting at position 2797 of SEQ ID NO: 588476
uccuuaacuguugggauua

SEQ ID NO: 910423 - RNA, 19 nt, Artificial Sequence
  Description of Artificial Sequence: Synthetic oligonucleotide
  Antisense strand to SEQ ID NO: 910422
uaaucccaacaguuaagga

SEQ ID NO: 910424 - RNA, 19 nt, Artificial Sequence
  Description of Artificial Sequence: Synthetic oligonucleotide
  Sense strand starting at position 2848 of SEQ ID NO: 588476
uuauuaucauugcuaugag

SEQ ID NO: 910425 - RNA, 19 nt, Artificial Sequence
  Description of Artificial Sequence: Synthetic oligonucleotide
  Antisense strand to SEQ ID NO: 910424
cucauagcaaugauaauaa

SEQ ID NO: 910426 - RNA, 19 nt, Artificial Sequence
  Description of Artificial Sequence: Synthetic oligonucleotide
  Sense strand starting at position 2881 of SEQ ID NO: 588476
uacugaucugcugguuaaa

SEQ ID NO: 910427 - RNA, 19 nt, Artificial Sequence
  Description of Artificial Sequence: Synthetic oligonucleotide
  Antisense strand to SEQ ID NO: 910426
uuuaaccagcagaucagua

SEQ ID NO: 910428 - RNA, 19 nt, Artificial Sequence
  Description of Artificial Sequence: Synthetic oligonucleotide
  Sense strand starting at position 3005 of SEQ ID NO: 588476
guauccguuagagggauau

SEQ ID NO: 910429 - RNA, 19 nt, Artificial Sequence
  Description of Artificial Sequence: Synthetic oligonucleotide
  Antisense strand to SEQ ID NO: 910428
auaucccucuaacggauac

SEQ ID NO: 910430 - RNA, 19 nt, Artificial Sequence
  Description of Artificial Sequence: Synthetic oligonucleotide
  Sense strand starting at position 3037 of SEQ ID NO: 588476
ggccuagaauagguagaau

SEQ ID NO: 910431 - RNA, 19 nt, Artificial Sequence
  Description of Artificial Sequence: Synthetic oligonucleotide
  Antisense strand to SEQ ID NO: 910430
auucuaccuauucuaggcc

SEQ ID NO: 910432 - RNA, 19 nt, Artificial Sequence
  Description of Artificial Sequence: Synthetic oligonucleotide
  Sense strand starting at position 3121 of SEQ ID NO: 588476
cgucuuggcccugugugaa

SEQ ID NO: 910433 - RNA, 19 nt, Artificial Sequence
  Description of Artificial Sequence: Synthetic oligonucleotide
  Antisense strand to SEQ ID NO: 910432
uucacacagggccaagacg

SEQ ID NO: 910434 - RNA, 19 nt, Artificial Sequence
  Description of Artificial Sequence: Synthetic oligonucleotide
  Sense strand starting at position 3140 of SEQ ID NO: 588476
ggauuaaagugguuucaug

SEQ ID NO: 910435 - RNA, 19 nt, Artificial Sequence
  Description of Artificial Sequence: Synthetic oligonucleotide
  Antisense strand to SEQ ID NO: 910434
caugaaaccacuuuaaucc

SEQ ID NO: 910436 - RNA, 19 nt, Artificial Sequence
  Description of Artificial Sequence: Synthetic oligonucleotide
  Sense strand starting at position 3228 of SEQ ID NO: 588476
cuuguuaauuaacugaaag

SEQ ID NO: 910437 - RNA, 19 nt, Artificial Sequence
  Description of Artificial Sequence: Synthetic oligonucleotide
  Antisense strand to SEQ ID NO: 910436
cuuucaguuaauuaacaag

SEQ ID NO: 910438 - RNA, 19 nt, Artificial Sequence
  Description of Artificial Sequence: Synthetic oligonucleotide
  Sense strand starting at position 3249 of SEQ ID NO: 588476
uuuggaauguguuugaagu

SEQ ID NO: 910439 - RNA, 19 nt, Artificial Sequence
  Description of Artificial Sequence: Synthetic oligonucleotide
  Antisense strand to SEQ ID NO: 910438
acuucaaacacauuccaaa

SEQ ID NO: 910440 - RNA, 19 nt, Artificial Sequence
  Description of Artificial Sequence: Synthetic oligonucleotide
  Sense strand starting at position 3250 of SEQ ID NO: 588476
uuggaauguguuugaaguu

SEQ ID NO: 910441 - RNA, 19 nt, Artificial Sequence
  Description of Artificial Sequence: Synthetic oligonucleotide
  Antisense strand to SEQ ID NO: 910440
aacuucaaacacauuccaa

SEQ ID NO: 910442 - RNA, 19 nt, Artificial Sequence
  Description of Artificial Sequence: Synthetic oligonucleotide
  Sense strand starting at position 3306 of SEQ ID NO: 588476
uuugucaccuauccagaga

SEQ ID NO: 910443 - RNA, 19 nt, Artificial Sequence
  Description of Artificial Sequence: Synthetic oligonucleotide
  Antisense strand to SEQ ID NO: 910442
ucucuggauaggugacaaa

SEQ ID NO: 910444 - RNA, 19 nt, Artificial Sequence
  Description of Artificial Sequence: Synthetic oligonucleotide
  Sense strand starting at position 3367 of SEQ ID NO: 588476
guaggccaagucuaauuau

SEQ ID NO: 910445 - RNA, 19 nt, Artificial Sequence
  Description of Artificial Sequence: Synthetic oligonucleotide
  Antisense strand to SEQ ID NO: 910444
auaauuagacuuggccuac

SEQ ID NO: 910446 - RNA, 19 nt, Artificial Sequence
  Description of Artificial Sequence: Synthetic oligonucleotide
  Sense strand starting at position 3421 of SEQ ID NO: 588476
uacuguuguguuggaaaua

SEQ ID NO: 910447 - RNA, 19 nt, Artificial Sequence
  Description of Artificial Sequence: Synthetic oligonucleotide
  Antisense strand to SEQ ID NO: 910446
uauuuccaacacaacagua

SEQ ID NO: 910448 - RNA, 19 nt, Artificial Sequence
  Description of Artificial Sequence: Synthetic oligonucleotide
  Sense strand starting at position 3426 of SEQ ID NO: 588476
uuguguuggaaauaaugcu

SEQ ID NO: 910449 - RNA, 19 nt, Artificial Sequence
  Description of Artificial Sequence: Synthetic oligonucleotide
  Antisense strand to SEQ ID NO: 910448
agcauuauuuccaacacaa

SEQ ID NO: 910450 - RNA, 19 nt, Artificial Sequence
  Description of Artificial Sequence: Synthetic oligonucleotide
  Sense strand starting at position 3621 of SEQ ID NO: 588476
ggaguugggccucacaauc

SEQ ID NO: 910451 - RNA, 19 nt, Artificial Sequence
  Description of Artificial Sequence: Synthetic oligonucleotide
  Antisense strand to SEQ ID NO: 910450
gauugugaggcccaacucc

SEQ ID NO: 910452 - RNA, 19 nt, Artificial Sequence
  Description of Artificial Sequence: Synthetic oligonucleotide
  Sense strand starting at position 3647 of SEQ ID NO: 588476
accacaguuggcuaaacau

SEQ ID NO: 910453 - RNA, 19 nt, Artificial Sequence
  Description of Artificial Sequence: Synthetic oligonucleotide
  Antisense strand to SEQ ID NO: 910452
auguuuagccaacuguggu

SEQ ID NO: 910454 - RNA, 19 nt, Artificial Sequence
  Description of Artificial Sequence: Synthetic oligonucleotide
  Sense strand starting at position 3744 of SEQ ID NO: 588476
uagucuucucuucggauaa

SEQ ID NO: 910455 - RNA, 19 nt, Artificial Sequence
  Description of Artificial Sequence: Synthetic oligonucleotide
  Antisense strand to SEQ ID NO: 910454
uuauccgaagagaagacua

SEQ ID NO: 910456 - RNA, 19 nt, Artificial Sequence
  Description of Artificial Sequence: Synthetic oligonucleotide
  Sense strand starting at position 3900 of SEQ ID NO: 588476
agagaaaccucaucauguc

SEQ ID NO: 910457 - RNA, 19 nt, Artificial Sequence
  Description of Artificial Sequence: Synthetic oligonucleotide
  Antisense strand to SEQ ID NO: 910456
gacaugaugagguuucucu

SEQ ID NO: 910458 - RNA, 19 nt, Artificial Sequence
  Description of Artificial Sequence: Synthetic oligonucleotide
  Sense strand starting at position 68 of SEQ ID NO: 588512
cagggaaacuggucacuca

SEQ ID NO: 910459 - RNA, 19 nt, Artificial Sequence
  Description of Artificial Sequence: Synthetic oligonucleotide
  Antisense strand to SEQ ID NO: 910458
ugagugaccaguuucccug

SEQ ID NO: 910460 - RNA, 19 nt, Artificial Sequence
  Description of Artificial Sequence: Synthetic oligonucleotide
  Sense strand starting at position 121 of SEQ ID NO: 588512
aggccagcucucuauaaga

SEQ ID NO: 910461 - RNA, 19 nt, Artificial Sequence
  Description of Artificial Sequence: Synthetic oligonucleotide
  Antisense strand to SEQ ID NO: 910460
ucuuauagagagcuggccu

SEQ ID NO: 910462 - RNA, 19 nt, Artificial Sequence
  Description of Artificial Sequence: Synthetic oligonucleotide
  Sense strand starting at position 131 of SEQ ID NO: 588512
ucuauaagaggcugugaau

SEQ ID NO: 910463 - RNA, 19 nt, Artificial Sequence
  Description of Artificial Sequence: Synthetic oligonucleotide
  Antisense strand to SEQ ID NO: 910462
auucacagccucuuauaga

SEQ ID NO: 910464 - RNA, 19 nt, Artificial Sequence
  Description of Artificial Sequence: Synthetic oligonucleotide
  Sense strand starting at position 137 of SEQ ID NO: 588512
agaggcugugaauaaggua

SEQ ID NO: 910465 - RNA, 19 nt, Artificial Sequence
  Description of Artificial Sequence: Synthetic oligonucleotide
  Antisense strand to SEQ ID NO: 910464
uaccuuauucacagccucu

SEQ ID NO: 910466 - RNA, 19 nt, Artificial Sequence
  Description of Artificial Sequence: Synthetic oligonucleotide
  Sense strand starting at position 154 of SEQ ID NO: 588512
uaggguguauucccugaua

SEQ ID NO: 910467 - RNA, 19 nt, Artificial Sequence
  Description of Artificial Sequence: Synthetic oligonucleotide
  Antisense strand to SEQ ID NO: 910466
uaucagggaauacacccua

SEQ ID NO: 910468 - RNA, 19 nt, Artificial Sequence
  Description of Artificial Sequence: Synthetic oligonucleotide
  Sense strand starting at position 156 of SEQ ID NO: 588512
ggguguauucccugauaga

SEQ ID NO: 910469 - RNA, 19 nt, Artificial Sequence
  Description of Artificial Sequence: Synthetic oligonucleotide
  Antisense strand to SEQ ID NO: 910468
ucuaucagggaauacaccc

SEQ ID NO: 910470 - RNA, 19 nt, Artificial Sequence
  Description of Artificial Sequence: Synthetic oligonucleotide
  Sense strand starting at position 157 of SEQ ID NO: 588512
gguguauucccugauagaa

SEQ ID NO: 910471 - RNA, 19 nt, Artificial Sequence
  Description of Artificial Sequence: Synthetic oligonucleotide
  Antisense strand to SEQ ID NO: 910470
uucuaucagggaauacacc

SEQ ID NO: 910472 - RNA, 19 nt, Artificial Sequence
  Description of Artificial Sequence: Synthetic oligonucleotide
  Sense strand starting at position 286 of SEQ ID NO: 588512
ggguauaucucuuuaauug

SEQ ID NO: 910473 - RNA, 19 nt, Artificial Sequence
  Description of Artificial Sequence: Synthetic oligonucleotide
  Antisense strand to SEQ ID NO: 910472
caauuaaagagauauaccc

SEQ ID NO: 910474 - RNA, 19 nt, Artificial Sequence
  Description of Artificial Sequence: Synthetic oligonucleotide
  Sense strand starting at position 287 of SEQ ID NO: 588512
gguauaucucuuuaauuga

SEQ ID NO: 910475 - RNA, 19 nt, Artificial Sequence
  Description of Artificial Sequence: Synthetic oligonucleotide
  Antisense strand to SEQ ID NO: 910474
ucaauuaaagagauauacc

SEQ ID NO: 910476 - RNA, 19 nt, Artificial Sequence
  Description of Artificial Sequence: Synthetic oligonucleotide
  Sense strand starting at position 325 of SEQ ID NO: 588512
ggaauaaucggagguuuau

SEQ ID NO: 910477 - RNA, 19 nt, Artificial Sequence
  Description of Artificial Sequence: Synthetic oligonucleotide
  Antisense strand to SEQ ID NO: 910476
auaaaccuccgauuauucc

SEQ ID NO: 910478 - RNA, 19 nt, Artificial Sequence
  Description of Artificial Sequence: Synthetic oligonucleotide
  Sense strand starting at position 383 of SEQ ID NO: 588512
uggugaccggcucacauau

SEQ ID NO: 910479 - RNA, 19 nt, Artificial Sequence
  Description of Artificial Sequence: Synthetic oligonucleotide
  Antisense strand to SEQ ID NO: 910478
auaugugagccggucacca

SEQ ID NO: 910480 - RNA, 19 nt, Artificial Sequence
  Description of Artificial Sequence: Synthetic oligonucleotide
  Sense strand starting at position 737 of SEQ ID NO: 588512
gagaaauugugacuuuauc

SEQ ID NO: 910481 - RNA, 19 nt, Artificial Sequence
  Description of Artificial Sequence: Synthetic oligonucleotide
  Antisense strand to SEQ ID NO: 910480
gauaaagucacaauuucuc

SEQ ID NO: 910482 - RNA, 19 nt, Artificial Sequence
  Description of Artificial Sequence: Synthetic oligonucleotide
  Sense strand starting at position 811 of SEQ ID NO: 588512
gggagucccacauggacuu

SEQ ID NO: 910483 - RNA, 19 nt, Artificial Sequence
  Description of Artificial Sequence: Synthetic oligonucleotide
  Antisense strand to SEQ ID NO: 910482
aaguccaugugggacuccc

SEQ ID NO: 910484 - RNA, 19 nt, Artificial Sequence
  Description of Artificial Sequence: Synthetic oligonucleotide
  Sense strand starting at position 828 of SEQ ID NO: 588512
uugggagugucaucaccau

SEQ ID NO: 910485 - RNA, 19 nt, Artificial Sequence
  Description of Artificial Sequence: Synthetic oligonucleotide
  Antisense strand to SEQ ID NO: 910484
auggugaugacacucccaa

SEQ ID NO: 910486 - RNA, 19 nt, Artificial Sequence
  Description of Artificial Sequence: Synthetic oligonucleotide
  Sense strand starting at position 1166 of SEQ ID NO: 588512
caguaacaacuguggcaaa

SEQ ID NO: 910487 - RNA, 19 nt, Artificial Sequence
  Description of Artificial Sequence: Synthetic oligonucleotide
  Antisense strand to SEQ ID NO: 910486
uuugccacaguuguuacug

SEQ ID NO: 910488 - RNA, 19 nt, Artificial Sequence
  Description of Artificial Sequence: Synthetic oligonucleotide
  Sense strand starting at position 1213 of SEQ ID NO: 588512
cuaauagaaugagcuuauu

SEQ ID NO: 910489 - RNA, 19 nt, Artificial Sequence
  Description of Artificial Sequence: Synthetic oligonucleotide
  Antisense strand to SEQ ID NO: 910488
aauaagcucauucuauuag

SEQ ID NO: 910490 - RNA, 19 nt, Artificial Sequence
  Description of Artificial Sequence: Synthetic oligonucleotide
  Sense strand starting at position 1364 of SEQ ID NO: 588512
uaagaauguccugagcuuc

SEQ ID NO: 910491 - RNA, 19 nt, Artificial Sequence
  Description of Artificial Sequence: Synthetic oligonucleotide
  Antisense strand to SEQ ID NO: 910490
gaagcucaggacauucuua

SEQ ID NO: 910492 - RNA, 19 nt, Artificial Sequence
  Description of Artificial Sequence: Synthetic oligonucleotide
  Sense strand starting at position 1524 of SEQ ID NO: 588512
uccagaaguaagugcugaa

SEQ ID NO: 910493 - RNA, 19 nt, Artificial Sequence
  Description of Artificial Sequence: Synthetic oligonucleotide
  Antisense strand to SEQ ID NO: 910492
uucagcacuuacuucugga

SEQ ID NO: 910494 - RNA, 19 nt, Artificial Sequence
  Description of Artificial Sequence: Synthetic oligonucleotide
  Sense strand starting at position 1531 of SEQ ID NO: 588512
guaagugcugaaugggaga

SEQ ID NO: 910495 - RNA, 19 nt, Artificial Sequence
  Description of Artificial Sequence: Synthetic oligonucleotide
  Antisense strand to SEQ ID NO: 910494
ucucccauucagcacuuac

SEQ ID NO: 910496 - RNA, 19 nt, Artificial Sequence
  Description of Artificial Sequence: Synthetic oligonucleotide
  Sense strand starting at position 1533 of SEQ ID NO: 588512
aagugcugaaugggagauu

SEQ ID NO: 910497 - RNA, 19 nt, Artificial Sequence
  Description of Artificial Sequence: Synthetic oligonucleotide
  Antisense strand to SEQ ID NO: 910496
aaucucccauucagcacuu

SEQ ID NO: 910498 - RNA, 19 nt, Artificial Sequence
  Description of Artificial Sequence: Synthetic oligonucleotide
  Sense strand starting at position 2420 of SEQ ID NO: 588512
ucaguuuaauuauugcaga

SEQ ID NO: 910499 - RNA, 19 nt, Artificial Sequence
  Description of Artificial Sequence: Synthetic oligonucleotide
  Antisense strand to SEQ ID NO: 910498
ucugcaauaauuaaacuga

SEQ ID NO: 910500 - RNA, 19 nt, Artificial Sequence
  Description of Artificial Sequence: Synthetic oligonucleotide
  Sense strand starting at position 2462 of SEQ ID NO: 588512
ucugucuucguuguuguua

SEQ ID NO: 910501 - RNA, 19 nt, Artificial Sequence
  Description of Artificial Sequence: Synthetic oligonucleotide
  Antisense strand to SEQ ID NO: 910500
uaacaacaacgaagacaga

SEQ ID NO: 910502 - RNA, 19 nt, Artificial Sequence
  Description of Artificial Sequence: Synthetic oligonucleotide
  Sense strand starting at position 2581 of SEQ ID NO: 588512
gcgggacuccgcgaauuua

SEQ ID NO: 910503 - RNA, 19 nt, Artificial Sequence
  Description of Artificial Sequence: Synthetic oligonucleotide
  Antisense strand to SEQ ID NO: 910502
uaaauucgcggagucccgc

SEQ ID NO: 910504 - RNA, 19 nt, Artificial Sequence
  Description of Artificial Sequence: Synthetic oligonucleotide
  Sense strand starting at position 2943 of SEQ ID NO: 588512
uggcacuacaaguggaaua

SEQ ID NO: 910505 - RNA, 19 nt, Artificial Sequence
  Description of Artificial Sequence: Synthetic oligonucleotide
  Antisense strand to SEQ ID NO: 910504
uauuccacuuguagugcca

SEQ ID NO: 910506 - RNA, 19 nt, Artificial Sequence
  Description of Artificial Sequence: Synthetic oligonucleotide
  Sense strand starting at position 3024 of SEQ ID NO: 588512
ugauuaacguugucagaag

SEQ ID NO: 910507 - RNA, 19 nt, Artificial Sequence
  Description of Artificial Sequence: Synthetic oligonucleotide
  Antisense strand to SEQ ID NO: 910506
cuucugacaacguuaauca

SEQ ID NO: 910508 - RNA, 19 nt, Artificial Sequence
  Description of Artificial Sequence: Synthetic oligonucleotide
  Sense strand starting at position 3068 of SEQ ID NO: 588512
cuaaacuuucuggaagugu

SEQ ID NO: 910509 - RNA, 19 nt, Artificial Sequence
  Description of Artificial Sequence: Synthetic oligonucleotide
  Antisense strand to SEQ ID NO: 910508
acacuuccagaaaguuuag

SEQ ID NO: 910510 - RNA, 19 nt, Artificial Sequence
  Description of Artificial Sequence: Synthetic oligonucleotide
  Sense strand starting at position 3079 of SEQ ID NO: 588512
ggaagugucaauuguaaac

SEQ ID NO: 910511 - RNA, 19 nt, Artificial Sequence
  Description of Artificial Sequence: Synthetic oligonucleotide
  Antisense strand to SEQ ID NO: 910510
guuuacaauugacacuucc

SEQ ID NO: 910512 - RNA, 19 nt, Artificial Sequence
  Description of Artificial Sequence: Synthetic oligonucleotide
  Sense strand starting at position 3165 of SEQ ID NO: 588512
ggguuuccucaguagauug

SEQ ID NO: 910513 - RNA, 19 nt, Artificial Sequence
  Description of Artificial Sequence: Synthetic oligonucleotide
  Antisense strand to SEQ ID NO: 910512
caaucuacugaggaaaccc

SEQ ID NO: 910514 - RNA, 19 nt, Artificial Sequence
  Description of Artificial Sequence: Synthetic oligonucleotide
  Sense strand starting at position 3170 of SEQ ID NO: 588512
uccucaguagauuggaaga

SEQ ID NO: 910515 - RNA, 19 nt, Artificial Sequence
  Description of Artificial Sequence: Synthetic oligonucleotide
  Antisense strand to SEQ ID NO: 910514
ucuuccaaucuacugagga

SEQ ID NO: 910516 - RNA, 19 nt, Artificial Sequence
  Description of Artificial Sequence: Synthetic oligonucleotide
  Sense strand starting at position 3231 of SEQ ID NO: 588512
ugaagcucagagcaguaua

SEQ ID NO: 910517 - RNA, 19 nt, Artificial Sequence
  Description of Artificial Sequence: Synthetic oligonucleotide
  Antisense strand to SEQ ID NO: 910516
uauacugcucugagcuuca

SEQ ID NO: 910518 - RNA, 19 nt, Artificial Sequence
  Description of Artificial Sequence: Synthetic oligonucleotide
  Sense strand starting at position 3234 of SEQ ID NO: 588512
agcucagagcaguauagua

SEQ ID NO: 910519 - RNA, 19 nt, Artificial Sequence
  Description of Artificial Sequence: Synthetic oligonucleotide
  Antisense strand to SEQ ID NO: 910518
uacuauacugcucugagcu

SEQ ID NO: 910520 - RNA, 19 nt, Artificial Sequence
  Description of Artificial Sequence: Synthetic oligonucleotide
  Sense strand starting at position 3248 of SEQ ID NO: 588512
uaguaucuucgccagaauu

SEQ ID NO: 910521 - RNA, 19 nt, Artificial Sequence
  Description of Artificial Sequence: Synthetic oligonucleotide
  Antisense strand to SEQ ID NO: 910520
aauucuggcgaagauacua

SEQ ID NO: 910522 - RNA, 19 nt, Artificial Sequence
  Description of Artificial Sequence: Synthetic oligonucleotide
  Sense strand starting at position 3308 of SEQ ID NO: 588512
guccuuagucuggagacuu

SEQ ID NO: 910523 - RNA, 19 nt, Artificial Sequence
  Description of Artificial Sequence: Synthetic oligonucleotide
  Antisense strand to SEQ ID NO: 910522
aagucuccagacuaaggac

SEQ ID NO: 910524 - RNA, 19 nt, Artificial Sequence
  Description of Artificial Sequence: Synthetic oligonucleotide
  Sense strand starting at position 3369 of SEQ ID NO: 588512
uugauaaucuuguuggaua

SEQ ID NO: 910525 - RNA, 19 nt, Artificial Sequence
  Description of Artificial Sequence: Synthetic oligonucleotide
  Antisense strand to SEQ ID NO: 910524
uauccaacaagauuaucaa

SEQ ID NO: 910526 - RNA, 19 nt, Artificial Sequence
  Description of Artificial Sequence: Synthetic oligonucleotide
  Sense strand starting at position 3371 of SEQ ID NO: 588512
gauaaucuuguuggauaac

SEQ ID NO: 910527 - RNA, 19 nt, Artificial Sequence
  Description of Artificial Sequence: Synthetic oligonucleotide
  Antisense strand to SEQ ID NO: 910526
guuauccaacaagauuauc

SEQ ID NO: 910528 - RNA, 19 nt, Artificial Sequence
  Description of Artificial Sequence: Synthetic oligonucleotide
  Sense strand starting at position 3418 of SEQ ID NO: 588512
cucucauugcauuaaggaa

SEQ ID NO: 910529 - RNA, 19 nt, Artificial Sequence
  Description of Artificial Sequence: Synthetic oligonucleotide
  Antisense strand to SEQ ID NO: 910528
uuccuuaaugcaaugagag

SEQ ID NO: 910530 - RNA, 19 nt, Artificial Sequence
  Description of Artificial Sequence: Synthetic oligonucleotide
  Sense strand starting at position 3426 of SEQ ID NO: 588512
gcauuaaggaagugaugag

SEQ ID NO: 910531 - RNA, 19 nt, Artificial Sequence
  Description of Artificial Sequence: Synthetic oligonucleotide
  Antisense strand to SEQ ID NO: 910530
cucaucacuuccuuaaugc

SEQ ID NO: 910532 - RNA, 19 nt, Artificial Sequence
  Description of Artificial Sequence: Synthetic oligonucleotide
  Sense strand starting at position 3506 of SEQ ID NO: 588512
ggcuaucaguaauuugcca

SEQ ID NO: 910533 - RNA, 19 nt, Artificial Sequence
  Description of Artificial Sequence: Synthetic oligonucleotide
  Antisense strand to SEQ ID NO: 910532
uggcaaauuacugauagcc

SEQ ID NO: 910534 - RNA, 19 nt, Artificial Sequence
  Description of Artificial Sequence: Synthetic oligonucleotide
  Sense strand starting at position 3610 of SEQ ID NO: 588512
ucaguaacaucgguccaga

SEQ ID NO: 910535 - RNA, 19 nt, Artificial Sequence
  Description of Artificial Sequence: Synthetic oligonucleotide
  Antisense strand to SEQ ID NO: 910534
ucuggaccgauguuacuga

SEQ ID NO: 910536 - RNA, 19 nt, Artificial Sequence
  Description of Artificial Sequence: Synthetic oligonucleotide
  Sense strand starting at position 3652 of SEQ ID NO: 588512
gugcaacaucaaggacuua

SEQ ID NO: 910537 - RNA, 19 nt, Artificial Sequence
  Description of Artificial Sequence: Synthetic oligonucleotide
  Antisense strand to SEQ ID NO: 910536
uaaguccuugauguugcac

SEQ ID NO: 910538 - RNA, 19 nt, Artificial Sequence
  Description of Artificial Sequence: Synthetic oligonucleotide
  Sense strand starting at position 203 of SEQ ID NO: 588513
uagagugauuuauggacua

SEQ ID NO: 910539 - RNA, 19 nt, Artificial Sequence
  Description of Artificial Sequence: Synthetic oligonucleotide
  Antisense strand to SEQ ID NO: 910538
uaguccauaaaucacucua

SEQ ID NO: 910540 - RNA, 19 nt, Artificial Sequence
  Description of Artificial Sequence: Synthetic oligonucleotide
  Sense strand starting at position 297 of SEQ ID NO: 588513
ggaggcaauuauuccucua

SEQ ID NO: 910541 - RNA, 19 nt, Artificial Sequence
  Description of Artificial Sequence: Synthetic oligonucleotide
  Antisense strand to SEQ ID NO: 910540
uagaggaauaauugccucc

SEQ ID NO: 910542 - RNA, 19 nt, Artificial Sequence
  Description of Artificial Sequence: Synthetic oligonucleotide
  Sense strand starting at position 300 of SEQ ID NO: 588513
ggcaauuauuccucuacug

SEQ ID NO: 910543 - RNA, 19 nt, Artificial Sequence
  Description of Artificial Sequence: Synthetic oligonucleotide
  Antisense strand to SEQ ID NO: 910542
caguagaggaauaauugcc

SEQ ID NO: 910544 - RNA, 19 nt, Artificial Sequence
  Description of Artificial Sequence: Synthetic oligonucleotide
  Sense strand starting at position 535 of SEQ ID NO: 588513
augacugcuaaucgguaua

SEQ ID NO: 910545 - RNA, 19 nt, Artificial Sequence
  Description of Artificial Sequence: Synthetic oligonucleotide
  Antisense strand to SEQ ID NO: 910544
uauaccgauuagcagucau

SEQ ID NO: 910546 - RNA, 19 nt, Artificial Sequence
  Description of Artificial Sequence: Synthetic oligonucleotide
  Sense strand starting at position 580 of SEQ ID NO: 588513
ggaaucagaugguagugau

SEQ ID NO: 910547 - RNA, 19 nt, Artificial Sequence
  Description of Artificial Sequence: Synthetic oligonucleotide
  Antisense strand to SEQ ID NO: 910546
aucacuaccaucugauucc

SEQ ID NO: 910548 - RNA, 19 nt, Artificial Sequence
  Description of Artificial Sequence: Synthetic oligonucleotide
  Sense strand starting at position 603 of SEQ ID NO: 588513
ucauaacuuuacggauaua

SEQ ID NO: 910549 - RNA, 19 nt, Artificial Sequence
  Description of Artificial Sequence: Synthetic oligonucleotide
  Antisense strand to SEQ ID NO: 910548
uauauccguaaaguuauga

SEQ ID NO: 910550 - RNA, 19 nt, Artificial Sequence
  Description of Artificial Sequence: Synthetic oligonucleotide
  Sense strand starting at position 714 of SEQ ID NO: 588513
uagagaaaguuggaugaaa

SEQ ID NO: 910551 - RNA, 19 nt, Artificial Sequence
  Description of Artificial Sequence: Synthetic oligonucleotide
  Antisense strand to SEQ ID NO: 910550
uuucauccaacuuucucua

SEQ ID NO: 910552 - RNA, 19 nt, Artificial Sequence
  Description of Artificial Sequence: Synthetic oligonucleotide
  Sense strand starting at position 751 of SEQ ID NO: 588513
acagcuacuuagcuguuaa

SEQ ID NO: 910553 - RNA, 19 nt, Artificial Sequence
  Description of Artificial Sequence: Synthetic oligonucleotide
  Antisense strand to SEQ ID NO: 910552
uuaacagcuaaguagcugu

SEQ ID NO: 910554 - RNA, 19 nt, Artificial Sequence
  Description of Artificial Sequence: Synthetic oligonucleotide
  Sense strand starting at position 761 of SEQ ID NO: 588513
agcuguuaacgccaccuaa

SEQ ID NO: 910555 - RNA, 19 nt, Artificial Sequence
  Description of Artificial Sequence: Synthetic oligonucleotide
  Antisense strand to SEQ ID NO: 910554
uuagguggcguuaacagcu

SEQ ID NO: 910556 - RNA, 19 nt, Artificial Sequence
  Description of Artificial Sequence: Synthetic oligonucleotide
  Sense strand starting at position 789 of SEQ ID NO: 588513
ugaauaaacucaggaauuc

SEQ ID NO: 910557 - RNA, 19 nt, Artificial Sequence
  Description of Artificial Sequence: Synthetic oligonucleotide
  Antisense strand to SEQ ID NO: 910556
gaauuccugaguuuauuca

SEQ ID NO: 910558 - RNA, 19 nt, Artificial Sequence
  Description of Artificial Sequence: Synthetic oligonucleotide
  Sense strand starting at position 854 of SEQ ID NO: 588513
gggcaaugacggugaggaa

SEQ ID NO: 910559 - RNA, 19 nt, Artificial Sequence
  Description of Artificial Sequence: Synthetic oligonucleotide
  Antisense strand to SEQ ID NO: 910558
uuccucaccgucauugccc

SEQ ID NO: 910560 - RNA, 19 nt, Artificial Sequence
  Description of Artificial Sequence: Synthetic oligonucleotide
  Sense strand starting at position 883 of SEQ ID NO: 588513
cgauuacacaucuggauga

SEQ ID NO: 910561 - RNA, 19 nt, Artificial Sequence
  Description of Artificial Sequence: Synthetic oligonucleotide
  Antisense strand to SEQ ID NO: 910560
ucauccagauguguaaucg

SEQ ID NO: 910562 - RNA, 19 nt, Artificial Sequence
  Description of Artificial Sequence: Synthetic oligonucleotide
  Sense strand starting at position 884 of SEQ ID NO: 588513
gauuacacaucuggaugau

SEQ ID NO: 910563 - RNA, 19 nt, Artificial Sequence
  Description of Artificial Sequence: Synthetic oligonucleotide
  Antisense strand to SEQ ID NO: 910562
aucauccagauguguaauc

SEQ ID NO: 910564 - RNA, 19 nt, Artificial Sequence
  Description of Artificial Sequence: Synthetic oligonucleotide
  Sense strand starting at position 910 of SEQ ID NO: 588513
ccuuauuagccucggguau

SEQ ID NO: 910565 - RNA, 19 nt, Artificial Sequence
  Description of Artificial Sequence: Synthetic oligonucleotide
  Antisense strand to SEQ ID NO: 910564
auacccgaggcuaauaagg

SEQ ID NO: 910566 - RNA, 19 nt, Artificial Sequence
  Description of Artificial Sequence: Synthetic oligonucleotide
  Sense strand starting at position 912 of SEQ ID NO: 588513
uuauuagccucggguauca

SEQ ID NO: 910567 - RNA, 19 nt, Artificial Sequence
  Description of Artificial Sequence: Synthetic oligonucleotide
  Antisense strand to SEQ ID NO: 910566
ugauacccgaggcuaauaa

SEQ ID NO: 910568 - RNA, 19 nt, Artificial Sequence
  Description of Artificial Sequence: Synthetic oligonucleotide
  Sense strand starting at position 1102 of SEQ ID NO: 588513
acaguugccucugaaaguu

SEQ ID NO: 910569 - RNA, 19 nt, Artificial Sequence
  Description of Artificial Sequence: Synthetic oligonucleotide
  Antisense strand to SEQ ID NO: 910568
aacuuucagaggcaacugu

SEQ ID NO: 910570 - RNA, 19 nt, Artificial Sequence
  Description of Artificial Sequence: Synthetic oligonucleotide
  Sense strand starting at position 2039 of SEQ ID NO: 588513
gcuggcaagcgccagaauu

SEQ ID NO: 910571 - RNA, 19 nt, Artificial Sequence
  Description of Artificial Sequence: Synthetic oligonucleotide
  Antisense strand to SEQ ID NO: 910570
aauucuggcgcuugccagc

SEQ ID NO: 910572 - RNA, 19 nt, Artificial Sequence
  Description of Artificial Sequence: Synthetic oligonucleotide
  Sense strand starting at position 2041 of SEQ ID NO: 588513
uggcaagcgccagaauuaa

SEQ ID NO: 910573 - RNA, 19 nt, Artificial Sequence
  Description of Artificial Sequence: Synthetic oligonucleotide
  Antisense strand to SEQ ID NO: 910572
uuaauucuggcgcuugcca

SEQ ID NO: 910574 - RNA, 19 nt, Artificial Sequence
  Description of Artificial Sequence: Synthetic oligonucleotide
  Sense strand starting at position 2420 of SEQ ID NO: 588513
ccguauuuaccacguccau

SEQ ID NO: 910575 - RNA, 19 nt, Artificial Sequence
  Description of Artificial Sequence: Synthetic oligonucleotide
  Antisense strand to SEQ ID NO: 910574
auggacgugguaaauacgg

SEQ ID NO: 910576 - RNA, 19 nt, Artificial Sequence
  Description of Artificial Sequence: Synthetic oligonucleotide
  Sense strand starting at position 2728 of SEQ ID NO: 588513
gacagaguccucggcggaa

SEQ ID NO: 910577 - RNA, 19 nt, Artificial Sequence
  Description of Artificial Sequence: Synthetic oligonucleotide
  Antisense strand to SEQ ID NO: 910576
uuccgccgaggacucuguc

SEQ ID NO: 910578 - RNA, 19 nt, Artificial Sequence
  Description of Artificial Sequence: Synthetic oligonucleotide
  Sense strand starting at position 2751 of SEQ ID NO: 588513
gaggaugcguguucagaag

SEQ ID NO: 910579 - RNA, 19 nt, Artificial Sequence
  Description of Artificial Sequence: Synthetic oligonucleotide
  Antisense strand to SEQ ID NO: 910578
cuucugaacacgcauccuc

SEQ ID NO: 910580 - RNA, 19 nt, Artificial Sequence
  Description of Artificial Sequence: Synthetic oligonucleotide
  Sense strand starting at position 2757 of SEQ ID NO: 588513
gcguguucagaagguugca

SEQ ID NO: 910581 - RNA, 19 nt, Artificial Sequence
  Description of Artificial Sequence: Synthetic oligonucleotide
  Antisense strand to SEQ ID NO: 910580
ugcaaccuucugaacacgc

SEQ ID NO: 910582 - RNA, 19 nt, Artificial Sequence
  Description of Artificial Sequence: Synthetic oligonucleotide
  Sense strand starting at position 2855 of SEQ ID NO: 588513
auacucgauuuggagcaau

SEQ ID NO: 910583 - RNA, 19 nt, Artificial Sequence
  Description of Artificial Sequence: Synthetic oligonucleotide
  Antisense strand to SEQ ID NO: 910582
auugcuccaaaucgaguau

SEQ ID NO: 910584 - RNA, 19 nt, Artificial Sequence
  Description of Artificial Sequence: Synthetic oligonucleotide
  Sense strand starting at position 2874 of SEQ ID NO: 588513
ccaguagguccaugagaaa

SEQ ID NO: 910585 - RNA, 19 nt, Artificial Sequence
  Description of Artificial Sequence: Synthetic oligonucleotide
  Antisense strand to SEQ ID NO: 910584
uuucucauggaccuacugg

SEQ ID NO: 910586 - RNA, 19 nt, Artificial Sequence
  Description of Artificial Sequence: Synthetic oligonucleotide
  Sense strand starting at position 2877 of SEQ ID NO: 588513
guagguccaugagaaauua

SEQ ID NO: 910587 - RNA, 19 nt, Artificial Sequence
  Description of Artificial Sequence: Synthetic oligonucleotide
  Antisense strand to SEQ ID NO: 910586
uaauuucucauggaccuac

SEQ ID NO: 910588 - RNA, 19 nt, Artificial Sequence
  Description of Artificial Sequence: Synthetic oligonucleotide
  Sense strand starting at position 2885 of SEQ ID NO: 588513
augagaaauuaguagggau

SEQ ID NO: 910589 - RNA, 19 nt, Artificial Sequence
  Description of Artificial Sequence: Synthetic oligonucleotide
  Antisense strand to SEQ ID NO: 910588
aucccuacuaauuucucau

SEQ ID NO: 910590 - RNA, 19 nt, Artificial Sequence
  Description of Artificial Sequence: Synthetic oligonucleotide
  Sense strand starting at position 2888 of SEQ ID NO: 588513
agaaauuaguagggauuga

SEQ ID NO: 910591 - RNA, 19 nt, Artificial Sequence
  Description of Artificial Sequence: Synthetic oligonucleotide
  Antisense strand to SEQ ID NO: 910590
ucaaucccuacuaauuucu

SEQ ID NO: 910592 - RNA, 19 nt, Artificial Sequence
  Description of Artificial Sequence: Synthetic oligonucleotide
  Sense strand starting at position 3015 of SEQ ID NO: 588513
caauguuagcucugcaguc

SEQ ID NO: 910593 - RNA, 19 nt, Artificial Sequence
  Description of Artificial Sequence: Synthetic oligonucleotide
  Antisense strand to SEQ ID NO: 910592
gacugcagagcuaacauug

SEQ ID NO: 910594 - RNA, 19 nt, Artificial Sequence
  Description of Artificial Sequence: Synthetic oligonucleotide
  Sense strand starting at position 3016 of SEQ ID NO: 588513
aauguuagcucugcaguca

SEQ ID NO: 910595 - RNA, 19 nt, Artificial Sequence
  Description of Artificial Sequence: Synthetic oligonucleotide
  Antisense strand to SEQ ID NO: 910594
ugacugcagagcuaacauu

SEQ ID NO: 910596 - RNA, 19 nt, Artificial Sequence
  Description of Artificial Sequence: Synthetic oligonucleotide
  Sense strand starting at position 3017 of SEQ ID NO: 588513
auguuagcucugcagucaa

SEQ ID NO: 910597 - RNA, 19 nt, Artificial Sequence
  Description of Artificial Sequence: Synthetic oligonucleotide
  Antisense strand to SEQ ID NO: 910596
uugacugcagagcuaacau

SEQ ID NO: 910598 - RNA, 19 nt, Artificial Sequence
  Description of Artificial Sequence: Synthetic oligonucleotide
  Sense strand starting at position 3227 of SEQ ID NO: 588513
cugcaaauuccugaacuug

SEQ ID NO: 910599 - RNA, 19 nt, Artificial Sequence
  Description of Artificial Sequence: Synthetic oligonucleotide
  Antisense strand to SEQ ID NO: 910598
caaguucaggaauuugcag

SEQ ID NO: 910600 - RNA, 19 nt, Artificial Sequence
  Description of Artificial Sequence: Synthetic oligonucleotide
  Sense strand starting at position 3245 of SEQ ID NO: 588513
gauggcuccugacuguuua

SEQ ID NO: 910601 - RNA, 19 nt, Artificial Sequence
  Description of Artificial Sequence: Synthetic oligonucleotide
  Antisense strand to SEQ ID NO: 910600
uaaacagucaggagccauc

SEQ ID NO: 910602 - RNA, 19 nt, Artificial Sequence
  Description of Artificial Sequence: Synthetic oligonucleotide
  Sense strand starting at position 3249 of SEQ ID NO: 588513
gcuccugacuguuuaggga

SEQ ID NO: 910603 - RNA, 19 nt, Artificial Sequence
  Description of Artificial Sequence: Synthetic oligonucleotide
  Antisense strand to SEQ ID NO: 910602
ucccuaaacagucaggagc

SEQ ID NO: 910604 - RNA, 19 nt, Artificial Sequence
  Description of Artificial Sequence: Synthetic oligonucleotide
  Sense strand starting at position 3252 of SEQ ID NO: 588513
ccugacuguuuagggaaua

SEQ ID NO: 910605 - RNA, 19 nt, Artificial Sequence
  Description of Artificial Sequence: Synthetic oligonucleotide
  Antisense strand to SEQ ID NO: 910604
uauucccuaaacagucagg

SEQ ID NO: 910606 - RNA, 19 nt, Artificial Sequence
  Description of Artificial Sequence: Synthetic oligonucleotide
  Sense strand starting at position 3480 of SEQ ID NO: 588513
aaaggagaauuguuugcau

SEQ ID NO: 910607 - RNA, 19 nt, Artificial Sequence
  Description of Artificial Sequence: Synthetic oligonucleotide
  Antisense strand to SEQ ID NO: 910606
augcaaacaauucuccuuu

SEQ ID NO: 910608 - RNA, 19 nt, Artificial Sequence
  Description of Artificial Sequence: Synthetic oligonucleotide
  Sense strand starting at position 3483 of SEQ ID NO: 588513
ggagaauuguuugcauggu

SEQ ID NO: 910609 - RNA, 19 nt, Artificial Sequence
  Description of Artificial Sequence: Synthetic oligonucleotide
  Antisense strand to SEQ ID NO: 910608
accaugcaaacaauucucc

SEQ ID NO: 910610 - RNA, 19 nt, Artificial Sequence
  Description of Artificial Sequence: Synthetic oligonucleotide
  Sense strand starting at position 3484 of SEQ ID NO: 588513
gagaauuguuugcauggug

SEQ ID NO: 910611 - RNA, 19 nt, Artificial Sequence
  Description of Artificial Sequence: Synthetic oligonucleotide
  Antisense strand to SEQ ID NO: 910610
caccaugcaaacaauucuc

SEQ ID NO: 910612 - RNA, 19 nt, Artificial Sequence
  Description of Artificial Sequence: Synthetic oligonucleotide
  Sense strand starting at position 3487 of SEQ ID NO: 588513
aauuguuugcauggugaua

SEQ ID NO: 910613 - RNA, 19 nt, Artificial Sequence
  Description of Artificial Sequence: Synthetic oligonucleotide
  Antisense strand to SEQ ID NO: 910612
uaucaccaugcaaacaauu

SEQ ID NO: 910614 - RNA, 19 nt, Artificial Sequence
  Description of Artificial Sequence: Synthetic oligonucleotide
  Sense strand starting at position 3489 of SEQ ID NO: 588513
uuguuugcauggugauaag

SEQ ID NO: 910615 - RNA, 19 nt, Artificial Sequence
  Description of Artificial Sequence: Synthetic oligonucleotide
  Antisense strand to SEQ ID NO: 910614
cuuaucaccaugcaaacaa

SEQ ID NO: 910616 - RNA, 19 nt, Artificial Sequence
  Description of Artificial Sequence: Synthetic oligonucleotide
  Sense strand starting at position 3628 of SEQ ID NO: 588513
ccaggaguucugggcaaua

SEQ ID NO: 910617 - RNA, 19 nt, Artificial Sequence
  Description of Artificial Sequence: Synthetic oligonucleotide
  Antisense strand to SEQ ID NO: 910616
uauugcccagaacuccugg

SEQ ID NO: 910618 - RNA, 19 nt, Artificial Sequence
  Description of Artificial Sequence: Synthetic oligonucleotide
  Sense strand starting at position 4 of SEQ ID NO: 588527
gagguuagguucuuuggaa

SEQ ID NO: 910619 - RNA, 19 nt, Artificial Sequence
  Description of Artificial Sequence: Synthetic oligonucleotide
  Antisense strand to SEQ ID NO: 910618
uuccaaagaaccuaaccuc

SEQ ID NO: 910620 - RNA, 19 nt, Artificial Sequence
  Description of Artificial Sequence: Synthetic oligonucleotide
  Sense strand starting at position 35 of SEQ ID NO: 588527
cuugaagauuaccauuaag

SEQ ID NO: 910621 - RNA, 19 nt, Artificial Sequence
  Description of Artificial Sequence: Synthetic oligonucleotide
  Antisense strand to SEQ ID NO: 910620
cuuaaugguaaucuucaag

SEQ ID NO: 910622 - RNA, 19 nt, Artificial Sequence
  Description of Artificial Sequence: Synthetic oligonucleotide
  Sense strand starting at position 882 of SEQ ID NO: 588527
ucagaaacauacguauuau

SEQ ID NO: 910623 - RNA, 19 nt, Artificial Sequence
  Description of Artificial Sequence: Synthetic oligonucleotide
  Antisense strand to SEQ ID NO: 910622
auaauacguauguuucuga

SEQ ID NO: 910624 - RNA, 19 nt, Artificial Sequence
  Description of Artificial Sequence: Synthetic oligonucleotide
  Sense strand starting at position 893 of SEQ ID NO: 588527
cguauuauguugccaauaa

SEQ ID NO: 910625 - RNA, 19 nt, Artificial Sequence
  Description of Artificial Sequence: Synthetic oligonucleotide
  Antisense strand to SEQ ID NO: 910624
uuauuggcaacauaauacg

SEQ ID NO: 910626 - RNA, 19 nt, Artificial Sequence
  Description of Artificial Sequence: Synthetic oligonucleotide
  Sense strand starting at position 897 of SEQ ID NO: 588527
uuauguugccaauaaauga

SEQ ID NO: 910627 - RNA, 19 nt, Artificial Sequence
  Description of Artificial Sequence: Synthetic oligonucleotide
  Antisense strand to SEQ ID NO: 910626
ucauuuauuggcaacauaa

SEQ ID NO: 910628 - RNA, 19 nt, Artificial Sequence
  Description of Artificial Sequence: Synthetic oligonucleotide
  Sense strand starting at position 940 of SEQ ID NO: 588527
ggucguauuuaaguauacu

SEQ ID NO: 910629 - RNA, 19 nt, Artificial Sequence
  Description of Artificial Sequence: Synthetic oligonucleotide
  Antisense strand to SEQ ID NO: 910628
aguauacuuaaauacgacc

SEQ ID NO: 910630 - RNA, 19 nt, Artificial Sequence
  Description of Artificial Sequence: Synthetic oligonucleotide
  Sense strand starting at position 950 of SEQ ID NO: 588527
aaguauacucaacggguuu

SEQ ID NO: 910631 - RNA, 19 nt, Artificial Sequence
  Description of Artificial Sequence: Synthetic oligonucleotide
  Antisense strand to SEQ ID NO: 910630
aaacccguugaguauacuu

SEQ ID NO: 910632 - RNA, 19 nt, Artificial Sequence
  Description of Artificial Sequence: Synthetic oligonucleotide
  Sense strand starting at position 1012 of SEQ ID NO: 588527
ucaugucacuggucaggaa

SEQ ID NO: 910633 - RNA, 19 nt, Artificial Sequence
  Description of Artificial Sequence: Synthetic oligonucleotide
  Antisense strand to SEQ ID NO: 910632
uuccugaccagugacauga

SEQ ID NO: 910634 - RNA, 19 nt, Artificial Sequence
  Description of Artificial Sequence: Synthetic oligonucleotide
  Sense strand starting at position 1013 of SEQ ID NO: 588527
caugucacuggucaggaau

SEQ ID NO: 910635 - RNA, 19 nt, Artificial Sequence
  Description of Artificial Sequence: Synthetic oligonucleotide
  Antisense strand to SEQ ID NO: 910634
auuccugaccagugacaug

SEQ ID NO: 910636 - RNA, 19 nt, Artificial Sequence
  Description of Artificial Sequence: Synthetic oligonucleotide
  Sense strand starting at position 1026 of SEQ ID NO: 588527
aggaaugagugucuccaaa

SEQ ID NO: 910637 - RNA, 19 nt, Artificial Sequence
  Description of Artificial Sequence: Synthetic oligonucleotide
  Antisense strand to SEQ ID NO: 910636
uuuggagacacucauuccu

SEQ ID NO: 910638 - RNA, 19 nt, Artificial Sequence
  Description of Artificial Sequence: Synthetic oligonucleotide
  Sense strand starting at position 1077 of SEQ ID NO: 588527
gaaagcagugguugucuua

SEQ ID NO: 910639 - RNA, 19 nt, Artificial Sequence
  Description of Artificial Sequence: Synthetic oligonucleotide
  Antisense strand to SEQ ID NO: 910638
uaagacaaccacugcuuuc

SEQ ID NO: 910640 - RNA, 19 nt, Artificial Sequence
  Description of Artificial Sequence: Synthetic oligonucleotide
  Sense strand starting at position 1080 of SEQ ID NO: 588527
agcagugguugucuuaaau

SEQ ID NO: 910641 - RNA, 19 nt, Artificial Sequence
  Description of Artificial Sequence: Synthetic oligonucleotide
  Antisense strand to SEQ ID NO: 910640
auuuaagacaaccacugcu

SEQ ID NO: 910642 - RNA, 19 nt, Artificial Sequence
  Description of Artificial Sequence: Synthetic oligonucleotide
  Sense strand starting at position 1090 of SEQ ID NO: 588527
gucuuaaaugugugguuug

SEQ ID NO: 910643 - RNA, 19 nt, Artificial Sequence
  Description of Artificial Sequence: Synthetic oligonucleotide
  Antisense strand to SEQ ID NO: 910642
caaaccacacauuuaagac

SEQ ID NO: 910644 - RNA, 19 nt, Artificial Sequence
  Description of Artificial Sequence: Synthetic oligonucleotide
  Sense strand starting at position 1093 of SEQ ID NO: 588527
uuaaaugugugguuuguua

SEQ ID NO: 910645 - RNA, 19 nt, Artificial Sequence
  Description of Artificial Sequence: Synthetic oligonucleotide
  Antisense strand to SEQ ID NO: 910644
uaacaaaccacacauuuaa

SEQ ID NO: 910646 - RNA, 19 nt, Artificial Sequence
  Description of Artificial Sequence: Synthetic oligonucleotide
  Sense strand starting at position 1095 of SEQ ID NO: 588527
aaaugugugguuuguuaau

SEQ ID NO: 910647 - RNA, 19 nt, Artificial Sequence
  Description of Artificial Sequence: Synthetic oligonucleotide
  Antisense strand to SEQ ID NO: 910646
auuaacaaaccacacauuu

SEQ ID NO: 910648 - RNA, 19 nt, Artificial Sequence
  Description of Artificial Sequence: Synthetic oligonucleotide
  Sense strand starting at position 1097 of SEQ ID NO: 588527
augugugguuuguuaauua

SEQ ID NO: 910649 - RNA, 19 nt, Artificial Sequence
  Description of Artificial Sequence: Synthetic oligonucleotide
  Antisense strand to SEQ ID NO: 910648
uaauuaacaaaccacacau

SEQ ID NO: 910650 - RNA, 19 nt, Artificial Sequence
  Description of Artificial Sequence: Synthetic oligonucleotide
  Sense strand starting at position 1274 of SEQ ID NO: 588527
gaaagaaucugggcgcuuu

SEQ ID NO: 910651 - RNA, 19 nt, Artificial Sequence
  Description of Artificial Sequence: Synthetic oligonucleotide
  Antisense strand to SEQ ID NO: 910650
aaagcgcccagauucuuuc

SEQ ID NO: 910652 - RNA, 19 nt, Artificial Sequence
  Description of Artificial Sequence: Synthetic oligonucleotide
  Sense strand starting at position 1284 of SEQ ID NO: 588527
gggcgcuuugcucuuuaua

SEQ ID NO: 910653 - RNA, 19 nt, Artificial Sequence
  Description of Artificial Sequence: Synthetic oligonucleotide
  Antisense strand to SEQ ID NO: 910652
uauaaagagcaaagcgccc

SEQ ID NO: 910654 - RNA, 19 nt, Artificial Sequence
  Description of Artificial Sequence: Synthetic oligonucleotide
  Sense strand starting at position 1285 of SEQ ID NO: 588527
ggcgcuuugcucuuuauag

SEQ ID NO: 910655 - RNA, 19 nt, Artificial Sequence
  Description of Artificial Sequence: Synthetic oligonucleotide
  Antisense strand to SEQ ID NO: 910654
cuauaaagagcaaagcgcc

SEQ ID NO: 910656 - RNA, 19 nt, Artificial Sequence
  Description of Artificial Sequence: Synthetic oligonucleotide
  Sense strand starting at position 1334 of SEQ ID NO: 588527
gcuugaaugugcccaaggu

SEQ ID NO: 910657 - RNA, 19 nt, Artificial Sequence
  Description of Artificial Sequence: Synthetic oligonucleotide
  Antisense strand to SEQ ID NO: 910656
accuugggcacauucaagc

SEQ ID NO: 910658 - RNA, 19 nt, Artificial Sequence
  Description of Artificial Sequence: Synthetic oligonucleotide
  Sense strand starting at position 1335 of SEQ ID NO: 588527
cuugaaugugcccaagguu

SEQ ID NO: 910659 - RNA, 19 nt, Artificial Sequence
  Description of Artificial Sequence: Synthetic oligonucleotide
  Antisense strand to SEQ ID NO: 910658
aaccuugggcacauucaag

SEQ ID NO: 910660 - RNA, 19 nt, Artificial Sequence
  Description of Artificial Sequence: Synthetic oligonucleotide
  Sense strand starting at position 1367 of SEQ ID NO: 588527
aggaaaugcgcccaaguuu

SEQ ID NO: 910661 - RNA, 19 nt, Artificial Sequence
  Description of Artificial Sequence: Synthetic oligonucleotide
  Antisense strand to SEQ ID NO: 910660
aaacuugggcgcauuuccu

SEQ ID NO: 910662 - RNA, 19 nt, Artificial Sequence
  Description of Artificial Sequence: Synthetic oligonucleotide
  Sense strand starting at position 1431 of SEQ ID NO: 588527
gggaaaugcgcccaaguuu

SEQ ID NO: 910663 - RNA, 19 nt, Artificial Sequence
  Description of Artificial Sequence: Synthetic oligonucleotide
  Antisense strand to SEQ ID NO: 910662
aaacuugggcgcauuuccc

SEQ ID NO: 910664 - RNA, 19 nt, Artificial Sequence
  Description of Artificial Sequence: Synthetic oligonucleotide
  Sense strand starting at position 1450 of SEQ ID NO: 588527
caaccucuacggugggaaa

SEQ ID NO: 910665 - RNA, 19 nt, Artificial Sequence
  Description of Artificial Sequence: Synthetic oligonucleotide
  Antisense strand to SEQ ID NO: 910664
uuucccaccguagagguug

SEQ ID NO: 910666 - RNA, 19 nt, Artificial Sequence
  Description of Artificial Sequence: Synthetic oligonucleotide
  Sense strand starting at position 1992 of SEQ ID NO: 588527
uuuguugucgcgaguucuc

SEQ ID NO: 910667 - RNA, 19 nt, Artificial Sequence
  Description of Artificial Sequence: Synthetic oligonucleotide
  Antisense strand to SEQ ID NO: 910666
gagaacucgcgacaacaaa

SEQ ID NO: 910668 - RNA, 19 nt, Artificial Sequence
  Description of Artificial Sequence: Synthetic oligonucleotide
  Sense strand starting at position 1999 of SEQ ID NO: 588527
ucgcgaguucuccuggcaa

SEQ ID NO: 910669 - RNA, 19 nt, Artificial Sequence
  Description of Artificial Sequence: Synthetic oligonucleotide
  Antisense strand to SEQ ID NO: 910668
uugccaggagaacucgcga

SEQ ID NO: 910670 - RNA, 19 nt, Artificial Sequence
  Description of Artificial Sequence: Synthetic oligonucleotide
  Sense strand starting at position 2225 of SEQ ID NO: 588527
uuucuacggguucgugaaa

SEQ ID NO: 910671 - RNA, 19 nt, Artificial Sequence
  Description of Artificial Sequence: Synthetic oligonucleotide
  Antisense strand to SEQ ID NO: 910670
uuucacgaacccguagaaa

SEQ ID NO: 910672 - RNA, 19 nt, Artificial Sequence
  Description of Artificial Sequence: Synthetic oligonucleotide
  Sense strand starting at position 2226 of SEQ ID NO: 588527
uucuacggguucgugaaau

SEQ ID NO: 910673 - RNA, 19 nt, Artificial Sequence
  Description of Artificial Sequence: Synthetic oligonucleotide
  Antisense strand to SEQ ID NO: 910672
auuucacgaacccguagaa

SEQ ID NO: 910674 - RNA, 19 nt, Artificial Sequence
  Description of Artificial Sequence: Synthetic oligonucleotide
  Sense strand starting at position 2230 of SEQ ID NO: 588527
acggguucgugaaaugagu

SEQ ID NO: 910675 - RNA, 19 nt, Artificial Sequence
  Description of Artificial Sequence: Synthetic oligonucleotide
  Antisense strand to SEQ ID NO: 910674
acucauuucacgaacccgu

SEQ ID NO: 910676 - RNA, 19 nt, Artificial Sequence
  Description of Artificial Sequence: Synthetic oligonucleotide
  Sense strand starting at position 2232 of SEQ ID NO: 588527
ggguucgugaaaugaguga

SEQ ID NO: 910677 - RNA, 19 nt, Artificial Sequence
  Description of Artificial Sequence: Synthetic oligonucleotide
  Antisense strand to SEQ ID NO: 910676
ucacucauuucacgaaccc

SEQ ID NO: 910678 - RNA, 19 nt, Artificial Sequence
  Description of Artificial Sequence: Synthetic oligonucleotide
  Sense strand starting at position 2236 of SEQ ID NO: 588527
ucgugaaaugagugagaac

SEQ ID NO: 910679 - RNA, 19 nt, Artificial Sequence
  Description of Artificial Sequence: Synthetic oligonucleotide
  Antisense strand to SEQ ID NO: 910678
guucucacucauuucacga

SEQ ID NO: 910680 - RNA, 19 nt, Artificial Sequence
  Description of Artificial Sequence: Synthetic oligonucleotide
  Sense strand starting at position 2239 of SEQ ID NO: 588527
ugaaaugagugagaacgau

SEQ ID NO: 910681 - RNA, 19 nt, Artificial Sequence
  Description of Artificial Sequence: Synthetic oligonucleotide
  Antisense strand to SEQ ID NO: 910680
aucguucucacucauuuca

SEQ ID NO: 910682 - RNA, 19 nt, Artificial Sequence
  Description of Artificial Sequence: Synthetic oligonucleotide
  Sense strand starting at position 2510 of SEQ ID NO: 588527
acuuucugacucugugaua

SEQ ID NO: 910683 - RNA, 19 nt, Artificial Sequence
  Description of Artificial Sequence: Synthetic oligonucleotide
  Antisense strand to SEQ ID NO: 910682
uaucacagagucagaaagu

SEQ ID NO: 910684 - RNA, 19 nt, Artificial Sequence
  Description of Artificial Sequence: Synthetic oligonucleotide
  Sense strand starting at position 2521 of SEQ ID NO: 588527
cugugauagcuuuaccuau

SEQ ID NO: 910685 - RNA, 19 nt, Artificial Sequence
  Description of Artificial Sequence: Synthetic oligonucleotide
  Antisense strand to SEQ ID NO: 910684
auagguaaagcuaucacag

SEQ ID NO: 910686 - RNA, 19 nt, Artificial Sequence
  Description of Artificial Sequence: Synthetic oligonucleotide
  Sense strand starting at position 2523 of SEQ ID NO: 588527
gugauagcuuuaccuauuc

SEQ ID NO: 910687 - RNA, 19 nt, Artificial Sequence
  Description of Artificial Sequence: Synthetic oligonucleotide
  Antisense strand to SEQ ID NO: 910686
gaauagguaaagcuaucac

SEQ ID NO: 910688 - RNA, 19 nt, Artificial Sequence
  Description of Artificial Sequence: Synthetic oligonucleotide
  Sense strand starting at position 2549 of SEQ ID NO: 588527
uucuuuauugauggaauca

SEQ ID NO: 910689 - RNA, 19 nt, Artificial Sequence
  Description of Artificial Sequence: Synthetic oligonucleotide
  Antisense strand to SEQ ID NO: 910688
ugauuccaucaauaaagaa

SEQ ID NO: 910690 - RNA, 19 nt, Artificial Sequence
  Description of Artificial Sequence: Synthetic oligonucleotide
  Sense strand starting at position 2613 of SEQ ID NO: 588527
ucaagaugcagucauguug

SEQ ID NO: 910691 - RNA, 19 nt, Artificial Sequence
  Description of Artificial Sequence: Synthetic oligonucleotide
  Antisense strand to SEQ ID NO: 910690
caacaugacugcaucuuga

SEQ ID NO: 910692 - RNA, 19 nt, Artificial Sequence
  Description of Artificial Sequence: Synthetic oligonucleotide
  Sense strand starting at position 2959 of SEQ ID NO: 588527
ggcccuuuagauggaguuu

SEQ ID NO: 910693 - RNA, 19 nt, Artificial Sequence
  Description of Artificial Sequence: Synthetic oligonucleotide
  Antisense strand to SEQ ID NO: 910692
aaacuccaucuaaagggcc

SEQ ID NO: 910694 - RNA, 19 nt, Artificial Sequence
  Description of Artificial Sequence: Synthetic oligonucleotide
  Sense strand starting at position 3209 of SEQ ID NO: 588527
ggcuguuuccaugcugcua

SEQ ID NO: 910695 - RNA, 19 nt, Artificial Sequence
  Description of Artificial Sequence: Synthetic oligonucleotide
  Antisense strand to SEQ ID NO: 910694
uagcagcauggaaacagcc

SEQ ID NO: 910696 - RNA, 19 nt, Artificial Sequence
  Description of Artificial Sequence: Synthetic oligonucleotide
  Sense strand starting at position 3584 of SEQ ID NO: 588527
uagguauggacguaagagu

SEQ ID NO: 910697 - RNA, 19 nt, Artificial Sequence
  Description of Artificial Sequence: Synthetic oligonucleotide
  Antisense strand to SEQ ID NO: 910696
acucuuacguccauaccua

SEQ ID NO: 910698 - RNA, 19 nt, Artificial Sequence
  Description of Artificial Sequence: Synthetic oligonucleotide
  Sense strand starting at position 105 of SEQ ID NO: 588531
ggaggcugaccucgaagau

SEQ ID NO: 910699 - RNA, 19 nt, Artificial Sequence
  Description of Artificial Sequence: Synthetic oligonucleotide
  Antisense strand to SEQ ID NO: 910698
aucuucgaggucagccucc

SEQ ID NO: 910700 - RNA, 19 nt, Artificial Sequence
  Description of Artificial Sequence: Synthetic oligonucleotide
  Sense strand starting at position 128 of SEQ ID NO: 588531
gagucuaaccagugauacc

SEQ ID NO: 910701 - RNA, 19 nt, Artificial Sequence
  Description of Artificial Sequence: Synthetic oligonucleotide
  Antisense strand to SEQ ID NO: 910700
gguaucacugguuagacuc

SEQ ID NO: 910702 - RNA, 19 nt, Artificial Sequence
  Description of Artificial Sequence: Synthetic oligonucleotide
  Sense strand starting at position 311 of SEQ ID NO: 588531
gauucugauuccuggagau

SEQ ID NO: 910703 - RNA, 19 nt, Artificial Sequence
  Description of Artificial Sequence: Synthetic oligonucleotide
  Antisense strand to SEQ ID NO: 910702
aucuccaggaaucagaauc

SEQ ID NO: 910704 - RNA, 19 nt, Artificial Sequence
  Description of Artificial Sequence: Synthetic oligonucleotide
  Sense strand starting at position 443 of SEQ ID NO: 588531
uugccugugcagugaugaa

SEQ ID NO: 910705 - RNA, 19 nt, Artificial Sequence
  Description of Artificial Sequence: Synthetic oligonucleotide
  Antisense strand to SEQ ID NO: 910704
uucaucacugcacaggcaa

SEQ ID NO: 910706 - RNA, 19 nt, Artificial Sequence
  Description of Artificial Sequence: Synthetic oligonucleotide
  Sense strand starting at position 450 of SEQ ID NO: 588531
ugcagugaugaacaucaca

SEQ ID NO: 910707 - RNA, 19 nt, Artificial Sequence
  Description of Artificial Sequence: Synthetic oligonucleotide
  Antisense strand to SEQ ID NO: 910706
ugugauguucaucacugca

SEQ ID NO: 910708 - RNA, 19 nt, Artificial Sequence
  Description of Artificial Sequence: Synthetic oligonucleotide
  Sense strand starting at position 645 of SEQ ID NO: 588531
ggauuauaauugcaaccua

SEQ ID NO: 910709 - RNA, 19 nt, Artificial Sequence
  Description of Artificial Sequence: Synthetic oligonucleotide
  Antisense strand to SEQ ID NO: 910708
uagguugcaauuauaaucc

SEQ ID NO: 910710 - RNA, 19 nt, Artificial Sequence
  Description of Artificial Sequence: Synthetic oligonucleotide
  Sense strand starting at position 719 of SEQ ID NO: 588531
agucuauccuucuggcuau

SEQ ID NO: 910711 - RNA, 19 nt, Artificial Sequence
  Description of Artificial Sequence: Synthetic oligonucleotide
  Antisense strand to SEQ ID NO: 910710
auagccagaaggauagacu

SEQ ID NO: 910712 - RNA, 19 nt, Artificial Sequence
  Description of Artificial Sequence: Synthetic oligonucleotide
  Sense strand starting at position 862 of SEQ ID NO: 588531
accucucagucuuaaguga

SEQ ID NO: 910713 - RNA, 19 nt, Artificial Sequence
  Description of Artificial Sequence: Synthetic oligonucleotide
  Antisense strand to SEQ ID NO: 910712
ucacuuaagacugagaggu

SEQ ID NO: 910714 - RNA, 19 nt, Artificial Sequence
  Description of Artificial Sequence: Synthetic oligonucleotide
  Sense strand starting at position 2188 of SEQ ID NO: 588531
gguaaagaugcaggcucau

SEQ ID NO: 910715 - RNA, 19 nt, Artificial Sequence
  Description of Artificial Sequence: Synthetic oligonucleotide
  Antisense strand to SEQ ID NO: 910714
augagccugcaucuuuacc

SEQ ID NO: 910716 - RNA, 19 nt, Artificial Sequence
  Description of Artificial Sequence: Synthetic oligonucleotide
  Sense strand starting at position 2304 of SEQ ID NO: 588531
cuaacugaucgcuaccguu

SEQ ID NO: 910717 - RNA, 19 nt, Artificial Sequence
  Description of Artificial Sequence: Synthetic oligonucleotide
  Antisense strand to SEQ ID NO: 910716
aacgguagcgaucaguuag

SEQ ID NO: 910718 - RNA, 19 nt, Artificial Sequence
  Description of Artificial Sequence: Synthetic oligonucleotide
  Sense strand starting at position 2325 of SEQ ID NO: 588531
cgcaucuccuccuagcaau

SEQ ID NO: 910719 - RNA, 19 nt, Artificial Sequence
  Description of Artificial Sequence: Synthetic oligonucleotide
  Antisense strand to SEQ ID NO: 910718
auugcuaggaggagaugcg

SEQ ID NO: 910720 - RNA, 19 nt, Artificial Sequence
  Description of Artificial Sequence: Synthetic oligonucleotide
  Sense strand starting at position 2366 of SEQ ID NO: 588531
gugagauggcuccgcauag

SEQ ID NO: 910721 - RNA, 19 nt, Artificial Sequence
  Description of Artificial Sequence: Synthetic oligonucleotide
  Antisense strand to SEQ ID NO: 910720
cuaugcggagccaucucac

SEQ ID NO: 910722 - RNA, 19 nt, Artificial Sequence
  Description of Artificial Sequence: Synthetic oligonucleotide
  Sense strand starting at position 2458 of SEQ ID NO: 588531
accugacauuugugacaag

SEQ ID NO: 910723 - RNA, 19 nt, Artificial Sequence
  Description of Artificial Sequence: Synthetic oligonucleotide
  Antisense strand to SEQ ID NO: 910722
cuugucacaaaugucaggu

SEQ ID NO: 910724 - RNA, 19 nt, Artificial Sequence
  Description of Artificial Sequence: Synthetic oligonucleotide
  Sense strand starting at position 2461 of SEQ ID NO: 588531
ugacauuugugacaagggu

SEQ ID NO: 910725 - RNA, 19 nt, Artificial Sequence
  Description of Artificial Sequence: Synthetic oligonucleotide
  Antisense strand to SEQ ID NO: 910724
acccuugucacaaauguca

SEQ ID NO: 910726 - RNA, 19 nt, Artificial Sequence
  Description of Artificial Sequence: Synthetic oligonucleotide
  Sense strand starting at position 2474 of SEQ ID NO: 588531
aaggguaccuggucuuauc

SEQ ID NO: 910727 - RNA, 19 nt, Artificial Sequence
  Description of Artificial Sequence: Synthetic oligonucleotide
  Antisense strand to SEQ ID NO: 910726
gauaagaccagguacccuu

SEQ ID NO: 910728 - RNA, 19 nt, Artificial Sequence
  Description of Artificial Sequence: Synthetic oligonucleotide
  Sense strand starting at position 2477 of SEQ ID NO: 588531
gguaccuggucuuaucaca

SEQ ID NO: 910729 - RNA, 19 nt, Artificial Sequence
  Description of Artificial Sequence: Synthetic oligonucleotide
  Antisense strand to SEQ ID NO: 910728
ugugauaagaccagguacc

SEQ ID NO: 910730 - RNA, 19 nt, Artificial Sequence
  Description of Artificial Sequence: Synthetic oligonucleotide
  Sense strand starting at position 2482 of SEQ ID NO: 588531
cuggucuuaucacaaaugu

SEQ ID NO: 910731 - RNA, 19 nt, Artificial Sequence
  Description of Artificial Sequence: Synthetic oligonucleotide
  Antisense strand to SEQ ID NO: 910730
acauuugugauaagaccag

SEQ ID NO: 910732 - RNA, 19 nt, Artificial Sequence
  Description of Artificial Sequence: Synthetic oligonucleotide
  Sense strand starting at position 2589 of SEQ ID NO: 588531
agagaagucauucgauaaa

SEQ ID NO: 910733 - RNA, 19 nt, Artificial Sequence
  Description of Artificial Sequence: Synthetic oligonucleotide
  Antisense strand to SEQ ID NO: 910732
uuuaucgaaugacuucucu

SEQ ID NO: 910734 - RNA, 19 nt, Artificial Sequence
  Description of Artificial Sequence: Synthetic oligonucleotide
  Sense strand starting at position 3326 of SEQ ID NO: 588531
accaguuauuuacacauga

SEQ ID NO: 910735 - RNA, 19 nt, Artificial Sequence
  Description of Artificial Sequence: Synthetic oligonucleotide
  Antisense strand to SEQ ID NO: 910734
ucauguguaaauaacuggu

SEQ ID NO: 910736 - RNA, 19 nt, Artificial Sequence
  Description of Artificial Sequence: Synthetic oligonucleotide
  Sense strand starting at position 3348 of SEQ ID NO: 588531
aaacaauacgguuguggaa

SEQ ID NO: 910737 - RNA, 19 nt, Artificial Sequence
  Description of Artificial Sequence: Synthetic oligonucleotide
  Antisense strand to SEQ ID NO: 910736
uuccacaaccguauuguuu

SEQ ID NO: 910738 - RNA, 19 nt, Artificial Sequence
  Description of Artificial Sequence: Synthetic oligonucleotide
  Sense strand starting at position 3387 of SEQ ID NO: 588531
uggaauaaguuagagauuu

SEQ ID NO: 910739 - RNA, 19 nt, Artificial Sequence
  Description of Artificial Sequence: Synthetic oligonucleotide
  Antisense strand to SEQ ID NO: 910738
aaaucucuaacuuauucca

SEQ ID NO: 910740 - RNA, 19 nt, Artificial Sequence
  Description of Artificial Sequence: Synthetic oligonucleotide
  Sense strand starting at position 3418 of SEQ ID NO: 588531
uaaguagaguuaguauaug

SEQ ID NO: 910741 - RNA, 19 nt, Artificial Sequence
  Description of Artificial Sequence: Synthetic oligonucleotide
  Antisense strand to SEQ ID NO: 910740
cauauacuaacucuacuua

SEQ ID NO: 910742 - RNA, 19 nt, Artificial Sequence
  Description of Artificial Sequence: Synthetic oligonucleotide
  Sense strand starting at position 3424 of SEQ ID NO: 588531
gaguuaguauaugauauca

SEQ ID NO: 910743 - RNA, 19 nt, Artificial Sequence
  Description of Artificial Sequence: Synthetic oligonucleotide
  Antisense strand to SEQ ID NO: 910742
ugauaucauauacuaacuc

SEQ ID NO: 910744 - RNA, 19 nt, Artificial Sequence
  Description of Artificial Sequence: Synthetic oligonucleotide
  Sense strand starting at position 3429 of SEQ ID NO: 588531
aguauaugauaucaccacu

SEQ ID NO: 910745 - RNA, 19 nt, Artificial Sequence
  Description of Artificial Sequence: Synthetic oligonucleotide
  Antisense strand to SEQ ID NO: 910744
aguggugauaucauauacu

SEQ ID NO: 910746 - RNA, 19 nt, Artificial Sequence
  Description of Artificial Sequence: Synthetic oligonucleotide
  Sense strand starting at position 3445 of SEQ ID NO: 588531
acugguaccuaagguuauu

SEQ ID NO: 910747 - RNA, 19 nt, Artificial Sequence
  Description of Artificial Sequence: Synthetic oligonucleotide
  Antisense strand to SEQ ID NO: 910746
aauaaccuuagguaccagu

SEQ ID NO: 910748 - RNA, 19 nt, Artificial Sequence
  Description of Artificial Sequence: Synthetic oligonucleotide
  Sense strand starting at position 3583 of SEQ ID NO: 588531
uaauaagagcuccguaaga

SEQ ID NO: 910749 - RNA, 19 nt, Artificial Sequence
  Description of Artificial Sequence: Synthetic oligonucleotide
  Antisense strand to SEQ ID NO: 910748
ucuuacggagcucuuauua

SEQ ID NO: 910750 - RNA, 19 nt, Artificial Sequence
  Description of Artificial Sequence: Synthetic oligonucleotide
  Sense strand starting at position 3585 of SEQ ID NO: 588531
auaagagcuccguaagaug

SEQ ID NO: 910751 - RNA, 19 nt, Artificial Sequence
  Description of Artificial Sequence: Synthetic oligonucleotide
  Antisense strand to SEQ ID NO: 910750
caucuuacggagcucuuau

SEQ ID NO: 910752 - RNA, 19 nt, Artificial Sequence
  Description of Artificial Sequence: Synthetic oligonucleotide
  Sense strand starting at position 3593 of SEQ ID NO: 588531
uccguaagauggcugacua

SEQ ID NO: 910753 - RNA, 19 nt, Artificial Sequence
  Description of Artificial Sequence: Synthetic oligonucleotide
  Antisense strand to SEQ ID NO: 910752
uagucagccaucuuacgga

SEQ ID NO: 910754 - RNA, 19 nt, Artificial Sequence
  Description of Artificial Sequence: Synthetic oligonucleotide
  Sense strand starting at position 3976 of SEQ ID NO: 588531
ugaugccagcaaugaugua

SEQ ID NO: 910755 - RNA, 19 nt, Artificial Sequence
  Description of Artificial Sequence: Synthetic oligonucleotide
  Antisense strand to SEQ ID NO: 910754
uacaucauugcuggcauca

SEQ ID NO: 910756 - RNA, 19 nt, Artificial Sequence
  Description of Artificial Sequence: Synthetic oligonucleotide
  Sense strand starting at position 3983 of SEQ ID NO: 588531
agcaaugauguaggaaaug

SEQ ID NO: 910757 - RNA, 19 nt, Artificial Sequence
  Description of Artificial Sequence: Synthetic oligonucleotide
  Antisense strand to SEQ ID NO: 910756
cauuuccuacaucauugcu

SEQ ID NO: 910758 - RNA, 19 nt, Artificial Sequence
  Description of Artificial Sequence: Synthetic oligonucleotide
  Sense strand starting at position 51 of SEQ ID NO: 588548
ucaguauuccuggaauauu

SEQ ID NO: 910759 - RNA, 19 nt, Artificial Sequence
  Description of Artificial Sequence: Synthetic oligonucleotide
  Antisense strand to SEQ ID NO: 910758
aauauuccaggaauacuga

SEQ ID NO: 910760 - RNA, 19 nt, Artificial Sequence
  Description of Artificial Sequence: Synthetic oligonucleotide
  Sense strand starting at position 89 of SEQ ID NO: 588548
uuggucuuccuuuaguauu

SEQ ID NO: 910761 - RNA, 19 nt, Artificial Sequence
  Description of Artificial Sequence: Synthetic oligonucleotide
  Antisense strand to SEQ ID NO: 910760
aauacuaaaggaagaccaa

SEQ ID NO: 910762 - RNA, 19 nt, Artificial Sequence
  Description of Artificial Sequence: Synthetic oligonucleotide
  Sense strand starting at position 91 of SEQ ID NO: 588548
ggucuuccuuuaguauuau

SEQ ID NO: 910763 - RNA, 19 nt, Artificial Sequence
  Description of Artificial Sequence: Synthetic oligonucleotide
  Antisense strand to SEQ ID NO: 910762
auaauacuaaaggaagacc

SEQ ID NO: 910764 - RNA, 19 nt, Artificial Sequence
  Description of Artificial Sequence: Synthetic oligonucleotide
  Sense strand starting at position 114 of SEQ ID NO: 588548
aauauucgucuuuguuaag

SEQ ID NO: 910765 - RNA, 19 nt, Artificial Sequence
  Description of Artificial Sequence: Synthetic oligonucleotide
  Antisense strand to SEQ ID NO: 910764
cuuaacaaagacgaauauu

SEQ ID NO: 910766 - RNA, 19 nt, Artificial Sequence
  Description of Artificial Sequence: Synthetic oligonucleotide
  Sense strand starting at position 115 of SEQ ID NO: 588548
auauucgucuuuguuaaga

SEQ ID NO: 910767 - RNA, 19 nt, Artificial Sequence
  Description of Artificial Sequence: Synthetic oligonucleotide
  Antisense strand to SEQ ID NO: 910766
ucuuaacaaagacgaauau

SEQ ID NO: 910768 - RNA, 19 nt, Artificial Sequence
  Description of Artificial Sequence: Synthetic oligonucleotide
  Sense strand starting at position 157 of SEQ ID NO: 588548
cugcauuacugaguguaaa

SEQ ID NO: 910769 - RNA, 19 nt, Artificial Sequence
  Description of Artificial Sequence: Synthetic oligonucleotide
  Antisense strand to SEQ ID NO: 910768
uuuacacucaguaaugcag

SEQ ID NO: 910770 - RNA, 19 nt, Artificial Sequence
  Description of Artificial Sequence: Synthetic oligonucleotide
  Sense strand starting at position 180 of SEQ ID NO: 588548
ccacauaugguaugcacaa

SEQ ID NO: 910771 - RNA, 19 nt, Artificial Sequence
  Description of Artificial Sequence: Synthetic oligonucleotide
  Antisense strand to SEQ ID NO: 910770
uugugcauaccauaugugg

SEQ ID NO: 910772 - RNA, 19 nt, Artificial Sequence
  Description of Artificial Sequence: Synthetic oligonucleotide
  Sense strand starting at position 226 of SEQ ID NO: 588548
uacauuaccggcugacaga

SEQ ID NO: 910773 - RNA, 19 nt, Artificial Sequence
  Description of Artificial Sequence: Synthetic oligonucleotide
  Antisense strand to SEQ ID NO: 910772
ucugucagccgguaaugua

SEQ ID NO: 910774 - RNA, 19 nt, Artificial Sequence
  Description of Artificial Sequence: Synthetic oligonucleotide
  Sense strand starting at position 366 of SEQ ID NO: 588548
cagauaauaucuguuaggu

SEQ ID NO: 910775 - RNA, 19 nt, Artificial Sequence
  Description of Artificial Sequence: Synthetic oligonucleotide
  Antisense strand to SEQ ID NO: 910774
accuaacagauauuaucug

SEQ ID NO: 910776 - RNA, 19 nt, Artificial Sequence
  Description of Artificial Sequence: Synthetic oligonucleotide
  Sense strand starting at position 408 of SEQ ID NO: 588548
caaagugugaaaugugaag

SEQ ID NO: 910777 - RNA, 19 nt, Artificial Sequence
  Description of Artificial Sequence: Synthetic oligonucleotide
  Antisense strand to SEQ ID NO: 910776
cuucacauuucacacuuug

SEQ ID NO: 910778 - RNA, 19 nt, Artificial Sequence
  Description of Artificial Sequence: Synthetic oligonucleotide
  Sense strand starting at position 415 of SEQ ID NO: 588548
ugaaaugugaagugaaucu

SEQ ID NO: 910779 - RNA, 19 nt, Artificial Sequence
  Description of Artificial Sequence: Synthetic oligonucleotide
  Antisense strand to SEQ ID NO: 910778
agauucacuucacauuuca

SEQ ID NO: 910780 - RNA, 19 nt, Artificial Sequence
  Description of Artificial Sequence: Synthetic oligonucleotide
  Sense strand starting at position 629 of SEQ ID NO: 588548
ucaguucucugagccaauc

SEQ ID NO: 910781 - RNA, 19 nt, Artificial Sequence
  Description of Artificial Sequence: Synthetic oligonucleotide
  Antisense strand to SEQ ID NO: 910780
gauuggcucagagaacuga

SEQ ID NO: 910782 - RNA, 19 nt, Artificial Sequence
  Description of Artificial Sequence: Synthetic oligonucleotide
  Sense strand starting at position 907 of SEQ ID NO: 588548
ugggcauuaguucgaauac

SEQ ID NO: 910783 - RNA, 19 nt, Artificial Sequence
  Description of Artificial Sequence: Synthetic oligonucleotide
  Antisense strand to SEQ ID NO: 910782
guauucgaacuaaugccca

SEQ ID NO: 910784 - RNA, 19 nt, Artificial Sequence
  Description of Artificial Sequence: Synthetic oligonucleotide
  Sense strand starting at position 1019 of SEQ ID NO: 588548
cugaguaucugacugagaa

SEQ ID NO: 910785 - RNA, 19 nt, Artificial Sequence
  Description of Artificial Sequence: Synthetic oligonucleotide
  Antisense strand to SEQ ID NO: 910784
uucucagucagauacucag

SEQ ID NO: 910786 - RNA, 19 nt, Artificial Sequence
  Description of Artificial Sequence: Synthetic oligonucleotide
  Sense strand starting at position 1020 of SEQ ID NO: 588548
ugaguaucugacugagaau

SEQ ID NO: 910787 - RNA, 19 nt, Artificial Sequence
  Description of Artificial Sequence: Synthetic oligonucleotide
  Antisense strand to SEQ ID NO: 910786
auucucagucagauacuca

SEQ ID NO: 910788 - RNA, 19 nt, Artificial Sequence
  Description of Artificial Sequence: Synthetic oligonucleotide
  Sense strand starting at position 1023 of SEQ ID NO: 588548
guaucugacugagaauuua

SEQ ID NO: 910789 - RNA, 19 nt, Artificial Sequence
  Description of Artificial Sequence: Synthetic oligonucleotide
  Antisense strand to SEQ ID NO: 910788
uaaauucucagucagauac

SEQ ID NO: 910790 - RNA, 19 nt, Artificial Sequence
  Description of Artificial Sequence: Synthetic oligonucleotide
  Sense strand starting at position 1875 of SEQ ID NO: 588548
aaguuauugucucuggcaa

SEQ ID NO: 910791 - RNA, 19 nt, Artificial Sequence
  Description of Artificial Sequence: Synthetic oligonucleotide
  Antisense strand to SEQ ID NO: 910790
uugccagagacaauaacuu

SEQ ID NO: 910792 - RNA, 19 nt, Artificial Sequence
  Description of Artificial Sequence: Synthetic oligonucleotide
  Sense strand starting at position 1902 of SEQ ID NO: 588548
gcagcuuugcugccucuua

SEQ ID NO: 910793 - RNA, 19 nt, Artificial Sequence
  Description of Artificial Sequence: Synthetic oligonucleotide
  Antisense strand to SEQ ID NO: 910792
uaagaggcagcaaagcugc

SEQ ID NO: 910794 - RNA, 19 nt, Artificial Sequence
  Description of Artificial Sequence: Synthetic oligonucleotide
  Sense strand starting at position 1933 of SEQ ID NO: 588548
guuaauucuccuucguguc

SEQ ID NO: 910795 - RNA, 19 nt, Artificial Sequence
  Description of Artificial Sequence: Synthetic oligonucleotide
  Antisense strand to SEQ ID NO: 910794
gacacgaaggagaauuaac

SEQ ID NO: 910796 - RNA, 19 nt, Artificial Sequence
  Description of Artificial Sequence: Synthetic oligonucleotide
  Sense strand starting at position 2033 of SEQ ID NO: 588548
ccuccuuuccaagggauca

SEQ ID NO: 910797 - RNA, 19 nt, Artificial Sequence
  Description of Artificial Sequence: Synthetic oligonucleotide
  Antisense strand to SEQ ID NO: 910796
ugaucccuuggaaaggagg

SEQ ID NO: 910798 - RNA, 19 nt, Artificial Sequence
  Description of Artificial Sequence: Synthetic oligonucleotide
  Sense strand starting at position 2100 of SEQ ID NO: 588548
cuucguaccaguggaaaug

SEQ ID NO: 910799 - RNA, 19 nt, Artificial Sequence
  Description of Artificial Sequence: Synthetic oligonucleotide
  Antisense strand to SEQ ID NO: 910798
cauuuccacugguacgaag

SEQ ID NO: 910800 - RNA, 19 nt, Artificial Sequence
  Description of Artificial Sequence: Synthetic oligonucleotide
  Sense strand starting at position 2208 of SEQ ID NO: 588548
acagacacgucagucaauu

SEQ ID NO: 910801 - RNA, 19 nt, Artificial Sequence
  Description of Artificial Sequence: Synthetic oligonucleotide
  Antisense strand to SEQ ID NO: 910800
aauugacugacgugucugu

SEQ ID NO: 910802 - RNA, 19 nt, Artificial Sequence
  Description of Artificial Sequence: Synthetic oligonucleotide
  Sense strand starting at position 2219 of SEQ ID NO: 588548
agucaauucccuggcauca

SEQ ID NO: 910803 - RNA, 19 nt, Artificial Sequence
  Description of Artificial Sequence: Synthetic oligonucleotide
  Antisense strand to SEQ ID NO: 910802
ugaugccagggaauugacu

SEQ ID NO: 910804 - RNA, 19 nt, Artificial Sequence
  Description of Artificial Sequence: Synthetic oligonucleotide
  Sense strand starting at position 2230 of SEQ ID NO: 588548
uggcaucaggcaggauauu

SEQ ID NO: 910805 - RNA, 19 nt, Artificial Sequence
  Description of Artificial Sequence: Synthetic oligonucleotide
  Antisense strand to SEQ ID NO: 910804
aauauccugccugaugcca

SEQ ID NO: 910806 - RNA, 19 nt, Artificial Sequence
  Description of Artificial Sequence: Synthetic oligonucleotide
  Sense strand starting at position 2269 of SEQ ID NO: 588548
uugcuuucucucgauaaug

SEQ ID NO: 910807 - RNA, 19 nt, Artificial Sequence
  Description of Artificial Sequence: Synthetic oligonucleotide
  Antisense strand to SEQ ID NO: 910806
cauuaucgagagaaagcaa

SEQ ID NO: 910808 - RNA, 19 nt, Artificial Sequence
  Description of Artificial Sequence: Synthetic oligonucleotide
  Sense strand starting at position 2356 of SEQ ID NO: 588548
gcggaaagguguaagaaga

SEQ ID NO: 910809 - RNA, 19 nt, Artificial Sequence
  Description of Artificial Sequence: Synthetic oligonucleotide
  Antisense strand to SEQ ID NO: 910808
ucuucuuacaccuuuccgc

SEQ ID NO: 910810 - RNA, 19 nt, Artificial Sequence
  Description of Artificial Sequence: Synthetic oligonucleotide
  Sense strand starting at position 2956 of SEQ ID NO: 588548
cccuucuguaguggagaau

SEQ ID NO: 910811 - RNA, 19 nt, Artificial Sequence
  Description of Artificial Sequence: Synthetic oligonucleotide
  Antisense strand to SEQ ID NO: 910810
auucuccacuacagaaggg

SEQ ID NO: 910812 - RNA, 19 nt, Artificial Sequence
  Description of Artificial Sequence: Synthetic oligonucleotide
  Sense strand starting at position 2957 of SEQ ID NO: 588548
ccuucuguaguggagaauu

SEQ ID NO: 910813 - RNA, 19 nt, Artificial Sequence
  Description of Artificial Sequence: Synthetic oligonucleotide
  Antisense strand to SEQ ID NO: 910812
aauucuccacuacagaagg

SEQ ID NO: 910814 - RNA, 19 nt, Artificial Sequence
  Description of Artificial Sequence: Synthetic oligonucleotide
  Sense strand starting at position 2959 of SEQ ID NO: 588548
uucuguaguggagaauuga

SEQ ID NO: 910815 - RNA, 19 nt, Artificial Sequence
  Description of Artificial Sequence: Synthetic oligonucleotide
  Antisense strand to SEQ ID NO: 910814
ucaauucuccacuacagaa

SEQ ID NO: 910816 - RNA, 19 nt, Artificial Sequence
  Description of Artificial Sequence: Synthetic oligonucleotide
  Sense strand starting at position 3017 of SEQ ID NO: 588548
cgagguccuucgaauagag

SEQ ID NO: 910817 - RNA, 19 nt, Artificial Sequence
  Description of Artificial Sequence: Synthetic oligonucleotide
  Antisense strand to SEQ ID NO: 910816
cucuauucgaaggaccucg

SEQ ID NO: 910818 - RNA, 19 nt, Artificial Sequence
  Description of Artificial Sequence: Synthetic oligonucleotide
  Sense strand starting at position 3150 of SEQ ID NO: 588548
augaauuucuuagggaauu

SEQ ID NO: 910819 - RNA, 19 nt, Artificial Sequence
  Description of Artificial Sequence: Synthetic oligonucleotide
  Antisense strand to SEQ ID NO: 910818
aauucccuaagaaauucau

SEQ ID NO: 910820 - RNA, 19 nt, Artificial Sequence
  Description of Artificial Sequence: Synthetic oligonucleotide
  Sense strand starting at position 3151 of SEQ ID NO: 588548
ugaauuucuuagggaauug

SEQ ID NO: 910821 - RNA, 19 nt, Artificial Sequence
  Description of Artificial Sequence: Synthetic oligonucleotide
  Antisense strand to SEQ ID NO: 910820
caauucccuaagaaauuca

SEQ ID NO: 910822 - RNA, 19 nt, Artificial Sequence
  Description of Artificial Sequence: Synthetic oligonucleotide
  Sense strand starting at position 3388 of SEQ ID NO: 588548
gagggaucacugggugcua

SEQ ID NO: 910823 - RNA, 19 nt, Artificial Sequence
  Description of Artificial Sequence: Synthetic oligonucleotide
  Antisense strand to SEQ ID NO: 910822
uagcacccagugaucccuc

SEQ ID NO: 910824 - RNA, 19 nt, Artificial Sequence
  Description of Artificial Sequence: Synthetic oligonucleotide
  Sense strand starting at position 3428 of SEQ ID NO: 588548
aggagagacuucgcucuca

SEQ ID NO: 910825 - RNA, 19 nt, Artificial Sequence
  Description of Artificial Sequence: Synthetic oligonucleotide
  Antisense strand to SEQ ID NO: 910824
ugagagcgaagucucuccu

SEQ ID NO: 910826 - RNA, 19 nt, Artificial Sequence
  Description of Artificial Sequence: Synthetic oligonucleotide
  Sense strand starting at position 3482 of SEQ ID NO: 588548
ggagcuucccaagaggagu

SEQ ID NO: 910827 - RNA, 19 nt, Artificial Sequence
  Description of Artificial Sequence: Synthetic oligonucleotide
  Antisense strand to SEQ ID NO: 910826
acuccucuugggaagcucc

SEQ ID NO: 910828 - RNA, 19 nt, Artificial Sequence
  Description of Artificial Sequence: Synthetic oligonucleotide
  Sense strand starting at position 3525 of SEQ ID NO: 588548
ggaauuaauugcuuacaga

SEQ ID NO: 910829 - RNA, 19 nt, Artificial Sequence
  Description of Artificial Sequence: Synthetic oligonucleotide
  Antisense strand to SEQ ID NO: 910828
ucuguaagcaauuaauucc

SEQ ID NO: 910830 - RNA, 19 nt, Artificial Sequence
  Description of Artificial Sequence: Synthetic oligonucleotide
  Sense strand starting at position 3535 of SEQ ID NO: 588548
gcuuacagagaguaaacuu

SEQ ID NO: 910831 - RNA, 19 nt, Artificial Sequence
  Description of Artificial Sequence: Synthetic oligonucleotide
  Antisense strand to SEQ ID NO: 910830
aaguuuacucucuguaagc

SEQ ID NO: 910832 - RNA, 19 nt, Artificial Sequence
  Description of Artificial Sequence: Synthetic oligonucleotide
  Sense strand starting at position 3599 of SEQ ID NO: 588548
ugcauuugugcuccgcgua

SEQ ID NO: 910833 - RNA, 19 nt, Artificial Sequence
  Description of Artificial Sequence: Synthetic oligonucleotide
  Antisense strand to SEQ ID NO: 910832
uacgcggagcacaaaugca

SEQ ID NO: 910834 - RNA, 19 nt, Artificial Sequence
  Description of Artificial Sequence: Synthetic oligonucleotide
  Sense strand starting at position 3665 of SEQ ID NO: 588548
gaggauugcugaggauuuc

SEQ ID NO: 910835 - RNA, 19 nt, Artificial Sequence
  Description of Artificial Sequence: Synthetic oligonucleotide
  Antisense strand to SEQ ID NO: 910834
gaaauccucagcaauccuc

SEQ ID NO: 910836 - RNA, 19 nt, Artificial Sequence
  Description of Artificial Sequence: Synthetic oligonucleotide
  Sense strand starting at position 3702 of SEQ ID NO: 588548
gaauaucuauggcuucgga

SEQ ID NO: 910837 - RNA, 19 nt, Artificial Sequence
  Description of Artificial Sequence: Synthetic oligonucleotide
  Antisense strand to SEQ ID NO: 910836
uccgaagccauagauauuc

SEQ ID NO: 910838 - RNA, 19 nt, Artificial Sequence
  Description of Artificial Sequence: Synthetic oligonucleotide
  Sense strand starting at position 8 of SEQ ID NO: 588549
gccacaacuugauuaaaga

SEQ ID NO: 910839 - RNA, 19 nt, Artificial Sequence
  Description of Artificial Sequence: Synthetic oligonucleotide
  Antisense strand to SEQ ID NO: 910838
ucuuuaaucaaguuguggc

SEQ ID NO: 910840 - RNA, 19 nt, Artificial Sequence
  Description of Artificial Sequence: Synthetic oligonucleotide
  Sense strand starting at position 84 of SEQ ID NO: 588549
guuauuaaggucuagggac

SEQ ID NO: 910841 - RNA, 19 nt, Artificial Sequence
  Description of Artificial Sequence: Synthetic oligonucleotide
  Antisense strand to SEQ ID NO: 910840
gucccuagaccuuaauaac

SEQ ID NO: 910842 - RNA, 19 nt, Artificial Sequence
  Description of Artificial Sequence: Synthetic oligonucleotide
  Sense strand starting at position 467 of SEQ ID NO: 588549
cucagaucuagugggaaau

SEQ ID NO: 910843 - RNA, 19 nt, Artificial Sequence
  Description of Artificial Sequence: Synthetic oligonucleotide
  Antisense strand to SEQ ID NO: 910842
auuucccacuagaucugag

SEQ ID NO: 910844 - RNA, 19 nt, Artificial Sequence
  Description of Artificial Sequence: Synthetic oligonucleotide
  Sense strand starting at position 468 of SEQ ID NO: 588549
ucagaucuagugggaaauu

SEQ ID NO: 910845 - RNA, 19 nt, Artificial Sequence
  Description of Artificial Sequence: Synthetic oligonucleotide
  Antisense strand to SEQ ID NO: 910844
aauuucccacuagaucuga

SEQ ID NO: 910846 - RNA, 19 nt, Artificial Sequence
  Description of Artificial Sequence: Synthetic oligonucleotide
  Sense strand starting at position 469 of SEQ ID NO: 588549
cagaucuagugggaaauuu

SEQ ID NO: 910847 - RNA, 19 nt, Artificial Sequence
  Description of Artificial Sequence: Synthetic oligonucleotide
  Antisense strand to SEQ ID NO: 910846
aaauuucccacuagaucug

SEQ ID NO: 910848 - RNA, 19 nt, Artificial Sequence
  Description of Artificial Sequence: Synthetic oligonucleotide
  Sense strand starting at position 734 of SEQ ID NO: 588549
ggaagaauauaggcaaugu

SEQ ID NO: 910849 - RNA, 19 nt, Artificial Sequence
  Description of Artificial Sequence: Synthetic oligonucleotide
  Antisense strand to SEQ ID NO: 910848
acauugccuauauucuucc

SEQ ID NO: 910850 - RNA, 19 nt, Artificial Sequence
  Description of Artificial Sequence: Synthetic oligonucleotide
  Sense strand starting at position 738 of SEQ ID NO: 588549
gaauauaggcaauguuaua

SEQ ID NO: 910851 - RNA, 19 nt, Artificial Sequence
  Description of Artificial Sequence: Synthetic oligonucleotide
  Antisense strand to SEQ ID NO: 910850
uauaacauugccuauauuc

SEQ ID NO: 910852 - RNA, 19 nt, Artificial Sequence
  Description of Artificial Sequence: Synthetic oligonucleotide
  Sense strand starting at position 840 of SEQ ID NO: 588549
uuaagaagaugcuuauaug

SEQ ID NO: 910853 - RNA, 19 nt, Artificial Sequence
  Description of Artificial Sequence: Synthetic oligonucleotide
  Antisense strand to SEQ ID NO: 910852
cauauaagcaucuucuuaa

SEQ ID NO: 910854 - RNA, 19 nt, Artificial Sequence
  Description of Artificial Sequence: Synthetic oligonucleotide
  Sense strand starting at position 893 of SEQ ID NO: 588549
gugagacuuuagguuuaau

SEQ ID NO: 910855 - RNA, 19 nt, Artificial Sequence
  Description of Artificial Sequence: Synthetic oligonucleotide
  Antisense strand to SEQ ID NO: 910854
auuaaaccuaaagucucac

SEQ ID NO: 910856 - RNA, 19 nt, Artificial Sequence
  Description of Artificial Sequence: Synthetic oligonucleotide
  Sense strand starting at position 935 of SEQ ID NO: 588549
ugaauaauaugcccaguau

SEQ ID NO: 910857 - RNA, 19 nt, Artificial Sequence
  Description of Artificial Sequence: Synthetic oligonucleotide
  Antisense strand to SEQ ID NO: 910856
auacugggcauauuauuca

SEQ ID NO: 910858 - RNA, 19 nt, Artificial Sequence
  Description of Artificial Sequence: Synthetic oligonucleotide
  Sense strand starting at position 958 of SEQ ID NO: 588549
ucaguuugugaacagaguu

SEQ ID NO: 910859 - RNA, 19 nt, Artificial Sequence
  Description of Artificial Sequence: Synthetic oligonucleotide
  Antisense strand to SEQ ID NO: 910858
aacucuguucacaaacuga

SEQ ID NO: 910860 - RNA, 19 nt, Artificial Sequence
  Description of Artificial Sequence: Synthetic oligonucleotide
  Sense strand starting at position 1031 of SEQ ID NO: 588549
gaagaaauagcuugagucu

SEQ ID NO: 910861 - RNA, 19 nt, Artificial Sequence
  Description of Artificial Sequence: Synthetic oligonucleotide
  Antisense strand to SEQ ID NO: 910860
agacucaagcuauuucuuc

SEQ ID NO: 910862 - RNA, 19 nt, Artificial Sequence
  Description of Artificial Sequence: Synthetic oligonucleotide
  Sense strand starting at position 1145 of SEQ ID NO: 588549
ccagacaauuucgaaauua

SEQ ID NO: 910863 - RNA, 19 nt, Artificial Sequence
  Description of Artificial Sequence: Synthetic oligonucleotide
  Antisense strand to SEQ ID NO: 910862
uaauuucgaaauugucugg

SEQ ID NO: 910864 - RNA, 19 nt, Artificial Sequence
  Description of Artificial Sequence: Synthetic oligonucleotide
  Sense strand starting at position 1175 of SEQ ID NO: 588549
cuaucauggccugauuacu

SEQ ID NO: 910865 - RNA, 19 nt, Artificial Sequence
  Description of Artificial Sequence: Synthetic oligonucleotide
  Antisense strand to SEQ ID NO: 910864
aguaaucaggccaugauag

SEQ ID NO: 910866 - RNA, 19 nt, Artificial Sequence
  Description of Artificial Sequence: Synthetic oligonucleotide
  Sense strand starting at position 1255 of SEQ ID NO: 588549
ugaaaucccugcucugacu

SEQ ID NO: 910867 - RNA, 19 nt, Artificial Sequence
  Description of Artificial Sequence: Synthetic oligonucleotide
  Antisense strand to SEQ ID NO: 910866
agucagagcagggauuuca

SEQ ID NO: 910868 - RNA, 19 nt, Artificial Sequence
  Description of Artificial Sequence: Synthetic oligonucleotide
  Sense strand starting at position 1399 of SEQ ID NO: 588549
ggcuaucuuggugacacuu

SEQ ID NO: 910869 - RNA, 19 nt, Artificial Sequence
  Description of Artificial Sequence: Synthetic oligonucleotide
  Antisense strand to SEQ ID NO: 910868
aagugucaccaagauagcc

SEQ ID NO: 910870 - RNA, 19 nt, Artificial Sequence
  Description of Artificial Sequence: Synthetic oligonucleotide
  Sense strand starting at position 1464 of SEQ ID NO: 588549
gcugacaaugugugaacaa

SEQ ID NO: 910871 - RNA, 19 nt, Artificial Sequence
  Description of Artificial Sequence: Synthetic oligonucleotide
  Antisense strand to SEQ ID NO: 910870
uuguucacacauugucagc

SEQ ID NO: 910872 - RNA, 19 nt, Artificial Sequence
  Description of Artificial Sequence: Synthetic oligonucleotide
  Sense strand starting at position 1525 of SEQ ID NO: 588549
acuuucuggucauccugaa

SEQ ID NO: 910873 - RNA, 19 nt, Artificial Sequence
  Description of Artificial Sequence: Synthetic oligonucleotide
  Antisense strand to SEQ ID NO: 910872
uucaggaugaccagaaagu

SEQ ID NO: 910874 - RNA, 19 nt, Artificial Sequence
  Description of Artificial Sequence: Synthetic oligonucleotide
  Sense strand starting at position 1555 of SEQ ID NO: 588549
guagucuguuaauuuguau

SEQ ID NO: 910875 - RNA, 19 nt, Artificial Sequence
  Description of Artificial Sequence: Synthetic oligonucleotide
  Antisense strand to SEQ ID NO: 910874
auacaaauuaacagacuac

SEQ ID NO: 910876 - RNA, 19 nt, Artificial Sequence
  Description of Artificial Sequence: Synthetic oligonucleotide
  Sense strand starting at position 1598 of SEQ ID NO: 588549
cuucuaggucuguaacacu

SEQ ID NO: 910877 - RNA, 19 nt, Artificial Sequence
  Description of Artificial Sequence: Synthetic oligonucleotide
  Antisense strand to SEQ ID NO: 910876
aguguuacagaccuagaag

SEQ ID NO: 910878 - RNA, 19 nt, Artificial Sequence
  Description of Artificial Sequence: Synthetic oligonucleotide
  Sense strand starting at position 2113 of SEQ ID NO: 588549
auugucucccuguaaucua

SEQ ID NO: 910879 - RNA, 19 nt, Artificial Sequence
  Description of Artificial Sequence: Synthetic oligonucleotide
  Antisense strand to SEQ ID NO: 910878
uagauuacagggagacaau

SEQ ID NO: 910880 - RNA, 19 nt, Artificial Sequence
  Description of Artificial Sequence: Synthetic oligonucleotide
  Sense strand starting at position 2153 of SEQ ID NO: 588549
ucccaaacucaucagugua

SEQ ID NO: 910881 - RNA, 19 nt, Artificial Sequence
  Description of Artificial Sequence: Synthetic oligonucleotide
  Antisense strand to SEQ ID NO: 910880
uacacugaugaguuuggga

SEQ ID NO: 910882 - RNA, 19 nt, Artificial Sequence
  Description of Artificial Sequence: Synthetic oligonucleotide
  Sense strand starting at position 2155 of SEQ ID NO: 588549
ccaaacucaucaguguaca

SEQ ID NO: 910883 - RNA, 19 nt, Artificial Sequence
  Description of Artificial Sequence: Synthetic oligonucleotide
  Antisense strand to SEQ ID NO: 910882
uguacacugaugaguuugg

SEQ ID NO: 910884 - RNA, 19 nt, Artificial Sequence
  Description of Artificial Sequence: Synthetic oligonucleotide
  Sense strand starting at position 2179 of SEQ ID NO: 588549
ucuggugggcaucaucaau

SEQ ID NO: 910885 - RNA, 19 nt, Artificial Sequence
  Description of Artificial Sequence: Synthetic oligonucleotide
  Antisense strand to SEQ ID NO: 910884
auugaugaugcccaccaga

SEQ ID NO: 910886 - RNA, 19 nt, Artificial Sequence
  Description of Artificial Sequence: Synthetic oligonucleotide
  Sense strand starting at position 2205 of SEQ ID NO: 588549
cuauuugacuucuauaagg

SEQ ID NO: 910887 - RNA, 19 nt, Artificial Sequence
  Description of Artificial Sequence: Synthetic oligonucleotide
  Antisense strand to SEQ ID NO: 910886
ccuuauagaagucaaauag

SEQ ID NO: 910888 - RNA, 19 nt, Artificial Sequence
  Description of Artificial Sequence: Synthetic oligonucleotide
  Sense strand starting at position 2393 of SEQ ID NO: 588549
cucugaaaucugcauguaa

SEQ ID NO: 910889 - RNA, 19 nt, Artificial Sequence
  Description of Artificial Sequence: Synthetic oligonucleotide
  Antisense strand to SEQ ID NO: 910888
uuacaugcagauuucagag

SEQ ID NO: 910890 - RNA, 19 nt, Artificial Sequence
  Description of Artificial Sequence: Synthetic oligonucleotide
  Sense strand starting at position 2579 of SEQ ID NO: 588549
auguaaauugcaugaacuc

SEQ ID NO: 910891 - RNA, 19 nt, Artificial Sequence
  Description of Artificial Sequence: Synthetic oligonucleotide
  Antisense strand to SEQ ID NO: 910890
gaguucaugcaauuuacau

SEQ ID NO: 910892 - RNA, 19 nt, Artificial Sequence
  Description of Artificial Sequence: Synthetic oligonucleotide
  Sense strand starting at position 2580 of SEQ ID NO: 588549
uguaaauugcaugaacuca

SEQ ID NO: 910893 - RNA, 19 nt, Artificial Sequence
  Description of Artificial Sequence: Synthetic oligonucleotide
  Antisense strand to SEQ ID NO: 910892
ugaguucaugcaauuuaca

SEQ ID NO: 910894 - RNA, 19 nt, Artificial Sequence
  Description of Artificial Sequence: Synthetic oligonucleotide
  Sense strand starting at position 2750 of SEQ ID NO: 588549
cacauuguagcugaaguua

SEQ ID NO: 910895 - RNA, 19 nt, Artificial Sequence
  Description of Artificial Sequence: Synthetic oligonucleotide
  Antisense strand to SEQ ID NO: 910894
uaacuucagcuacaaugug

SEQ ID NO: 910896 - RNA, 19 nt, Artificial Sequence
  Description of Artificial Sequence: Synthetic oligonucleotide
  Sense strand starting at position 3018 of SEQ ID NO: 588549
gugcauaauuugcuuaguu

SEQ ID NO: 910897 - RNA, 19 nt, Artificial Sequence
  Description of Artificial Sequence: Synthetic oligonucleotide
  Antisense strand to SEQ ID NO: 910896
aacuaagcaaauuaugcac

SEQ ID NO: 910898 - RNA, 19 nt, Artificial Sequence
  Description of Artificial Sequence: Synthetic oligonucleotide
  Sense strand starting at position 3019 of SEQ ID NO: 588549
ugcauaauuugcuuaguuu

SEQ ID NO: 910899 - RNA, 19 nt, Artificial Sequence
  Description of Artificial Sequence: Synthetic oligonucleotide
  Antisense strand to SEQ ID NO: 910898
aaacuaagcaaauuaugca

SEQ ID NO: 910900 - RNA, 19 nt, Artificial Sequence
  Description of Artificial Sequence: Synthetic oligonucleotide
  Sense strand starting at position 3205 of SEQ ID NO: 588549
ccaguucucccacacggaa

SEQ ID NO: 910901 - RNA, 19 nt, Artificial Sequence
  Description of Artificial Sequence: Synthetic oligonucleotide
  Antisense strand to SEQ ID NO: 910900
uuccgugugggagaacugg

SEQ ID NO: 910902 - RNA, 19 nt, Artificial Sequence
  Description of Artificial Sequence: Synthetic oligonucleotide
  Sense strand starting at position 3558 of SEQ ID NO: 588549
uuaugaagaauguggcuua

SEQ ID NO: 910903 - RNA, 19 nt, Artificial Sequence
  Description of Artificial Sequence: Synthetic oligonucleotide
  Antisense strand to SEQ ID NO: 910902
uaagccacauucuucauaa

SEQ ID NO: 910904 - RNA, 19 nt, Artificial Sequence
  Description of Artificial Sequence: Synthetic oligonucleotide
  Sense strand starting at position 3563 of SEQ ID NO: 588549
aagaauguggcuuagaggu

SEQ ID NO: 910905 - RNA, 19 nt, Artificial Sequence
  Description of Artificial Sequence: Synthetic oligonucleotide
  Antisense strand to SEQ ID NO: 910904
accucuaagccacauucuu

SEQ ID NO: 910906 - RNA, 19 nt, Artificial Sequence
  Description of Artificial Sequence: Synthetic oligonucleotide
  Sense strand starting at position 3605 of SEQ ID NO: 588549
aauagugaaucacuggagu

SEQ ID NO: 910907 - RNA, 19 nt, Artificial Sequence
  Description of Artificial Sequence: Synthetic oligonucleotide
  Antisense strand to SEQ ID NO: 910906
acuccagugauucacuauu

SEQ ID NO: 910908 - RNA, 19 nt, Artificial Sequence
  Description of Artificial Sequence: Synthetic oligonucleotide
  Sense strand starting at position 3608 of SEQ ID NO: 588549
agugaaucacuggaguguu

SEQ ID NO: 910909 - RNA, 19 nt, Artificial Sequence
  Description of Artificial Sequence: Synthetic oligonucleotide
  Antisense strand to SEQ ID NO: 910908
aacacuccagugauucacu

SEQ ID NO: 910910 - RNA, 19 nt, Artificial Sequence
  Description of Artificial Sequence: Synthetic oligonucleotide
  Sense strand starting at position 3646 of SEQ ID NO: 588549
guccauuguccucaacuca

SEQ ID NO: 910911 - RNA, 19 nt, Artificial Sequence
  Description of Artificial Sequence: Synthetic oligonucleotide
  Antisense strand to SEQ ID NO: 910910
ugaguugaggacaauggac

SEQ ID NO: 910912 - RNA, 19 nt, Artificial Sequence
  Description of Artificial Sequence: Synthetic oligonucleotide
  Sense strand starting at position 3693 of SEQ ID NO: 588549
uccuguuaagauggaugaa

SEQ ID NO: 910913 - RNA, 19 nt, Artificial Sequence
  Description of Artificial Sequence: Synthetic oligonucleotide
  Antisense strand to SEQ ID NO: 910912
uucauccaucuuaacagga

SEQ ID NO: 910914 - RNA, 19 nt, Artificial Sequence
  Description of Artificial Sequence: Synthetic oligonucleotide
  Sense strand starting at position 3765 of SEQ ID NO: 588549
agcucaucaucacuggaua

SEQ ID NO: 910915 - RNA, 19 nt, Artificial Sequence
  Description of Artificial Sequence: Synthetic oligonucleotide
  Antisense strand to SEQ ID NO: 910914
uauccagugaugaugagcu

SEQ ID NO: 910916 - RNA, 19 nt, Artificial Sequence
  Description of Artificial Sequence: Synthetic oligonucleotide
  Sense strand starting at position 3839 of SEQ ID NO: 588549
ggcgaucauuaacucaaua

SEQ ID NO: 910917 - RNA, 19 nt, Artificial Sequence
  Description of Artificial Sequence: Synthetic oligonucleotide
  Antisense strand to SEQ ID NO: 910916
uauugaguuaaugaucgcc

SEQ ID NO: 910918 - RNA, 19 nt, Artificial Sequence
  Description of Artificial Sequence: Synthetic oligonucleotide
  Sense strand starting at position 35 of SEQ ID NO: 588594
aggaacuguucuguauacu

SEQ ID NO: 910919 - RNA, 19 nt, Artificial Sequence
  Description of Artificial Sequence: Synthetic oligonucleotide
  Antisense strand to SEQ ID NO: 910918
aguauacagaacaguuccu

SEQ ID NO: 910920 - RNA, 19 nt, Artificial Sequence
  Description of Artificial Sequence: Synthetic oligonucleotide
  Sense strand starting at position 36 of SEQ ID NO: 588594
ggaacuguucuguauacua

SEQ ID NO: 910921 - RNA, 19 nt, Artificial Sequence
  Description of Artificial Sequence: Synthetic oligonucleotide
  Antisense strand to SEQ ID NO: 910920
uaguauacagaacaguucc

SEQ ID NO: 910922 - RNA, 19 nt, Artificial Sequence
  Description of Artificial Sequence: Synthetic oligonucleotide
  Sense strand starting at position 49 of SEQ ID NO: 588594
auacuaggguuacagaaau

SEQ ID NO: 910923 - RNA, 19 nt, Artificial Sequence
  Description of Artificial Sequence: Synthetic oligonucleotide
  Antisense strand to SEQ ID NO: 910922
auuucuguaacccuaguau

SEQ ID NO: 910924 - RNA, 19 nt, Artificial Sequence
  Description of Artificial Sequence: Synthetic oligonucleotide
  Sense strand starting at position 88 of SEQ ID NO: 588594
uuauauuccagugagugag

SEQ ID NO: 910925 - RNA, 19 nt, Artificial Sequence
  Description of Artificial Sequence: Synthetic oligonucleotide
  Antisense strand to SEQ ID NO: 910924
cucacucacuggaauauaa

SEQ ID NO: 910926 - RNA, 19 nt, Artificial Sequence
  Description of Artificial Sequence: Synthetic oligonucleotide
  Sense strand starting at position 130 of SEQ ID NO: 588594
ugacaauuauggcuucuga

SEQ ID NO: 910927 - RNA, 19 nt, Artificial Sequence
  Description of Artificial Sequence: Synthetic oligonucleotide
  Antisense strand to SEQ ID NO: 910926
ucagaagccauaauuguca

SEQ ID NO: 910928 - RNA, 19 nt, Artificial Sequence
  Description of Artificial Sequence: Synthetic oligonucleotide
  Sense strand starting at position 152 of SEQ ID NO: 588594
agauaagcuguaugaagaa

SEQ ID NO: 910929 - RNA, 19 nt, Artificial Sequence
  Description of Artificial Sequence: Synthetic oligonucleotide
  Antisense strand to SEQ ID NO: 910928
uucuucauacagcuuaucu

SEQ ID NO: 910930 - RNA, 19 nt, Artificial Sequence
  Description of Artificial Sequence: Synthetic oligonucleotide
  Sense strand starting at position 206 of SEQ ID NO: 588594
ggagagaaugagugguugu

SEQ ID NO: 910931 - RNA, 19 nt, Artificial Sequence
  Description of Artificial Sequence: Synthetic oligonucleotide
  Antisense strand to SEQ ID NO: 910930
acaaccacucauucucucc

SEQ ID NO: 910932 - RNA, 19 nt, Artificial Sequence
  Description of Artificial Sequence: Synthetic oligonucleotide
  Sense strand starting at position 207 of SEQ ID NO: 588594
gagagaaugagugguuguu

SEQ ID NO: 910933 - RNA, 19 nt, Artificial Sequence
  Description of Artificial Sequence: Synthetic oligonucleotide
  Antisense strand to SEQ ID NO: 910932
aacaaccacucauucucuc

SEQ ID NO: 910934 - RNA, 19 nt, Artificial Sequence
  Description of Artificial Sequence: Synthetic oligonucleotide
  Sense strand starting at position 239 of SEQ ID NO: 588594
cagggagguuaacacuuaa

SEQ ID NO: 910935 - RNA, 19 nt, Artificial Sequence
  Description of Artificial Sequence: Synthetic oligonucleotide
  Antisense strand to SEQ ID NO: 910934
uuaaguguuaaccucccug

SEQ ID NO: 910936 - RNA, 19 nt, Artificial Sequence
  Description of Artificial Sequence: Synthetic oligonucleotide
  Sense strand starting at position 246 of SEQ ID NO: 588594
guuaacacuuaagaagaau

SEQ ID NO: 910937 - RNA, 19 nt, Artificial Sequence
  Description of Artificial Sequence: Synthetic oligonucleotide
  Antisense strand to SEQ ID NO: 910936
auucuucuuaaguguuaac

SEQ ID NO: 910938 - RNA, 19 nt, Artificial Sequence
  Description of Artificial Sequence: Synthetic oligonucleotide
  Sense strand starting at position 257 of SEQ ID NO: 588594
agaagaauugugugaaagc

SEQ ID NO: 910939 - RNA, 19 nt, Artificial Sequence
  Description of Artificial Sequence: Synthetic oligonucleotide
  Antisense strand to SEQ ID NO: 910938
gcuuucacacaauucuucu

SEQ ID NO: 910940 - RNA, 19 nt, Artificial Sequence
  Description of Artificial Sequence: Synthetic oligonucleotide
  Sense strand starting at position 260 of SEQ ID NO: 588594
agaauugugugaaagcgag

SEQ ID NO: 910941 - RNA, 19 nt, Artificial Sequence
  Description of Artificial Sequence: Synthetic oligonucleotide
  Antisense strand to SEQ ID NO: 910940
cucgcuuucacacaauucu

SEQ ID NO: 910942 - RNA, 19 nt, Artificial Sequence
  Description of Artificial Sequence: Synthetic oligonucleotide
  Sense strand starting at position 330 of SEQ ID NO: 588594
accaccuugguguguauua

SEQ ID NO: 910943 - RNA, 19 nt, Artificial Sequence
  Description of Artificial Sequence: Synthetic oligonucleotide
  Antisense strand to SEQ ID NO: 910942
uaauacacaccaagguggu

SEQ ID NO: 910944 - RNA, 19 nt, Artificial Sequence
  Description of Artificial Sequence: Synthetic oligonucleotide
  Sense strand starting at position 367 of SEQ ID NO: 588594
cugugacuggaauguaaua

SEQ ID NO: 910945 - RNA, 19 nt, Artificial Sequence
  Description of Artificial Sequence: Synthetic oligonucleotide
  Antisense strand to SEQ ID NO: 910944
uauuacauuccagucacag

SEQ ID NO: 910946 - RNA, 19 nt, Artificial Sequence
  Description of Artificial Sequence: Synthetic oligonucleotide
  Sense strand starting at position 515 of SEQ ID NO: 588594
aaggaaugaugugaucuga

SEQ ID NO: 910947 - RNA, 19 nt, Artificial Sequence
  Description of Artificial Sequence: Synthetic oligonucleotide
  Antisense strand to SEQ ID NO: 910946
ucagaucacaucauuccuu

SEQ ID NO: 910948 - RNA, 19 nt, Artificial Sequence
  Description of Artificial Sequence: Synthetic oligonucleotide
  Sense strand starting at position 724 of SEQ ID NO: 588594
acagaauaaguguggcuaa

SEQ ID NO: 910949 - RNA, 19 nt, Artificial Sequence
  Description of Artificial Sequence: Synthetic oligonucleotide
  Antisense strand to SEQ ID NO: 910948
uuagccacacuuauucugu

SEQ ID NO: 910950 - RNA, 19 nt, Artificial Sequence
  Description of Artificial Sequence: Synthetic oligonucleotide
  Sense strand starting at position 727 of SEQ ID NO: 588594
gaauaaguguggcuaacaa

SEQ ID NO: 910951 - RNA, 19 nt, Artificial Sequence
  Description of Artificial Sequence: Synthetic oligonucleotide
  Antisense strand to SEQ ID NO: 910950
uuguuagccacacuuauuc

SEQ ID NO: 910952 - RNA, 19 nt, Artificial Sequence
  Description of Artificial Sequence: Synthetic oligonucleotide
  Sense strand starting at position 758 of SEQ ID NO: 588594
acauuuaccuguugauuuc

SEQ ID NO: 910953 - RNA, 19 nt, Artificial Sequence
  Description of Artificial Sequence: Synthetic oligonucleotide
  Antisense strand to SEQ ID NO: 910952
gaaaucaacagguaaaugu

SEQ ID NO: 910954 - RNA, 19 nt, Artificial Sequence
  Description of Artificial Sequence: Synthetic oligonucleotide
  Sense strand starting at position 1021 of SEQ ID NO: 588594
uguagcuuucagggcaaga

SEQ ID NO: 910955 - RNA, 19 nt, Artificial Sequence
  Description of Artificial Sequence: Synthetic oligonucleotide
  Antisense strand to SEQ ID NO: 910954
ucuugcccugaaagcuaca

SEQ ID NO: 910956 - RNA, 19 nt, Artificial Sequence
  Description of Artificial Sequence: Synthetic oligonucleotide
  Sense strand starting at position 1045 of SEQ ID NO: 588594
ugcagaaauggguguuugu

SEQ ID NO: 910957 - RNA, 19 nt, Artificial Sequence
  Description of Artificial Sequence: Synthetic oligonucleotide
  Antisense strand to SEQ ID NO: 910956
acaaacacccauuucugca

SEQ ID NO: 910958 - RNA, 19 nt, Artificial Sequence
  Description of Artificial Sequence: Synthetic oligonucleotide
  Sense strand starting at position 1104 of SEQ ID NO: 588594
gaacucuucugagucuaag

SEQ ID NO: 910959 - RNA, 19 nt, Artificial Sequence
  Description of Artificial Sequence: Synthetic oligonucleotide
  Antisense strand to SEQ ID NO: 910958
cuuagacucagaagaguuc

SEQ ID NO: 910960 - RNA, 19 nt, Artificial Sequence
  Description of Artificial Sequence: Synthetic oligonucleotide
  Sense strand starting at position 1232 of SEQ ID NO: 588594
ccuacuguuuaagaagaaa

SEQ ID NO: 910961 - RNA, 19 nt, Artificial Sequence
  Description of Artificial Sequence: Synthetic oligonucleotide
  Antisense strand to SEQ ID NO: 910960
uuucuucuuaaacaguagg

SEQ ID NO: 910962 - RNA, 19 nt, Artificial Sequence
  Description of Artificial Sequence: Synthetic oligonucleotide
  Sense strand starting at position 1380 of SEQ ID NO: 588594
accgaagucaaucaaggua

SEQ ID NO: 910963 - RNA, 19 nt, Artificial Sequence
  Description of Artificial Sequence: Synthetic oligonucleotide
  Antisense strand to SEQ ID NO: 910962
uaccuugauugacuucggu

SEQ ID NO: 910964 - RNA, 19 nt, Artificial Sequence
  Description of Artificial Sequence: Synthetic oligonucleotide
  Sense strand starting at position 2106 of SEQ ID NO: 588594
uucucuucucgcgagauua

SEQ ID NO: 910965 - RNA, 19 nt, Artificial Sequence
  Description of Artificial Sequence: Synthetic oligonucleotide
  Antisense strand to SEQ ID NO: 910964
uaaucucgcgagaagagaa

SEQ ID NO: 910966 - RNA, 19 nt, Artificial Sequence
  Description of Artificial Sequence: Synthetic oligonucleotide
  Sense strand starting at position 2108 of SEQ ID NO: 588594
cucuucucgcgagauuaga

SEQ ID NO: 910967 - RNA, 19 nt, Artificial Sequence
  Description of Artificial Sequence: Synthetic oligonucleotide
  Antisense strand to SEQ ID NO: 910966
ucuaaucucgcgagaagag

SEQ ID NO: 910968 - RNA, 19 nt, Artificial Sequence
  Description of Artificial Sequence: Synthetic oligonucleotide
  Sense strand starting at position 2183 of SEQ ID NO: 588594
ugggcgguucccggaaaga

SEQ ID NO: 910969 - RNA, 19 nt, Artificial Sequence
  Description of Artificial Sequence: Synthetic oligonucleotide
  Antisense strand to SEQ ID NO: 910968
ucuuuccgggaaccgccca

SEQ ID NO: 910970 - RNA, 19 nt, Artificial Sequence
  Description of Artificial Sequence: Synthetic oligonucleotide
  Sense strand starting at position 2279 of SEQ ID NO: 588594
gaaggaaaccguggagguu

SEQ ID NO: 910971 - RNA, 19 nt, Artificial Sequence
  Description of Artificial Sequence: Synthetic oligonucleotide
  Antisense strand to SEQ ID NO: 910970
aaccuccacgguuuccuuc

SEQ ID NO: 910972 - RNA, 19 nt, Artificial Sequence
  Description of Artificial Sequence: Synthetic oligonucleotide
  Sense strand starting at position 2291 of SEQ ID NO: 588594
ggagguuugcguagaccuu

SEQ ID NO: 910973 - RNA, 19 nt, Artificial Sequence
  Description of Artificial Sequence: Synthetic oligonucleotide
  Antisense strand to SEQ ID NO: 910972
aaggucuacgcaaaccucc

SEQ ID NO: 910974 - RNA, 19 nt, Artificial Sequence
  Description of Artificial Sequence: Synthetic oligonucleotide
  Sense strand starting at position 2292 of SEQ ID NO: 588594
gagguuugcguagaccuua

SEQ ID NO: 910975 - RNA, 19 nt, Artificial Sequence
  Description of Artificial Sequence: Synthetic oligonucleotide
  Antisense strand to SEQ ID NO: 910974
uaaggucuacgcaaaccuc

SEQ ID NO: 910976 - RNA, 19 nt, Artificial Sequence
  Description of Artificial Sequence: Synthetic oligonucleotide
  Sense strand starting at position 2402 of SEQ ID NO: 588594
ugggaguuucgugaggaaa

SEQ ID NO: 910977 - RNA, 19 nt, Artificial Sequence
  Description of Artificial Sequence: Synthetic oligonucleotide
  Antisense strand to SEQ ID NO: 910976
uuuccucacgaaacuccca

SEQ ID NO: 910978 - RNA, 19 nt, Artificial Sequence
  Description of Artificial Sequence: Synthetic oligonucleotide
  Sense strand starting at position 2405 of SEQ ID NO: 588594
gaguuucgugaggaaacau

SEQ ID NO: 910979 - RNA, 19 nt, Artificial Sequence
  Description of Artificial Sequence: Synthetic oligonucleotide
  Antisense strand to SEQ ID NO: 910978
auguuuccucacgaaacuc

SEQ ID NO: 910980 - RNA, 19 nt, Artificial Sequence
  Description of Artificial Sequence: Synthetic oligonucleotide
  Sense strand starting at position 2548 of SEQ ID NO: 588594
agguaagaagcacaucuuu

SEQ ID NO: 910981 - RNA, 19 nt, Artificial Sequence
  Description of Artificial Sequence: Synthetic oligonucleotide
  Antisense strand to SEQ ID NO: 910980
aaagaugugcuucuuaccu

SEQ ID NO: 910982 - RNA, 19 nt, Artificial Sequence
  Description of Artificial Sequence: Synthetic oligonucleotide
  Sense strand starting at position 2570 of SEQ ID NO: 588594
accaccuguucuuuaggau

SEQ ID NO: 910983 - RNA, 19 nt, Artificial Sequence
  Description of Artificial Sequence: Synthetic oligonucleotide
  Antisense strand to SEQ ID NO: 910982
auccuaaagaacagguggu

SEQ ID NO: 910984 - RNA, 19 nt, Artificial Sequence
  Description of Artificial Sequence: Synthetic oligonucleotide
  Sense strand starting at position 2745 of SEQ ID NO: 588594
ccaguaaucuacgaauuua

SEQ ID NO: 910985 - RNA, 19 nt, Artificial Sequence
  Description of Artificial Sequence: Synthetic oligonucleotide
  Antisense strand to SEQ ID NO: 910984
uaaauucguagauuacugg

SEQ ID NO: 910986 - RNA, 19 nt, Artificial Sequence
  Description of Artificial Sequence: Synthetic oligonucleotide
  Sense strand starting at position 2756 of SEQ ID NO: 588594
cgaauuuacuuaggaacaa

SEQ ID NO: 910987 - RNA, 19 nt, Artificial Sequence
  Description of Artificial Sequence: Synthetic oligonucleotide
  Antisense strand to SEQ ID NO: 910986
uuguuccuaaguaaauucg

SEQ ID NO: 910988 - RNA, 19 nt, Artificial Sequence
  Description of Artificial Sequence: Synthetic oligonucleotide
  Sense strand starting at position 2791 of SEQ ID NO: 588594
aggcuuguacguuaauguu

SEQ ID NO: 910989 - RNA, 19 nt, Artificial Sequence
  Description of Artificial Sequence: Synthetic oligonucleotide
  Antisense strand to SEQ ID NO: 910988
aacauuaacguacaagccu

SEQ ID NO: 910990 - RNA, 19 nt, Artificial Sequence
  Description of Artificial Sequence: Synthetic oligonucleotide
  Sense strand starting at position 3298 of SEQ ID NO: 588594
aagaaaucaggcugagcuu

SEQ ID NO: 910991 - RNA, 19 nt, Artificial Sequence
  Description of Artificial Sequence: Synthetic oligonucleotide
  Antisense strand to SEQ ID NO: 910990
aagcucagccugauuucuu

SEQ ID NO: 910992 - RNA, 19 nt, Artificial Sequence
  Description of Artificial Sequence: Synthetic oligonucleotide
  Sense strand starting at position 3525 of SEQ ID NO: 588594
ugcugugacccgagauggu

SEQ ID NO: 910993 - RNA, 19 nt, Artificial Sequence
  Description of Artificial Sequence: Synthetic oligonucleotide
  Antisense strand to SEQ ID NO: 910992
accaucucgggucacagca

SEQ ID NO: 910994 - RNA, 19 nt, Artificial Sequence
  Description of Artificial Sequence: Synthetic oligonucleotide
  Sense strand starting at position 3693 of SEQ ID NO: 588594
agagcuugauuugaaguga

SEQ ID NO: 910995 - RNA, 19 nt, Artificial Sequence
  Description of Artificial Sequence: Synthetic oligonucleotide
  Antisense strand to SEQ ID NO: 910994
ucacuucaaaucaagcucu

SEQ ID NO: 910996 - RNA, 19 nt, Artificial Sequence
  Description of Artificial Sequence: Synthetic oligonucleotide
  Sense strand starting at position 3742 of SEQ ID NO: 588594
gccugugugggugaauaca

SEQ ID NO: 910997 - RNA, 19 nt, Artificial Sequence
  Description of Artificial Sequence: Synthetic oligonucleotide
  Antisense strand to SEQ ID NO: 910996
uguauucacccacacaggc

SEQ ID NO: 910998 - RNA, 19 nt, Artificial Sequence
  Description of Artificial Sequence: Synthetic oligonucleotide
  Sense strand starting at position 90 of SEQ ID NO: 588637
cuaugcuaggccugaacau

SEQ ID NO: 910999 - RNA, 19 nt, Artificial Sequence
  Description of Artificial Sequence: Synthetic oligonucleotide
  Antisense strand to SEQ ID NO: 910998
auguucaggccuagcauag

SEQ ID NO: 911000 - RNA, 19 nt, Artificial Sequence
  Description of Artificial Sequence: Synthetic oligonucleotide
  Sense strand starting at position 143 of SEQ ID NO: 588637
aggcuuacaccauaagcau

SEQ ID NO: 911001 - RNA, 19 nt, Artificial Sequence
  Description of Artificial Sequence: Synthetic oligonucleotide
  Antisense strand to SEQ ID NO: 911000
augcuuaugguguaagccu

SEQ ID NO: 911002 - RNA, 19 nt, Artificial Sequence
  Description of Artificial Sequence: Synthetic oligonucleotide
  Sense strand starting at position 186 of SEQ ID NO: 588637
cuaggaaggucucuuacuu

SEQ ID NO: 911003 - RNA, 19 nt, Artificial Sequence
  Description of Artificial Sequence: Synthetic oligonucleotide
  Antisense strand to SEQ ID NO: 911002
aaguaagagaccuuccuag

SEQ ID NO: 911004 - RNA, 19 nt, Artificial Sequence
  Description of Artificial Sequence: Synthetic oligonucleotide
  Sense strand starting at position 215 of SEQ ID NO: 588637
acagguuaucuuggucaac

SEQ ID NO: 911005 - RNA, 19 nt, Artificial Sequence
  Description of Artificial Sequence: Synthetic oligonucleotide
  Antisense strand to SEQ ID NO: 911004
guugaccaagauaaccugu

SEQ ID NO: 911006 - RNA, 19 nt, Artificial Sequence
  Description of Artificial Sequence: Synthetic oligonucleotide
  Sense strand starting at position 216 of SEQ ID NO: 588637
cagguuaucuuggucaacu

SEQ ID NO: 911007 - RNA, 19 nt, Artificial Sequence
  Description of Artificial Sequence: Synthetic oligonucleotide
  Antisense strand to SEQ ID NO: 911006
aguugaccaagauaaccug

SEQ ID NO: 911008 - RNA, 19 nt, Artificial Sequence
  Description of Artificial Sequence: Synthetic oligonucleotide
  Sense strand starting at position 217 of SEQ ID NO: 588637
agguuaucuuggucaacua

SEQ ID NO: 911009 - RNA, 19 nt, Artificial Sequence
  Description of Artificial Sequence: Synthetic oligonucleotide
  Antisense strand to SEQ ID NO: 911008
uaguugaccaagauaaccu

SEQ ID NO: 911010 - RNA, 19 nt, Artificial Sequence
  Description of Artificial Sequence: Synthetic oligonucleotide
  Sense strand starting at position 218 of SEQ ID NO: 588637
gguuaucuuggucaacuac

SEQ ID NO: 911011 - RNA, 19 nt, Artificial Sequence
  Description of Artificial Sequence: Synthetic oligonucleotide
  Antisense strand to SEQ ID NO: 911010
guaguugaccaagauaacc

SEQ ID NO: 911012 - RNA, 19 nt, Artificial Sequence
  Description of Artificial Sequence: Synthetic oligonucleotide
  Sense strand starting at position 241 of SEQ ID NO: 588637
gcagaaacaugguuguaug

SEQ ID NO: 911013 - RNA, 19 nt, Artificial Sequence
  Description of Artificial Sequence: Synthetic oligonucleotide
  Antisense strand to SEQ ID NO: 911012
cauacaaccauguuucugc

SEQ ID NO: 911014 - RNA, 19 nt, Artificial Sequence
  Description of Artificial Sequence: Synthetic oligonucleotide
  Sense strand starting at position 242 of SEQ ID NO: 588637
cagaaacaugguuguaugu

SEQ ID NO: 911015 - RNA, 19 nt, Artificial Sequence
  Description of Artificial Sequence: Synthetic oligonucleotide
  Antisense strand to SEQ ID NO: 911014
acauacaaccauguuucug

SEQ ID NO: 911016 - RNA, 19 nt, Artificial Sequence
  Description of Artificial Sequence: Synthetic oligonucleotide
  Sense strand starting at position 366 of SEQ ID NO: 588637
gggagaaacuuugccuuac

SEQ ID NO: 911017 - RNA, 19 nt, Artificial Sequence
  Description of Artificial Sequence: Synthetic oligonucleotide
  Antisense strand to SEQ ID NO: 911016
guaaggcaaaguuucuccc

SEQ ID NO: 911018 - RNA, 19 nt, Artificial Sequence
  Description of Artificial Sequence: Synthetic oligonucleotide
  Sense strand starting at position 367 of SEQ ID NO: 588637
ggagaaacuuugccuuaca

SEQ ID NO: 911019 - RNA, 19 nt, Artificial Sequence
  Description of Artificial Sequence: Synthetic oligonucleotide
  Antisense strand to SEQ ID NO: 911018
uguaaggcaaaguuucucc

SEQ ID NO: 911020 - RNA, 19 nt, Artificial Sequence
  Description of Artificial Sequence: Synthetic oligonucleotide
  Sense strand starting at position 512 of SEQ ID NO: 588637
gcaaguucuugcuugguga

SEQ ID NO: 911021 - RNA, 19 nt, Artificial Sequence
  Description of Artificial Sequence: Synthetic oligonucleotide
  Antisense strand to SEQ ID NO: 911020
ucaccaagcaagaacuugc

SEQ ID NO: 911022 - RNA, 19 nt, Artificial Sequence
  Description of Artificial Sequence: Synthetic oligonucleotide
  Sense strand starting at position 513 of SEQ ID NO: 588637
caaguucuugcuuggugau

SEQ ID NO: 911023 - RNA, 19 nt, Artificial Sequence
  Description of Artificial Sequence: Synthetic oligonucleotide
  Antisense strand to SEQ ID NO: 911022
aucaccaagcaagaacuug

SEQ ID NO: 911024 - RNA, 19 nt, Artificial Sequence
  Description of Artificial Sequence: Synthetic oligonucleotide
  Sense strand starting at position 525 of SEQ ID NO: 588637
uggugaugcauuugucaca

SEQ ID NO: 911025 - RNA, 19 nt, Artificial Sequence
  Description of Artificial Sequence: Synthetic oligonucleotide
  Antisense strand to SEQ ID NO: 911024
ugugacaaaugcaucacca

SEQ ID NO: 911026 - RNA, 19 nt, Artificial Sequence
  Description of Artificial Sequence: Synthetic oligonucleotide
  Sense strand starting at position 528 of SEQ ID NO: 588637
ugaugcauuugucacaaag

SEQ ID NO: 911027 - RNA, 19 nt, Artificial Sequence
  Description of Artificial Sequence: Synthetic oligonucleotide
  Antisense strand to SEQ ID NO: 911026
cuuugugacaaaugcauca

SEQ ID NO: 911028 - RNA, 19 nt, Artificial Sequence
  Description of Artificial Sequence: Synthetic oligonucleotide
  Sense strand starting at position 530 of SEQ ID NO: 588637
augcauuugucacaaagca

SEQ ID NO: 911029 - RNA, 19 nt, Artificial Sequence
  Description of Artificial Sequence: Synthetic oligonucleotide
  Antisense strand to SEQ ID NO: 911028
ugcuuugugacaaaugcau

SEQ ID NO: 911030 - RNA, 19 nt, Artificial Sequence
  Description of Artificial Sequence: Synthetic oligonucleotide
  Sense strand starting at position 654 of SEQ ID NO: 588637
aguucuacccagugcuuua

SEQ ID NO: 911031 - RNA, 19 nt, Artificial Sequence
  Description of Artificial Sequence: Synthetic oligonucleotide
  Antisense strand to SEQ ID NO: 911030
uaaagcacuggguagaacu

SEQ ID NO: 911032 - RNA, 19 nt, Artificial Sequence
  Description of Artificial Sequence: Synthetic oligonucleotide
  Sense strand starting at position 678 of SEQ ID NO: 588637
caaccuaguccugggaaau

SEQ ID NO: 911033 - RNA, 19 nt, Artificial Sequence
  Description of Artificial Sequence: Synthetic oligonucleotide
  Antisense strand to SEQ ID NO: 911032
auuucccaggacuagguug

SEQ ID NO: 911034 - RNA, 19 nt, Artificial Sequence
  Description of Artificial Sequence: Synthetic oligonucleotide
  Sense strand starting at position 740 of SEQ ID NO: 588637
aucauaucucugggaaguc

SEQ ID NO: 911035 - RNA, 19 nt, Artificial Sequence
  Description of Artificial Sequence: Synthetic oligonucleotide
  Antisense strand to SEQ ID NO: 911034
gacuucccagagauaugau

SEQ ID NO: 911036 - RNA, 19 nt, Artificial Sequence
  Description of Artificial Sequence: Synthetic oligonucleotide
  Sense strand starting at position 741 of SEQ ID NO: 588637
ucauaucucugggaaguca

SEQ ID NO: 911037 - RNA, 19 nt, Artificial Sequence
  Description of Artificial Sequence: Synthetic oligonucleotide
  Antisense strand to SEQ ID NO: 911036
ugacuucccagagauauga

SEQ ID NO: 911038 - RNA, 19 nt, Artificial Sequence
  Description of Artificial Sequence: Synthetic oligonucleotide
  Sense strand starting at position 980 of SEQ ID NO: 588637
ucaacagauuugggaaagu

SEQ ID NO: 911039 - RNA, 19 nt, Artificial Sequence
  Description of Artificial Sequence: Synthetic oligonucleotide
  Antisense strand to SEQ ID NO: 911038
acuuucccaaaucuguuga

SEQ ID NO: 911040 - RNA, 19 nt, Artificial Sequence
  Description of Artificial Sequence: Synthetic oligonucleotide
  Sense strand starting at position 1018 of SEQ ID NO: 588637
ucuagugaauauuaaugga

SEQ ID NO: 911041 - RNA, 19 nt, Artificial Sequence
  Description of Artificial Sequence: Synthetic oligonucleotide
  Antisense strand to SEQ ID NO: 911040
uccauuaauauucacuaga

SEQ ID NO: 911042 - RNA, 19 nt, Artificial Sequence
  Description of Artificial Sequence: Synthetic oligonucleotide
  Sense strand starting at position 1021 of SEQ ID NO: 588637
agugaauauuaauggaacu

SEQ ID NO: 911043 - RNA, 19 nt, Artificial Sequence
  Description of Artificial Sequence: Synthetic oligonucleotide
  Antisense strand to SEQ ID NO: 911042
aguuccauuaauauucacu

SEQ ID NO: 911044 - RNA, 19 nt, Artificial Sequence
  Description of Artificial Sequence: Synthetic oligonucleotide
  Sense strand starting at position 1089 of SEQ ID NO: 588637
uaaguuagugcauacugaa

SEQ ID NO: 911045 - RNA, 19 nt, Artificial Sequence
  Description of Artificial Sequence: Synthetic oligonucleotide
  Antisense strand to SEQ ID NO: 911044
uucaguaugcacuaacuua

SEQ ID NO: 911046 - RNA, 19 nt, Artificial Sequence
  Description of Artificial Sequence: Synthetic oligonucleotide
  Sense strand starting at position 1122 of SEQ ID NO: 588637
ccagcagagcuuugaaaua

SEQ ID NO: 911047 - RNA, 19 nt, Artificial Sequence
  Description of Artificial Sequence: Synthetic oligonucleotide
  Antisense strand to SEQ ID NO: 911046
uauuucaaagcucugcugg

SEQ ID NO: 911048 - RNA, 19 nt, Artificial Sequence
  Description of Artificial Sequence: Synthetic oligonucleotide
  Sense strand starting at position 1155 of SEQ ID NO: 588637
aguuccuucccacgaggaa

SEQ ID NO: 911049 - RNA, 19 nt, Artificial Sequence
  Description of Artificial Sequence: Synthetic oligonucleotide
  Antisense strand to SEQ ID NO: 911048
uuccucgugggaaggaacu

SEQ ID NO: 911050 - RNA, 19 nt, Artificial Sequence
  Description of Artificial Sequence: Synthetic oligonucleotide
  Sense strand starting at position 1156 of SEQ ID NO: 588637
guuccuucccacgaggaau

SEQ ID NO: 911051 - RNA, 19 nt, Artificial Sequence
  Description of Artificial Sequence: Synthetic oligonucleotide
  Antisense strand to SEQ ID NO: 911050
auuccucgugggaaggaac

SEQ ID NO: 911052 - RNA, 19 nt, Artificial Sequence
  Description of Artificial Sequence: Synthetic oligonucleotide
  Sense strand starting at position 1177 of SEQ ID NO: 588637
auauauaaucggcauaugu

SEQ ID NO: 911053 - RNA, 19 nt, Artificial Sequence
  Description of Artificial Sequence: Synthetic oligonucleotide
  Antisense strand to SEQ ID NO: 911052
acauaugccgauuauauau

SEQ ID NO: 911054 - RNA, 19 nt, Artificial Sequence
  Description of Artificial Sequence: Synthetic oligonucleotide
  Sense strand starting at position 1179 of SEQ ID NO: 588637
auauaaucggcauauguau

SEQ ID NO: 911055 - RNA, 19 nt, Artificial Sequence
  Description of Artificial Sequence: Synthetic oligonucleotide
  Antisense strand to SEQ ID NO: 911054
auacauaugccgauuauau

SEQ ID NO: 911056 - RNA, 19 nt, Artificial Sequence
  Description of Artificial Sequence: Synthetic oligonucleotide
  Sense strand starting at position 1185 of SEQ ID NO: 588637
ucggcauauguauaucuau

SEQ ID NO: 911057 - RNA, 19 nt, Artificial Sequence
  Description of Artificial Sequence: Synthetic oligonucleotide
  Antisense strand to SEQ ID NO: 911056
auagauauacauaugccga

SEQ ID NO: 911058 - RNA, 19 nt, Artificial Sequence
  Description of Artificial Sequence: Synthetic oligonucleotide
  Sense strand starting at position 1207 of SEQ ID NO: 588637
ugaaacuuauucuaaagug

SEQ ID NO: 911059 - RNA, 19 nt, Artificial Sequence
  Description of Artificial Sequence: Synthetic oligonucleotide
  Antisense strand to SEQ ID NO: 911058
cacuuuagaauaaguuuca

SEQ ID NO: 911060 - RNA, 19 nt, Artificial Sequence
  Description of Artificial Sequence: Synthetic oligonucleotide
  Sense strand starting at position 1249 of SEQ ID NO: 588637
gucccaagccagugaaaca

SEQ ID NO: 911061 - RNA, 19 nt, Artificial Sequence
  Description of Artificial Sequence: Synthetic oligonucleotide
  Antisense strand to SEQ ID NO: 911060
uguuucacuggcuugggac

SEQ ID NO: 911062 - RNA, 19 nt, Artificial Sequence
  Description of Artificial Sequence: Synthetic oligonucleotide
  Sense strand starting at position 1412 of SEQ ID NO: 588637
acucacauuucggugaugu

SEQ ID NO: 911063 - RNA, 19 nt, Artificial Sequence
  Description of Artificial Sequence: Synthetic oligonucleotide
  Antisense strand to SEQ ID NO: 911062
acaucaccgaaaugugagu

SEQ ID NO: 911064 - RNA, 19 nt, Artificial Sequence
  Description of Artificial Sequence: Synthetic oligonucleotide
  Sense strand starting at position 1413 of SEQ ID NO: 588637
cucacauuucggugauguu

SEQ ID NO: 911065 - RNA, 19 nt, Artificial Sequence
  Description of Artificial Sequence: Synthetic oligonucleotide
  Antisense strand to SEQ ID NO: 911064
aacaucaccgaaaugugag

SEQ ID NO: 911066 - RNA, 19 nt, Artificial Sequence
  Description of Artificial Sequence: Synthetic oligonucleotide
  Sense strand starting at position 2018 of SEQ ID NO: 588637
acgcguaagacugagcgua

SEQ ID NO: 911067 - RNA, 19 nt, Artificial Sequence
  Description of Artificial Sequence: Synthetic oligonucleotide
  Antisense strand to SEQ ID NO: 911066
uacgcucagucuuacgcgu

SEQ ID NO: 911068 - RNA, 19 nt, Artificial Sequence
  Description of Artificial Sequence: Synthetic oligonucleotide
  Sense strand starting at position 2253 of SEQ ID NO: 588637
acaggauuccaugguacag

SEQ ID NO: 911069 - RNA, 19 nt, Artificial Sequence
  Description of Artificial Sequence: Synthetic oligonucleotide
  Antisense strand to SEQ ID NO: 911068
cuguaccauggaauccugu

SEQ ID NO: 911070 - RNA, 19 nt, Artificial Sequence
  Description of Artificial Sequence: Synthetic oligonucleotide
  Sense strand starting at position 3084 of SEQ ID NO: 588637
augcgcugauucuuauuau

SEQ ID NO: 911071 - RNA, 19 nt, Artificial Sequence
  Description of Artificial Sequence: Synthetic oligonucleotide
  Antisense strand to SEQ ID NO: 911070
auaauaagaaucagcgcau

SEQ ID NO: 911072 - RNA, 19 nt, Artificial Sequence
  Description of Artificial Sequence: Synthetic oligonucleotide
  Sense strand starting at position 3087 of SEQ ID NO: 588637
cgcugauucuuauuauagg

SEQ ID NO: 911073 - RNA, 19 nt, Artificial Sequence
  Description of Artificial Sequence: Synthetic oligonucleotide
  Antisense strand to SEQ ID NO: 911072
ccuauaauaagaaucagcg

SEQ ID NO: 911074 - RNA, 19 nt, Artificial Sequence
  Description of Artificial Sequence: Synthetic oligonucleotide
  Sense strand starting at position 3214 of SEQ ID NO: 588637
ugcauugguaaccaaggau

SEQ ID NO: 911075 - RNA, 19 nt, Artificial Sequence
  Description of Artificial Sequence: Synthetic oligonucleotide
  Antisense strand to SEQ ID NO: 911074
auccuugguuaccaaugca

SEQ ID NO: 911076 - RNA, 19 nt, Artificial Sequence
  Description of Artificial Sequence: Synthetic oligonucleotide
  Sense strand starting at position 3417 of SEQ ID NO: 588637
ccugaugcguauucuaaau

SEQ ID NO: 911077 - RNA, 19 nt, Artificial Sequence
  Description of Artificial Sequence: Synthetic oligonucleotide
  Antisense strand to SEQ ID NO: 911076
auuuagaauacgcaucagg

SEQ ID NO: 911078 - RNA, 19 nt, Artificial Sequence
  Description of Artificial Sequence: Synthetic oligonucleotide
  Sense strand starting at position 334 of SEQ ID NO: 588638
acaggauuccaugguacag

SEQ ID NO: 911079 - RNA, 19 nt, Artificial Sequence
  Description of Artificial Sequence: Synthetic oligonucleotide
  Antisense strand to SEQ ID NO: 911078
cuguaccauggaauccugu

SEQ ID NO: 911080 - RNA, 19 nt, Artificial Sequence
  Description of Artificial Sequence: Synthetic oligonucleotide
  Sense strand starting at position 1165 of SEQ ID NO: 588638
augcgcugauucuuauuau

SEQ ID NO: 911081 - RNA, 19 nt, Artificial Sequence
  Description of Artificial Sequence: Synthetic oligonucleotide
  Antisense strand to SEQ ID NO: 911080
auaauaagaaucagcgcau

SEQ ID NO: 911082 - RNA, 19 nt, Artificial Sequence
  Description of Artificial Sequence: Synthetic oligonucleotide
  Sense strand starting at position 1168 of SEQ ID NO: 588638
cgcugauucuuauuauagg

SEQ ID NO: 911083 - RNA, 19 nt, Artificial Sequence
  Description of Artificial Sequence: Synthetic oligonucleotide
  Antisense strand to SEQ ID NO: 911082
ccuauaauaagaaucagcg

SEQ ID NO: 911084 - RNA, 19 nt, Artificial Sequence
  Description of Artificial Sequence: Synthetic oligonucleotide
  Sense strand starting at position 1295 of SEQ ID NO: 588638
ugcauugguaaccaaggau

SEQ ID NO: 911085 - RNA, 19 nt, Artificial Sequence
  Description of Artificial Sequence: Synthetic oligonucleotide
  Antisense strand to SEQ ID NO: 911084
auccuugguuaccaaugca

SEQ ID NO: 911086 - RNA, 19 nt, Artificial Sequence
  Description of Artificial Sequence: Synthetic oligonucleotide
  Sense strand starting at position 1498 of SEQ ID NO: 588638
ccugaugcguauucuaaau

SEQ ID NO: 911087 - RNA, 19 nt, Artificial Sequence
  Description of Artificial Sequence: Synthetic oligonucleotide
  Antisense strand to SEQ ID NO: 911086
auuuagaauacgcaucagg

SEQ ID NO: 911088 - RNA, 19 nt, Artificial Sequence
  Description of Artificial Sequence: Synthetic oligonucleotide
  Sense strand starting at position 2259 of SEQ ID NO: 588638
cugaucuacccgcagaguu

SEQ ID NO: 911089 - RNA, 19 nt, Artificial Sequence
  Description of Artificial Sequence: Synthetic oligonucleotide
  Antisense strand to SEQ ID NO: 911088
aacucugcggguagaucag

SEQ ID NO: 911090 - RNA, 19 nt, Artificial Sequence
  Description of Artificial Sequence: Synthetic oligonucleotide
  Sense strand starting at position 2294 of SEQ ID NO: 588638
caagaaaccgaacguuaga

SEQ ID NO: 911091 - RNA, 19 nt, Artificial Sequence
  Description of Artificial Sequence: Synthetic oligonucleotide
  Antisense strand to SEQ ID NO: 911090
ucuaacguucgguuucuug

SEQ ID NO: 911092 - RNA, 19 nt, Artificial Sequence
  Description of Artificial Sequence: Synthetic oligonucleotide
  Sense strand starting at position 2303 of SEQ ID NO: 588638
gaacguuagagugaaugcu

SEQ ID NO: 911093 - RNA, 19 nt, Artificial Sequence
  Description of Artificial Sequence: Synthetic oligonucleotide
  Antisense strand to SEQ ID NO: 911092
agcauucacucuaacguuc

SEQ ID NO: 911094 - RNA, 19 nt, Artificial Sequence
  Description of Artificial Sequence: Synthetic oligonucleotide
  Sense strand starting at position 2311 of SEQ ID NO: 588638
gagugaaugcucggaucua

SEQ ID NO: 911095 - RNA, 19 nt, Artificial Sequence
  Description of Artificial Sequence: Synthetic oligonucleotide
  Antisense strand to SEQ ID NO: 911094
uagauccgagcauucacuc

SEQ ID NO: 911096 - RNA, 19 nt, Artificial Sequence
  Description of Artificial Sequence: Synthetic oligonucleotide
  Sense strand starting at position 2328 of SEQ ID NO: 588638
uaggccaagcguuaaauau

SEQ ID NO: 911097 - RNA, 19 nt, Artificial Sequence
  Description of Artificial Sequence: Synthetic oligonucleotide
  Antisense strand to SEQ ID NO: 911096
auauuuaacgcuuggccua

SEQ ID NO: 911098 - RNA, 19 nt, Artificial Sequence
  Description of Artificial Sequence: Synthetic oligonucleotide
  Sense strand starting at position 2338 of SEQ ID NO: 588638
guuaaauauuacgaaggga

SEQ ID NO: 911099 - RNA, 19 nt, Artificial Sequence
  Description of Artificial Sequence: Synthetic oligonucleotide
  Antisense strand to SEQ ID NO: 911098
ucccuucguaauauuuaac

SEQ ID NO: 911100 - RNA, 19 nt, Artificial Sequence
  Description of Artificial Sequence: Synthetic oligonucleotide
  Sense strand starting at position 2402 of SEQ ID NO: 588638
gaguguaaccgcgggaauu

SEQ ID NO: 911101 - RNA, 19 nt, Artificial Sequence
  Description of Artificial Sequence: Synthetic oligonucleotide
  Antisense strand to SEQ ID NO: 911100
aauucccgcgguuacacuc

SEQ ID NO: 911102 - RNA, 19 nt, Artificial Sequence
  Description of Artificial Sequence: Synthetic oligonucleotide
  Sense strand starting at position 2502 of SEQ ID NO: 588638
acacacaucgaguggugaa

SEQ ID NO: 911103 - RNA, 19 nt, Artificial Sequence
  Description of Artificial Sequence: Synthetic oligonucleotide
  Antisense strand to SEQ ID NO: 911102
uucaccacucgaugugugu

SEQ ID NO: 911104 - RNA, 19 nt, Artificial Sequence
  Description of Artificial Sequence: Synthetic oligonucleotide
  Sense strand starting at position 2527 of SEQ ID NO: 588638
ggcugaaguuuacuccuga

SEQ ID NO: 911105 - RNA, 19 nt, Artificial Sequence
  Description of Artificial Sequence: Synthetic oligonucleotide
  Antisense strand to SEQ ID NO: 911104
ucaggaguaaacuucagcc

SEQ ID NO: 911106 - RNA, 19 nt, Artificial Sequence
  Description of Artificial Sequence: Synthetic oligonucleotide
  Sense strand starting at position 2639 of SEQ ID NO: 588638
cugucuugucagugaaccu

SEQ ID NO: 911107 - RNA, 19 nt, Artificial Sequence
  Description of Artificial Sequence: Synthetic oligonucleotide
  Antisense strand to SEQ ID NO: 911106
agguucacugacaagacag

SEQ ID NO: 911108 - RNA, 19 nt, Artificial Sequence
  Description of Artificial Sequence: Synthetic oligonucleotide
  Sense strand starting at position 2640 of SEQ ID NO: 588638
ugucuugucagugaaccuu

SEQ ID NO: 911109 - RNA, 19 nt, Artificial Sequence
  Description of Artificial Sequence: Synthetic oligonucleotide
  Antisense strand to SEQ ID NO: 911108
aagguucacugacaagaca

SEQ ID NO: 911110 - RNA, 19 nt, Artificial Sequence
  Description of Artificial Sequence: Synthetic oligonucleotide
  Sense strand starting at position 2794 of SEQ ID NO: 588638
gucaaugcgguauggagaa

SEQ ID NO: 911111 - RNA, 19 nt, Artificial Sequence
  Description of Artificial Sequence: Synthetic oligonucleotide
  Antisense strand to SEQ ID NO: 911110
uucuccauaccgcauugac

SEQ ID NO: 911112 - RNA, 19 nt, Artificial Sequence
  Description of Artificial Sequence: Synthetic oligonucleotide
  Sense strand starting at position 2796 of SEQ ID NO: 588638
caaugcgguauggagaaua

SEQ ID NO: 911113 - RNA, 19 nt, Artificial Sequence
  Description of Artificial Sequence: Synthetic oligonucleotide
  Antisense strand to SEQ ID NO: 911112
uauucuccauaccgcauug

SEQ ID NO: 911114 - RNA, 19 nt, Artificial Sequence
  Description of Artificial Sequence: Synthetic oligonucleotide
  Sense strand starting at position 2815 of SEQ ID NO: 588638
ggcagucuuacggugguuu

SEQ ID NO: 911115 - RNA, 19 nt, Artificial Sequence
  Description of Artificial Sequence: Synthetic oligonucleotide
  Antisense strand to SEQ ID NO: 911114
aaaccaccguaagacugcc

SEQ ID NO: 911116 - RNA, 19 nt, Artificial Sequence
  Description of Artificial Sequence: Synthetic oligonucleotide
  Sense strand starting at position 2830 of SEQ ID NO: 588638
guuuguacaccagaagagu

SEQ ID NO: 911117 - RNA, 19 nt, Artificial Sequence
  Description of Artificial Sequence: Synthetic oligonucleotide
  Antisense strand to SEQ ID NO: 911116
acucuucugguguacaaac

SEQ ID NO: 911118 - RNA, 19 nt, Artificial Sequence
  Description of Artificial Sequence: Synthetic oligonucleotide
  Sense strand starting at position 2841 of SEQ ID NO: 588638
agaagagucuaauuauguu

SEQ ID NO: 911119 - RNA, 19 nt, Artificial Sequence
  Description of Artificial Sequence: Synthetic oligonucleotide
  Antisense strand to SEQ ID NO: 911118
aacauaauuagacucuucu

SEQ ID NO: 911120 - RNA, 19 nt, Artificial Sequence
  Description of Artificial Sequence: Synthetic oligonucleotide
  Sense strand starting at position 2858 of SEQ ID NO: 588638
uuggaauauuuguagaguu

SEQ ID NO: 911121 - RNA, 19 nt, Artificial Sequence
  Description of Artificial Sequence: Synthetic oligonucleotide
  Antisense strand to SEQ ID NO: 911120
aacucuacaaauauuccaa

SEQ ID NO: 911122 - RNA, 19 nt, Artificial Sequence
  Description of Artificial Sequence: Synthetic oligonucleotide
  Sense strand starting at position 2866 of SEQ ID NO: 588638
uuuguagaguuucuauuag

SEQ ID NO: 911123 - RNA, 19 nt, Artificial Sequence
  Description of Artificial Sequence: Synthetic oligonucleotide
  Antisense strand to SEQ ID NO: 911122
cuaauagaaacucuacaaa

SEQ ID NO: 911124 - RNA, 19 nt, Artificial Sequence
  Description of Artificial Sequence: Synthetic oligonucleotide
  Sense strand starting at position 2897 of SEQ ID NO: 588638
cuacuauuauaguuggauu

SEQ ID NO: 911125 - RNA, 19 nt, Artificial Sequence
  Description of Artificial Sequence: Synthetic oligonucleotide
  Antisense strand to SEQ ID NO: 911124
aauccaacuauaauaguag

SEQ ID NO: 911126 - RNA, 19 nt, Artificial Sequence
  Description of Artificial Sequence: Synthetic oligonucleotide
  Sense strand starting at position 3111 of SEQ ID NO: 588638
auugauaucucucaaggac

SEQ ID NO: 911127 - RNA, 19 nt, Artificial Sequence
  Description of Artificial Sequence: Synthetic oligonucleotide
  Antisense strand to SEQ ID NO: 911126
guccuugagagauaucaau

SEQ ID NO: 911128 - RNA, 19 nt, Artificial Sequence
  Description of Artificial Sequence: Synthetic oligonucleotide
  Sense strand starting at position 3125 of SEQ ID NO: 588638
aggacauaguagguguuaa

SEQ ID NO: 911129 - RNA, 19 nt, Artificial Sequence
  Description of Artificial Sequence: Synthetic oligonucleotide
  Antisense strand to SEQ ID NO: 911128
uuaacaccuacuauguccu

SEQ ID NO: 911130 - RNA, 19 nt, Artificial Sequence
  Description of Artificial Sequence: Synthetic oligonucleotide
  Sense strand starting at position 3203 of SEQ ID NO: 588638
accucuaagucugcaagaa

SEQ ID NO: 911131 - RNA, 19 nt, Artificial Sequence
  Description of Artificial Sequence: Synthetic oligonucleotide
  Antisense strand to SEQ ID NO: 911130
uucuugcagacuuagaggu

SEQ ID NO: 911132 - RNA, 19 nt, Artificial Sequence
  Description of Artificial Sequence: Synthetic oligonucleotide
  Sense strand starting at position 3204 of SEQ ID NO: 588638
ccucuaagucugcaagaac

SEQ ID NO: 911133 - RNA, 19 nt, Artificial Sequence
  Description of Artificial Sequence: Synthetic oligonucleotide
  Antisense strand to SEQ ID NO: 911132
guucuugcagacuuagagg

SEQ ID NO: 911134 - RNA, 19 nt, Artificial Sequence
  Description of Artificial Sequence: Synthetic oligonucleotide
  Sense strand starting at position 3213 of SEQ ID NO: 588638
cugcaagaaccuggauaau

SEQ ID NO: 911135 - RNA, 19 nt, Artificial Sequence
  Description of Artificial Sequence: Synthetic oligonucleotide
  Antisense strand to SEQ ID NO: 911134
auuauccagguucuugcag

SEQ ID NO: 911136 - RNA, 19 nt, Artificial Sequence
  Description of Artificial Sequence: Synthetic oligonucleotide
  Sense strand starting at position 3278 of SEQ ID NO: 588638
ugcguucugagugcuccua

SEQ ID NO: 911137 - RNA, 19 nt, Artificial Sequence
  Description of Artificial Sequence: Synthetic oligonucleotide
  Antisense strand to SEQ ID NO: 911136
uaggagcacucagaacgca

SEQ ID NO: 911138 - RNA, 19 nt, Artificial Sequence
  Description of Artificial Sequence: Synthetic oligonucleotide
  Sense strand starting at position 3314 of SEQ ID NO: 588638
gccuuacuuucugucucau

SEQ ID NO: 911139 - RNA, 19 nt, Artificial Sequence
  Description of Artificial Sequence: Synthetic oligonucleotide
  Antisense strand to SEQ ID NO: 911138
augagacagaaaguaaggc

SEQ ID NO: 911140 - RNA, 19 nt, Artificial Sequence
  Description of Artificial Sequence: Synthetic oligonucleotide
  Sense strand starting at position 3320 of SEQ ID NO: 588638
cuuucugucucauuuagua

SEQ ID NO: 911141 - RNA, 19 nt, Artificial Sequence
  Description of Artificial Sequence: Synthetic oligonucleotide
  Antisense strand to SEQ ID NO: 911140
uacuaaaugagacagaaag

SEQ ID NO: 911142 - RNA, 19 nt, Artificial Sequence
  Description of Artificial Sequence: Synthetic oligonucleotide
  Sense strand starting at position 3428 of SEQ ID NO: 588638
acuggugaucaguagcuau

SEQ ID NO: 911143 - RNA, 19 nt, Artificial Sequence
  Description of Artificial Sequence: Synthetic oligonucleotide
  Antisense strand to SEQ ID NO: 911142
auagcuacugaucaccagu

SEQ ID NO: 911144 - RNA, 19 nt, Artificial Sequence
  Description of Artificial Sequence: Synthetic oligonucleotide
  Sense strand starting at position 3492 of SEQ ID NO: 588638
uaagauaugucccagagau

SEQ ID NO: 911145 - RNA, 19 nt, Artificial Sequence
  Description of Artificial Sequence: Synthetic oligonucleotide
  Antisense strand to SEQ ID NO: 911144
aucucugggacauaucuua

SEQ ID NO: 911146 - RNA, 19 nt, Artificial Sequence
  Description of Artificial Sequence: Synthetic oligonucleotide
  Sense strand starting at position 3527 of SEQ ID NO: 588638
agaucacaccuuuguaaga

SEQ ID NO: 911147 - RNA, 19 nt, Artificial Sequence
  Description of Artificial Sequence: Synthetic oligonucleotide
  Antisense strand to SEQ ID NO: 911146
ucuuacaaaggugugaucu

SEQ ID NO: 911148 - RNA, 19 nt, Artificial Sequence
  Description of Artificial Sequence: Synthetic oligonucleotide
  Sense strand starting at position 3532 of SEQ ID NO: 588638
acaccuuuguaagagauga

SEQ ID NO: 911149 - RNA, 19 nt, Artificial Sequence
  Description of Artificial Sequence: Synthetic oligonucleotide
  Antisense strand to SEQ ID NO: 911148
ucaucucuuacaaaggugu

SEQ ID NO: 911150 - RNA, 19 nt, Artificial Sequence
  Description of Artificial Sequence: Synthetic oligonucleotide
  Sense strand starting at position 3590 of SEQ ID NO: 588638
ucuagaucccuugaaugca

SEQ ID NO: 911151 - RNA, 19 nt, Artificial Sequence
  Description of Artificial Sequence: Synthetic oligonucleotide
  Antisense strand to SEQ ID NO: 911150
ugcauucaagggaucuaga

SEQ ID NO: 911152 - RNA, 19 nt, Artificial Sequence
  Description of Artificial Sequence: Synthetic oligonucleotide
  Sense strand starting at position 3641 of SEQ ID NO: 588638
ugcacugaaccaugaugua

SEQ ID NO: 911153 - RNA, 19 nt, Artificial Sequence
  Description of Artificial Sequence: Synthetic oligonucleotide
  Antisense strand to SEQ ID NO: 911152
uacaucaugguucagugca

SEQ ID NO: 911154 - RNA, 19 nt, Artificial Sequence
  Description of Artificial Sequence: Synthetic oligonucleotide
  Sense strand starting at position 3883 of SEQ ID NO: 588638
auccaauacugaguuguaa

SEQ ID NO: 911155 - RNA, 19 nt, Artificial Sequence
  Description of Artificial Sequence: Synthetic oligonucleotide
  Antisense strand to SEQ ID NO: 911154
uuacaacucaguauuggau

SEQ ID NO: 911156 - RNA, 19 nt, Artificial Sequence
  Description of Artificial Sequence: Synthetic oligonucleotide
  Sense strand starting at position 3954 of SEQ ID NO: 588638
cggauuuguucucucaauc

SEQ ID NO: 911157 - RNA, 19 nt, Artificial Sequence
  Description of Artificial Sequence: Synthetic oligonucleotide
  Antisense strand to SEQ ID NO: 911156
gauugagagaacaaauccg

SEQ ID NO: 911158 - RNA, 19 nt, Artificial Sequence
  Description of Artificial Sequence: Synthetic oligonucleotide
  Sense strand starting at position 357 of SEQ ID NO: 588640
uguguuuacuuccuacauu

SEQ ID NO: 911159 - RNA, 19 nt, Artificial Sequence
  Description of Artificial Sequence: Synthetic oligonucleotide
  Antisense strand to SEQ ID NO: 911158
aauguaggaaguaaacaca

SEQ ID NO: 911160 - RNA, 19 nt, Artificial Sequence
  Description of Artificial Sequence: Synthetic oligonucleotide
  Sense strand starting at position 633 of SEQ ID NO: 588640
uuuggaaaguaaucuuguu

SEQ ID NO: 911161 - RNA, 19 nt, Artificial Sequence
  Description of Artificial Sequence: Synthetic oligonucleotide
  Antisense strand to SEQ ID NO: 911160
aacaagauuacuuuccaaa

SEQ ID NO: 911162 - RNA, 19 nt, Artificial Sequence
  Description of Artificial Sequence: Synthetic oligonucleotide
  Sense strand starting at position 1025 of SEQ ID NO: 588640
gauguuuaacuuugaggga

SEQ ID NO: 911163 - RNA, 19 nt, Artificial Sequence
  Description of Artificial Sequence: Synthetic oligonucleotide
  Antisense strand to SEQ ID NO: 911162
ucccucaaaguuaaacauc

SEQ ID NO: 911164 - RNA, 19 nt, Artificial Sequence
  Description of Artificial Sequence: Synthetic oligonucleotide
  Sense strand starting at position 1108 of SEQ ID NO: 588640
ugguuauagcacuggaggu

SEQ ID NO: 911165 - RNA, 19 nt, Artificial Sequence
  Description of Artificial Sequence: Synthetic oligonucleotide
  Antisense strand to SEQ ID NO: 911164
accuccagugcuauaacca

SEQ ID NO: 911166 - RNA, 19 nt, Artificial Sequence
  Description of Artificial Sequence: Synthetic oligonucleotide
  Sense strand starting at position 1109 of SEQ ID NO: 588640
gguuauagcacuggaggua

SEQ ID NO: 911167 - RNA, 19 nt, Artificial Sequence
  Description of Artificial Sequence: Synthetic oligonucleotide
  Antisense strand to SEQ ID NO: 911166
uaccuccagugcuauaacc

SEQ ID NO: 911168 - RNA, 19 nt, Artificial Sequence
  Description of Artificial Sequence: Synthetic oligonucleotide
  Sense strand starting at position 1140 of SEQ ID NO: 588640
cuugaaggcucucuuuauc

SEQ ID NO: 911169 - RNA, 19 nt, Artificial Sequence
  Description of Artificial Sequence: Synthetic oligonucleotide
  Antisense strand to SEQ ID NO: 911168
gauaaagagagccuucaag

SEQ ID NO: 911170 - RNA, 19 nt, Artificial Sequence
  Description of Artificial Sequence: Synthetic oligonucleotide
  Sense strand starting at position 1176 of SEQ ID NO: 588640
ccggacuucugagucaucu

SEQ ID NO: 911171 - RNA, 19 nt, Artificial Sequence
  Description of Artificial Sequence: Synthetic oligonucleotide
  Antisense strand to SEQ ID NO: 911170
agaugacucagaaguccgg

SEQ ID NO: 911172 - RNA, 19 nt, Artificial Sequence
  Description of Artificial Sequence: Synthetic oligonucleotide
  Sense strand starting at position 1178 of SEQ ID NO: 588640
ggacuucugagucaucugu

SEQ ID NO: 911173 - RNA, 19 nt, Artificial Sequence
  Description of Artificial Sequence: Synthetic oligonucleotide
  Antisense strand to SEQ ID NO: 911172
acagaugacucagaagucc

SEQ ID NO: 911174 - RNA, 19 nt, Artificial Sequence
  Description of Artificial Sequence: Synthetic oligonucleotide
  Sense strand starting at position 1180 of SEQ ID NO: 588640
acuucugagucaucuguga

SEQ ID NO: 911175 - RNA, 19 nt, Artificial Sequence
  Description of Artificial Sequence: Synthetic oligonucleotide
  Antisense strand to SEQ ID NO: 911174
ucacagaugacucagaagu

SEQ ID NO: 911176 - RNA, 19 nt, Artificial Sequence
  Description of Artificial Sequence: Synthetic oligonucleotide
  Sense strand starting at position 1184 of SEQ ID NO: 588640
cugagucaucugugaaaua

SEQ ID NO: 911177 - RNA, 19 nt, Artificial Sequence
  Description of Artificial Sequence: Synthetic oligonucleotide
  Antisense strand to SEQ ID NO: 911176
uauuucacagaugacucag

SEQ ID NO: 911178 - RNA, 19 nt, Artificial Sequence
  Description of Artificial Sequence: Synthetic oligonucleotide
  Sense strand starting at position 1218 of SEQ ID NO: 588640
aguugcgagaauugaauga

SEQ ID NO: 911179 - RNA, 19 nt, Artificial Sequence
  Description of Artificial Sequence: Synthetic oligonucleotide
  Antisense strand to SEQ ID NO: 911178
ucauucaauucucgcaacu

SEQ ID NO: 911180 - RNA, 19 nt, Artificial Sequence
  Description of Artificial Sequence: Synthetic oligonucleotide
  Sense strand starting at position 1222 of SEQ ID NO: 588640
gcgagaauugaaugagaua

SEQ ID NO: 911181 - RNA, 19 nt, Artificial Sequence
  Description of Artificial Sequence: Synthetic oligonucleotide
  Antisense strand to SEQ ID NO: 911180
uaucucauucaauucucgc

SEQ ID NO: 911182 - RNA, 19 nt, Artificial Sequence
  Description of Artificial Sequence: Synthetic oligonucleotide
  Sense strand starting at position 1225 of SEQ ID NO: 588640
agaauugaaugagauaacu

SEQ ID NO: 911183 - RNA, 19 nt, Artificial Sequence
  Description of Artificial Sequence: Synthetic oligonucleotide
  Antisense strand to SEQ ID NO: 911182
aguuaucucauucaauucu

SEQ ID NO: 911184 - RNA, 19 nt, Artificial Sequence
  Description of Artificial Sequence: Synthetic oligonucleotide
  Sense strand starting at position 1235 of SEQ ID NO: 588640
gagauaacuccugggaagc

SEQ ID NO: 911185 - RNA, 19 nt, Artificial Sequence
  Description of Artificial Sequence: Synthetic oligonucleotide
  Antisense strand to SEQ ID NO: 911184
gcuucccaggaguuaucuc

SEQ ID NO: 911186 - RNA, 19 nt, Artificial Sequence
  Description of Artificial Sequence: Synthetic oligonucleotide
  Sense strand starting at position 1274 of SEQ ID NO: 588640
uagaaagcacuuugucaga

SEQ ID NO: 911187 - RNA, 19 nt, Artificial Sequence
  Description of Artificial Sequence: Synthetic oligonucleotide
  Antisense strand to SEQ ID NO: 911186
ucugacaaagugcuuucua

SEQ ID NO: 911188 - RNA, 19 nt, Artificial Sequence
  Description of Artificial Sequence: Synthetic oligonucleotide
  Sense strand starting at position 1276 of SEQ ID NO: 588640
gaaagcacuuugucagaau

SEQ ID NO: 911189 - RNA, 19 nt, Artificial Sequence
  Description of Artificial Sequence: Synthetic oligonucleotide
  Antisense strand to SEQ ID NO: 911188
auucugacaaagugcuuuc

SEQ ID NO: 911190 - RNA, 19 nt, Artificial Sequence
  Description of Artificial Sequence: Synthetic oligonucleotide
  Sense strand starting at position 1283 of SEQ ID NO: 588640
cuuugucagaauuguaguu

SEQ ID NO: 911191 - RNA, 19 nt, Artificial Sequence
  Description of Artificial Sequence: Synthetic oligonucleotide
  Antisense strand to SEQ ID NO: 911190
aacuacaauucugacaaag

SEQ ID NO: 911192 - RNA, 19 nt, Artificial Sequence
  Description of Artificial Sequence: Synthetic oligonucleotide
  Sense strand starting at position 1351 of SEQ ID NO: 588640
ugaaaucucuuggaggauu

SEQ ID NO: 911193 - RNA, 19 nt, Artificial Sequence
  Description of Artificial Sequence: Synthetic oligonucleotide
  Antisense strand to SEQ ID NO: 911192
aauccuccaagagauuuca

SEQ ID NO: 911194 - RNA, 19 nt, Artificial Sequence
  Description of Artificial Sequence: Synthetic oligonucleotide
  Sense strand starting at position 2059 of SEQ ID NO: 588640
gauuucgucacgugacguu

SEQ ID NO: 911195 - RNA, 19 nt, Artificial Sequence
  Description of Artificial Sequence: Synthetic oligonucleotide
  Antisense strand to SEQ ID NO: 911194
aacgucacgugacgaaauc

SEQ ID NO: 911196 - RNA, 19 nt, Artificial Sequence
  Description of Artificial Sequence: Synthetic oligonucleotide
  Sense strand starting at position 2385 of SEQ ID NO: 588640
agagauaugacccgagagu

SEQ ID NO: 911197 - RNA, 19 nt, Artificial Sequence
  Description of Artificial Sequence: Synthetic oligonucleotide
  Antisense strand to SEQ ID NO: 911196
acucucgggucauaucucu

SEQ ID NO: 911198 - RNA, 19 nt, Artificial Sequence
  Description of Artificial Sequence: Synthetic oligonucleotide
  Sense strand starting at position 2547 of SEQ ID NO: 588640
gccuucuacguccaauaca

SEQ ID NO: 911199 - RNA, 19 nt, Artificial Sequence
  Description of Artificial Sequence: Synthetic oligonucleotide
  Antisense strand to SEQ ID NO: 911198
uguauuggacguagaaggc

SEQ ID NO: 911200 - RNA, 19 nt, Artificial Sequence
  Description of Artificial Sequence: Synthetic oligonucleotide
  Sense strand starting at position 2595 of SEQ ID NO: 588640
gccgucuuccaguuccgaa

SEQ ID NO: 911201 - RNA, 19 nt, Artificial Sequence
  Description of Artificial Sequence: Synthetic oligonucleotide
  Antisense strand to SEQ ID NO: 911200
uucggaacuggaagacggc

SEQ ID NO: 911202 - RNA, 19 nt, Artificial Sequence
  Description of Artificial Sequence: Synthetic oligonucleotide
  Sense strand starting at position 2607 of SEQ ID NO: 588640
uuccgaauguccgcaaaca

SEQ ID NO: 911203 - RNA, 19 nt, Artificial Sequence
  Description of Artificial Sequence: Synthetic oligonucleotide
  Antisense strand to SEQ ID NO: 911202
uguuugcggacauucggaa

SEQ ID NO: 911204 - RNA, 19 nt, Artificial Sequence
  Description of Artificial Sequence: Synthetic oligonucleotide
  Sense strand starting at position 2656 of SEQ ID NO: 588640
cuuugcuuggacuagucau

SEQ ID NO: 911205 - RNA, 19 nt, Artificial Sequence
  Description of Artificial Sequence: Synthetic oligonucleotide
  Antisense strand to SEQ ID NO: 911204
augacuaguccaagcaaag

SEQ ID NO: 911206 - RNA, 19 nt, Artificial Sequence
  Description of Artificial Sequence: Synthetic oligonucleotide
  Sense strand starting at position 2882 of SEQ ID NO: 588640
gaucgaaguccuggaaguc

SEQ ID NO: 911207 - RNA, 19 nt, Artificial Sequence
  Description of Artificial Sequence: Synthetic oligonucleotide
  Antisense strand to SEQ ID NO: 911206
gacuuccaggacuucgauc

SEQ ID NO: 911208 - RNA, 19 nt, Artificial Sequence
  Description of Artificial Sequence: Synthetic oligonucleotide
  Sense strand starting at position 2899 of SEQ ID NO: 588640
uccuucugaucuucguuua

SEQ ID NO: 911209 - RNA, 19 nt, Artificial Sequence
  Description of Artificial Sequence: Synthetic oligonucleotide
  Antisense strand to SEQ ID NO: 911208
uaaacgaagaucagaagga

SEQ ID NO: 911210 - RNA, 19 nt, Artificial Sequence
  Description of Artificial Sequence: Synthetic oligonucleotide
  Sense strand starting at position 2902 of SEQ ID NO: 588640
uucugaucuucguuuaucu

SEQ ID NO: 911211 - RNA, 19 nt, Artificial Sequence
  Description of Artificial Sequence: Synthetic oligonucleotide
  Antisense strand to SEQ ID NO: 911210
agauaaacgaagaucagaa

SEQ ID NO: 911212 - RNA, 19 nt, Artificial Sequence
  Description of Artificial Sequence: Synthetic oligonucleotide
  Sense strand starting at position 2904 of SEQ ID NO: 588640
cugaucuucguuuaucuca

SEQ ID NO: 911213 - RNA, 19 nt, Artificial Sequence
  Description of Artificial Sequence: Synthetic oligonucleotide
  Antisense strand to SEQ ID NO: 911212
ugagauaaacgaagaucag

SEQ ID NO: 911214 - RNA, 19 nt, Artificial Sequence
  Description of Artificial Sequence: Synthetic oligonucleotide
  Sense strand starting at position 2912 of SEQ ID NO: 588640
cguuuaucucaacaugauc

SEQ ID NO: 911215 - RNA, 19 nt, Artificial Sequence
  Description of Artificial Sequence: Synthetic oligonucleotide
  Antisense strand to SEQ ID NO: 911214
gaucauguugagauaaacg

SEQ ID NO: 911216 - RNA, 19 nt, Artificial Sequence
  Description of Artificial Sequence: Synthetic oligonucleotide
  Sense strand starting at position 2976 of SEQ ID NO: 588640
cugguauuggguggcauua

SEQ ID NO: 911217 - RNA, 19 nt, Artificial Sequence
  Description of Artificial Sequence: Synthetic oligonucleotide
  Antisense strand to SEQ ID NO: 911216
uaaugccacccaauaccag

SEQ ID NO: 911218 - RNA, 19 nt, Artificial Sequence
  Description of Artificial Sequence: Synthetic oligonucleotide
  Sense strand starting at position 3023 of SEQ ID NO: 588640
cucucugacacugguggaa

SEQ ID NO: 911219 - RNA, 19 nt, Artificial Sequence
  Description of Artificial Sequence: Synthetic oligonucleotide
  Antisense strand to SEQ ID NO: 911218
uuccaccagugucagagag

SEQ ID NO: 911220 - RNA, 19 nt, Artificial Sequence
  Description of Artificial Sequence: Synthetic oligonucleotide
  Sense strand starting at position 3089 of SEQ ID NO: 588640
gaugguacucaugggcauu

SEQ ID NO: 911221 - RNA, 19 nt, Artificial Sequence
  Description of Artificial Sequence: Synthetic oligonucleotide
  Antisense strand to SEQ ID NO: 911220
aaugcccaugaguaccauc

SEQ ID NO: 911222 - RNA, 19 nt, Artificial Sequence
  Description of Artificial Sequence: Synthetic oligonucleotide
  Sense strand starting at position 3218 of SEQ ID NO: 588640
ccggcucauccgcaggaau

SEQ ID NO: 911223 - RNA, 19 nt, Artificial Sequence
  Description of Artificial Sequence: Synthetic oligonucleotide
  Antisense strand to SEQ ID NO: 911222
auuccugcggaugagccgg

SEQ ID NO: 911224 - RNA, 19 nt, Artificial Sequence
  Description of Artificial Sequence: Synthetic oligonucleotide
  Sense strand starting at position 3388 of SEQ ID NO: 588640
ccaccaucgcccgaaagua

SEQ ID NO: 911225 - RNA, 19 nt, Artificial Sequence
  Description of Artificial Sequence: Synthetic oligonucleotide
  Antisense strand to SEQ ID NO: 911224
uacuuucgggcgauggugg

SEQ ID NO: 911226 - RNA, 19 nt, Artificial Sequence
  Description of Artificial Sequence: Synthetic oligonucleotide
  Sense strand starting at position 3509 of SEQ ID NO: 588640
ggaguaugugcgcuacuuc

SEQ ID NO: 911227 - RNA, 19 nt, Artificial Sequence
  Description of Artificial Sequence: Synthetic oligonucleotide
  Antisense strand to SEQ ID NO: 911226
gaaguagcgcacauacucc

SEQ ID NO: 911228 - RNA, 19 nt, Artificial Sequence
  Description of Artificial Sequence: Synthetic oligonucleotide
  Sense strand starting at position 3529 of SEQ ID NO: 588640
gcaucaagccuuuggguca

SEQ ID NO: 911229 - RNA, 19 nt, Artificial Sequence
  Description of Artificial Sequence: Synthetic oligonucleotide
  Antisense strand to SEQ ID NO: 911228
ugacccaaaggcuugaugc

SEQ ID NO: 911230 - RNA, 19 nt, Artificial Sequence
  Description of Artificial Sequence: Synthetic oligonucleotide
  Sense strand starting at position 3739 of SEQ ID NO: 588640
gugauacuguggccuccau

SEQ ID NO: 911231 - RNA, 19 nt, Artificial Sequence
  Description of Artificial Sequence: Synthetic oligonucleotide
  Antisense strand to SEQ ID NO: 911230
auggaggccacaguaucac

SEQ ID NO: 911232 - RNA, 19 nt, Artificial Sequence
  Description of Artificial Sequence: Synthetic oligonucleotide
  Sense strand starting at position 3824 of SEQ ID NO: 588640
aucuauauuugcgcagauc

SEQ ID NO: 911233 - RNA, 19 nt, Artificial Sequence
  Description of Artificial Sequence: Synthetic oligonucleotide
  Antisense strand to SEQ ID NO: 911232
gaucugcgcaaauauagau

SEQ ID NO: 911234 - RNA, 19 nt, Artificial Sequence
  Description of Artificial Sequence: Synthetic oligonucleotide
  Sense strand starting at position 3841 of SEQ ID NO: 588640
ucauuucuguagcucugau

SEQ ID NO: 911235 - RNA, 19 nt, Artificial Sequence
  Description of Artificial Sequence: Synthetic oligonucleotide
  Antisense strand to SEQ ID NO: 911234
aucagagcuacagaaauga

SEQ ID NO: 911236 - RNA, 19 nt, Artificial Sequence
  Description of Artificial Sequence: Synthetic oligonucleotide
  Sense strand starting at position 3856 of SEQ ID NO: 588640
ugaucuuaaucuuugacag

SEQ ID NO: 911237 - RNA, 19 nt, Artificial Sequence
  Description of Artificial Sequence: Synthetic oligonucleotide
  Antisense strand to SEQ ID NO: 911236
cugucaaagauuaagauca

SEQ ID NO: 911238 - RNA, 19 nt, Artificial Sequence
  Description of Artificial Sequence: Synthetic oligonucleotide
  Sense strand starting at position 6 of SEQ ID NO: 588657
ccagcugccucuguaaaca

SEQ ID NO: 911239 - RNA, 19 nt, Artificial Sequence
  Description of Artificial Sequence: Synthetic oligonucleotide
  Antisense strand to SEQ ID NO: 911238
uguuuacagaggcagcugg

SEQ ID NO: 911240 - RNA, 19 nt, Artificial Sequence
  Description of Artificial Sequence: Synthetic oligonucleotide
  Sense strand starting at position 66 of SEQ ID NO: 588657
ccuccuugucucuggagua

SEQ ID NO: 911241 - RNA, 19 nt, Artificial Sequence
  Description of Artificial Sequence: Synthetic oligonucleotide
  Antisense strand to SEQ ID NO: 911240
uacuccagagacaaggagg

SEQ ID NO: 911242 - RNA, 19 nt, Artificial Sequence
  Description of Artificial Sequence: Synthetic oligonucleotide
  Sense strand starting at position 82 of SEQ ID NO: 588657
guacaugagcagcguugua

SEQ ID NO: 911243 - RNA, 19 nt, Artificial Sequence
  Description of Artificial Sequence: Synthetic oligonucleotide
  Antisense strand to SEQ ID NO: 911242
uacaacgcugcucauguac

SEQ ID NO: 911244 - RNA, 19 nt, Artificial Sequence
  Description of Artificial Sequence: Synthetic oligonucleotide
  Sense strand starting at position 123 of SEQ ID NO: 588657
gcugaaucaggcugagagu

SEQ ID NO: 911245 - RNA, 19 nt, Artificial Sequence
  Description of Artificial Sequence: Synthetic oligonucleotide
  Antisense strand to SEQ ID NO: 911244
acucucagccugauucagc

SEQ ID NO: 911246 - RNA, 19 nt, Artificial Sequence
  Description of Artificial Sequence: Synthetic oligonucleotide
  Sense strand starting at position 124 of SEQ ID NO: 588657
cugaaucaggcugagaguu

SEQ ID NO: 911247 - RNA, 19 nt, Artificial Sequence
  Description of Artificial Sequence: Synthetic oligonucleotide
  Antisense strand to SEQ ID NO: 911246
aacucucagccugauucag

SEQ ID NO: 911248 - RNA, 19 nt, Artificial Sequence
  Description of Artificial Sequence: Synthetic oligonucleotide
  Sense strand starting at position 213 of SEQ ID NO: 588657
gcaggacacucacauucua

SEQ ID NO: 911249 - RNA, 19 nt, Artificial Sequence
  Description of Artificial Sequence: Synthetic oligonucleotide
  Antisense strand to SEQ ID NO: 911248
uagaaugugaguguccugc

SEQ ID NO: 911250 - RNA, 19 nt, Artificial Sequence
  Description of Artificial Sequence: Synthetic oligonucleotide
  Sense strand starting at position 732 of SEQ ID NO: 588657
gggagucauuuccagaaca

SEQ ID NO: 911251 - RNA, 19 nt, Artificial Sequence
  Description of Artificial Sequence: Synthetic oligonucleotide
  Antisense strand to SEQ ID NO: 911250
uguucuggaaaugacuccc

SEQ ID NO: 911252 - RNA, 19 nt, Artificial Sequence
  Description of Artificial Sequence: Synthetic oligonucleotide
  Sense strand starting at position 757 of SEQ ID NO: 588657
gugcucuggugcuaaguau

SEQ ID NO: 911253 - RNA, 19 nt, Artificial Sequence
  Description of Artificial Sequence: Synthetic oligonucleotide
  Antisense strand to SEQ ID NO: 911252
auacuuagcaccagagcac

SEQ ID NO: 911254 - RNA, 19 nt, Artificial Sequence
  Description of Artificial Sequence: Synthetic oligonucleotide
  Sense strand starting at position 1138 of SEQ ID NO: 588657
ggaagugggucccaugauu

SEQ ID NO: 911255 - RNA, 19 nt, Artificial Sequence
  Description of Artificial Sequence: Synthetic oligonucleotide
  Antisense strand to SEQ ID NO: 911254
aaucaugggacccacuucc

SEQ ID NO: 911256 - RNA, 19 nt, Artificial Sequence
  Description of Artificial Sequence: Synthetic oligonucleotide
  Sense strand starting at position 1147 of SEQ ID NO: 588657
ucccaugauucucccugua

SEQ ID NO: 911257 - RNA, 19 nt, Artificial Sequence
  Description of Artificial Sequence: Synthetic oligonucleotide
  Antisense strand to SEQ ID NO: 911256
uacagggagaaucauggga

SEQ ID NO: 911258 - RNA, 19 nt, Artificial Sequence
  Description of Artificial Sequence: Synthetic oligonucleotide
  Sense strand starting at position 1149 of SEQ ID NO: 588657
ccaugauucucccuguauc

SEQ ID NO: 911259 - RNA, 19 nt, Artificial Sequence
  Description of Artificial Sequence: Synthetic oligonucleotide
  Antisense strand to SEQ ID NO: 911258
gauacagggagaaucaugg

SEQ ID NO: 911260 - RNA, 19 nt, Artificial Sequence
  Description of Artificial Sequence: Synthetic oligonucleotide
  Sense strand starting at position 1162 of SEQ ID NO: 588657
uguaucuacaggugaauag

SEQ ID NO: 911261 - RNA, 19 nt, Artificial Sequence
  Description of Artificial Sequence: Synthetic oligonucleotide
  Antisense strand to SEQ ID NO: 911260
cuauucaccuguagauaca

SEQ ID NO: 911262 - RNA, 19 nt, Artificial Sequence
  Description of Artificial Sequence: Synthetic oligonucleotide
  Sense strand starting at position 1375 of SEQ ID NO: 588657
gcguucaucggguagagaa

SEQ ID NO: 911263 - RNA, 19 nt, Artificial Sequence
  Description of Artificial Sequence: Synthetic oligonucleotide
  Antisense strand to SEQ ID NO: 911262
uucucuacccgaugaacgc

SEQ ID NO: 911264 - RNA, 19 nt, Artificial Sequence
  Description of Artificial Sequence: Synthetic oligonucleotide
  Sense strand starting at position 1447 of SEQ ID NO: 588657
ccugggagucguuggguaa

SEQ ID NO: 911265 - RNA, 19 nt, Artificial Sequence
  Description of Artificial Sequence: Synthetic oligonucleotide
  Antisense strand to SEQ ID NO: 911264
uuacccaacgacucccagg

SEQ ID NO: 911266 - RNA, 19 nt, Artificial Sequence
  Description of Artificial Sequence: Synthetic oligonucleotide
  Sense strand starting at position 1448 of SEQ ID NO: 588657
cugggagucguuggguaac

SEQ ID NO: 911267 - RNA, 19 nt, Artificial Sequence
  Description of Artificial Sequence: Synthetic oligonucleotide
  Antisense strand to SEQ ID NO: 911266
guuacccaacgacucccag

SEQ ID NO: 911268 - RNA, 19 nt, Artificial Sequence
  Description of Artificial Sequence: Synthetic oligonucleotide
  Sense strand starting at position 1449 of SEQ ID NO: 588657
ugggagucguuggguaaca

SEQ ID NO: 911269 - RNA, 19 nt, Artificial Sequence
  Description of Artificial Sequence: Synthetic oligonucleotide
  Antisense strand to SEQ ID NO: 911268
uguuacccaacgacuccca

SEQ ID NO: 911270 - RNA, 19 nt, Artificial Sequence
  Description of Artificial Sequence: Synthetic oligonucleotide
  Sense strand starting at position 1451 of SEQ ID NO: 588657
ggagucguuggguaacagu

SEQ ID NO: 911271 - RNA, 19 nt, Artificial Sequence
  Description of Artificial Sequence: Synthetic oligonucleotide
  Antisense strand to SEQ ID NO: 911270
acuguuacccaacgacucc

SEQ ID NO: 911272 - RNA, 19 nt, Artificial Sequence
  Description of Artificial Sequence: Synthetic oligonucleotide
  Sense strand starting at position 1647 of SEQ ID NO: 588657
cggcuucagugcugagaag

SEQ ID NO: 911273 - RNA, 19 nt, Artificial Sequence
  Description of Artificial Sequence: Synthetic oligonucleotide
  Antisense strand to SEQ ID NO: 911272
cuucucagcacugaagccg

SEQ ID NO: 911274 - RNA, 19 nt, Artificial Sequence
  Description of Artificial Sequence: Synthetic oligonucleotide
  Sense strand starting at position 1648 of SEQ ID NO: 588657
ggcuucagugcugagaagu

SEQ ID NO: 911275 - RNA, 19 nt, Artificial Sequence
  Description of Artificial Sequence: Synthetic oligonucleotide
  Antisense strand to SEQ ID NO: 911274
acuucucagcacugaagcc

SEQ ID NO: 911276 - RNA, 19 nt, Artificial Sequence
  Description of Artificial Sequence: Synthetic oligonucleotide
  Sense strand starting at position 2229 of SEQ ID NO: 588657
cugugagucgugggaccuu

SEQ ID NO: 911277 - RNA, 19 nt, Artificial Sequence
  Description of Artificial Sequence: Synthetic oligonucleotide
  Antisense strand to SEQ ID NO: 911276
aaggucccacgacucacag

SEQ ID NO: 911278 - RNA, 19 nt, Artificial Sequence
  Description of Artificial Sequence: Synthetic oligonucleotide
  Sense strand starting at position 2314 of SEQ ID NO: 588657
uuuggaguguuuguaaagu

SEQ ID NO: 911279 - RNA, 19 nt, Artificial Sequence
  Description of Artificial Sequence: Synthetic oligonucleotide
  Antisense strand to SEQ ID NO: 911278
acuuuacaaacacuccaaa

SEQ ID NO: 911280 - RNA, 19 nt, Artificial Sequence
  Description of Artificial Sequence: Synthetic oligonucleotide
  Sense strand starting at position 2320 of SEQ ID NO: 588657
guguuuguaaaguucgcau

SEQ ID NO: 911281 - RNA, 19 nt, Artificial Sequence
  Description of Artificial Sequence: Synthetic oligonucleotide
  Antisense strand to SEQ ID NO: 911280
augcgaacuuuacaaacac

SEQ ID NO: 911282 - RNA, 19 nt, Artificial Sequence
  Description of Artificial Sequence: Synthetic oligonucleotide
  Sense strand starting at position 2322 of SEQ ID NO: 588657
guuuguaaaguucgcauga

SEQ ID NO: 911283 - RNA, 19 nt, Artificial Sequence
  Description of Artificial Sequence: Synthetic oligonucleotide
  Antisense strand to SEQ ID NO: 911282
ucaugcgaacuuuacaaac

SEQ ID NO: 911284 - RNA, 19 nt, Artificial Sequence
  Description of Artificial Sequence: Synthetic oligonucleotide
  Sense strand starting at position 2324 of SEQ ID NO: 588657
uuguaaaguucgcaugaga

SEQ ID NO: 911285 - RNA, 19 nt, Artificial Sequence
  Description of Artificial Sequence: Synthetic oligonucleotide
  Antisense strand to SEQ ID NO: 911284
ucucaugcgaacuuuacaa

SEQ ID NO: 911286 - RNA, 19 nt, Artificial Sequence
  Description of Artificial Sequence: Synthetic oligonucleotide
  Sense strand starting at position 2343 of SEQ ID NO: 588657
gacggauguucccagggca

SEQ ID NO: 911287 - RNA, 19 nt, Artificial Sequence
  Description of Artificial Sequence: Synthetic oligonucleotide
  Antisense strand to SEQ ID NO: 911286
ugcccugggaacauccguc

SEQ ID NO: 911288 - RNA, 19 nt, Artificial Sequence
  Description of Artificial Sequence: Synthetic oligonucleotide
  Sense strand starting at position 2864 of SEQ ID NO: 588657
ggagugcuguguugcgaau

SEQ ID NO: 911289 - RNA, 19 nt, Artificial Sequence
  Description of Artificial Sequence: Synthetic oligonucleotide
  Antisense strand to SEQ ID NO: 911288
auucgcaacacagcacucc

SEQ ID NO: 911290 - RNA, 19 nt, Artificial Sequence
  Description of Artificial Sequence: Synthetic oligonucleotide
  Sense strand starting at position 2865 of SEQ ID NO: 588657
gagugcuguguugcgaaua

SEQ ID NO: 911291 - RNA, 19 nt, Artificial Sequence
  Description of Artificial Sequence: Synthetic oligonucleotide
  Antisense strand to SEQ ID NO: 911290
uauucgcaacacagcacuc

SEQ ID NO: 911292 - RNA, 19 nt, Artificial Sequence
  Description of Artificial Sequence: Synthetic oligonucleotide
  Sense strand starting at position 2877 of SEQ ID NO: 588657
gcgaauacagcucacugua

SEQ ID NO: 911293 - RNA, 19 nt, Artificial Sequence
  Description of Artificial Sequence: Synthetic oligonucleotide
  Antisense strand to SEQ ID NO: 911292
uacagugagcuguauucgc

SEQ ID NO: 911294 - RNA, 19 nt, Artificial Sequence
  Description of Artificial Sequence: Synthetic oligonucleotide
  Sense strand starting at position 2887 of SEQ ID NO: 588657
cucacuguaucgucaacuu

SEQ ID NO: 911295 - RNA, 19 nt, Artificial Sequence
  Description of Artificial Sequence: Synthetic oligonucleotide
  Antisense strand to SEQ ID NO: 911294
aaguugacgauacagugag

SEQ ID NO: 911296 - RNA, 19 nt, Artificial Sequence
  Description of Artificial Sequence: Synthetic oligonucleotide
  Sense strand starting at position 3127 of SEQ ID NO: 588657
uuuauugcucaaugggacu

SEQ ID NO: 911297 - RNA, 19 nt, Artificial Sequence
  Description of Artificial Sequence: Synthetic oligonucleotide
  Antisense strand to SEQ ID NO: 911296
agucccauugagcaauaaa

SEQ ID NO: 911298 - RNA, 19 nt, Artificial Sequence
  Description of Artificial Sequence: Synthetic oligonucleotide
  Sense strand starting at position 3133 of SEQ ID NO: 588657
gcucaaugggacugucuuu

SEQ ID NO: 911299 - RNA, 19 nt, Artificial Sequence
  Description of Artificial Sequence: Synthetic oligonucleotide
  Antisense strand to SEQ ID NO: 911298
aaagacagucccauugagc

SEQ ID NO: 911300 - RNA, 19 nt, Artificial Sequence
  Description of Artificial Sequence: Synthetic oligonucleotide
  Sense strand starting at position 3161 of SEQ ID NO: 588657
guguuuguuuccuuguguu

SEQ ID NO: 911301 - RNA, 19 nt, Artificial Sequence
  Description of Artificial Sequence: Synthetic oligonucleotide
  Antisense strand to SEQ ID NO: 911300
aacacaaggaaacaaacac

SEQ ID NO: 911302 - RNA, 19 nt, Artificial Sequence
  Description of Artificial Sequence: Synthetic oligonucleotide
  Sense strand starting at position 3164 of SEQ ID NO: 588657
uuuguuuccuuguguugga

SEQ ID NO: 911303 - RNA, 19 nt, Artificial Sequence
  Description of Artificial Sequence: Synthetic oligonucleotide
  Antisense strand to SEQ ID NO: 911302
uccaacacaaggaaacaaa

SEQ ID NO: 911304 - RNA, 19 nt, Artificial Sequence
  Description of Artificial Sequence: Synthetic oligonucleotide
  Sense strand starting at position 3224 of SEQ ID NO: 588657
cauugaacucagugguucu

SEQ ID NO: 911305 - RNA, 19 nt, Artificial Sequence
  Description of Artificial Sequence: Synthetic oligonucleotide
  Antisense strand to SEQ ID NO: 911304
agaaccacugaguucaaug

SEQ ID NO: 911306 - RNA, 19 nt, Artificial Sequence
  Description of Artificial Sequence: Synthetic oligonucleotide
  Sense strand starting at position 3227 of SEQ ID NO: 588657
ugaacucagugguucucaa

SEQ ID NO: 911307 - RNA, 19 nt, Artificial Sequence
  Description of Artificial Sequence: Synthetic oligonucleotide
  Antisense strand to SEQ ID NO: 911306
uugagaaccacugaguuca

SEQ ID NO: 911308 - RNA, 19 nt, Artificial Sequence
  Description of Artificial Sequence: Synthetic oligonucleotide
  Sense strand starting at position 3268 of SEQ ID NO: 588657
uccgcaucaucggauaacu

SEQ ID NO: 911309 - RNA, 19 nt, Artificial Sequence
  Description of Artificial Sequence: Synthetic oligonucleotide
  Antisense strand to SEQ ID NO: 911308
aguuauccgaugaugcgga

SEQ ID NO: 911310 - RNA, 19 nt, Artificial Sequence
  Description of Artificial Sequence: Synthetic oligonucleotide
  Sense strand starting at position 3671 of SEQ ID NO: 588657
gcgagaccuucucaaagaa

SEQ ID NO: 911311 - RNA, 19 nt, Artificial Sequence
  Description of Artificial Sequence: Synthetic oligonucleotide
  Antisense strand to SEQ ID NO: 911310
uucuuugagaaggucucgc

SEQ ID NO: 911312 - RNA, 19 nt, Artificial Sequence
  Description of Artificial Sequence: Synthetic oligonucleotide
  Sense strand starting at position 3805 of SEQ ID NO: 588657
gggcuuaggguuugagaac

SEQ ID NO: 911313 - RNA, 19 nt, Artificial Sequence
  Description of Artificial Sequence: Synthetic oligonucleotide
  Antisense strand to SEQ ID NO: 911312
guucucaaacccuaagccc

SEQ ID NO: 911314 - RNA, 19 nt, Artificial Sequence
  Description of Artificial Sequence: Synthetic oligonucleotide
  Sense strand starting at position 3868 of SEQ ID NO: 588657
auuaaagaacccugugcaa

SEQ ID NO: 911315 - RNA, 19 nt, Artificial Sequence
  Description of Artificial Sequence: Synthetic oligonucleotide
  Antisense strand to SEQ ID NO: 911314
uugcacaggguucuuuaau

SEQ ID NO: 911316 - RNA, 19 nt, Artificial Sequence
  Description of Artificial Sequence: Synthetic oligonucleotide
  Sense strand starting at position 3888 of SEQ ID NO: 588657
gcacacacugaguacaaau

SEQ ID NO: 911317 - RNA, 19 nt, Artificial Sequence
  Description of Artificial Sequence: Synthetic oligonucleotide
  Antisense strand to SEQ ID NO: 911316
auuuguacucagugugugc

SEQ ID NO: 911318 - RNA, 19 nt, Artificial Sequence
  Description of Artificial Sequence: Synthetic oligonucleotide
  Sense strand starting at position 18 of SEQ ID NO: 588690
aagugaguauuugugugua

SEQ ID NO: 911319 - RNA, 19 nt, Artificial Sequence
  Description of Artificial Sequence: Synthetic oligonucleotide
  Antisense strand to SEQ ID NO: 911318
uacacacaaauacucacuu

SEQ ID NO: 911320 - RNA, 19 nt, Artificial Sequence
  Description of Artificial Sequence: Synthetic oligonucleotide
  Sense strand starting at position 20 of SEQ ID NO: 588690
gugaguauuuguguguauu

SEQ ID NO: 911321 - RNA, 19 nt, Artificial Sequence
  Description of Artificial Sequence: Synthetic oligonucleotide
  Antisense strand to SEQ ID NO: 911320
aauacacacaaauacucac

SEQ ID NO: 911322 - RNA, 19 nt, Artificial Sequence
  Description of Artificial Sequence: Synthetic oligonucleotide
  Sense strand starting at position 21 of SEQ ID NO: 588690
ugaguauuuguguguauuc

SEQ ID NO: 911323 - RNA, 19 nt, Artificial Sequence
  Description of Artificial Sequence: Synthetic oligonucleotide
  Antisense strand to SEQ ID NO: 911322
gaauacacacaaauacuca

SEQ ID NO: 911324 - RNA, 19 nt, Artificial Sequence
  Description of Artificial Sequence: Synthetic oligonucleotide
  Sense strand starting at position 22 of SEQ ID NO: 588690
gaguauuuguguguauucu

SEQ ID NO: 911325 - RNA, 19 nt, Artificial Sequence
  Description of Artificial Sequence: Synthetic oligonucleotide
  Antisense strand to SEQ ID NO: 911324
agaauacacacaaauacuc

SEQ ID NO: 911326 - RNA, 19 nt, Artificial Sequence
  Description of Artificial Sequence: Synthetic oligonucleotide
  Sense strand starting at position 23 of SEQ ID NO: 588690
aguauuuguguguauucuu

SEQ ID NO: 911327 - RNA, 19 nt, Artificial Sequence
  Description of Artificial Sequence: Synthetic oligonucleotide
  Antisense strand to SEQ ID NO: 911326
aagaauacacacaaauacu

SEQ ID NO: 911328 - RNA, 19 nt, Artificial Sequence
  Description of Artificial Sequence: Synthetic oligonucleotide
  Sense strand starting at position 36 of SEQ ID NO: 588690
auucuuauaugcucaagag

SEQ ID NO: 911329 - RNA, 19 nt, Artificial Sequence
  Description of Artificial Sequence: Synthetic oligonucleotide
  Antisense strand to SEQ ID NO: 911328
cucuugagcauauaagaau

SEQ ID NO: 911330 - RNA, 19 nt, Artificial Sequence
  Description of Artificial Sequence: Synthetic oligonucleotide
  Sense strand starting at position 37 of SEQ ID NO: 588690
uucuuauaugcucaagaga

SEQ ID NO: 911331 - RNA, 19 nt, Artificial Sequence
  Description of Artificial Sequence: Synthetic oligonucleotide
  Antisense strand to SEQ ID NO: 911330
ucucuugagcauauaagaa

SEQ ID NO: 911332 - RNA, 19 nt, Artificial Sequence
  Description of Artificial Sequence: Synthetic oligonucleotide
  Sense strand starting at position 71 of SEQ ID NO: 588690
ccuagaucuuucuuggaaa

SEQ ID NO: 911333 - RNA, 19 nt, Artificial Sequence
  Description of Artificial Sequence: Synthetic oligonucleotide
  Antisense strand to SEQ ID NO: 911332
uuuccaagaaagaucuagg

SEQ ID NO: 911334 - RNA, 19 nt, Artificial Sequence
  Description of Artificial Sequence: Synthetic oligonucleotide
  Sense strand starting at position 303 of SEQ ID NO: 588690
guuaaagcagccuauuauc

SEQ ID NO: 911335 - RNA, 19 nt, Artificial Sequence
  Description of Artificial Sequence: Synthetic oligonucleotide
  Antisense strand to SEQ ID NO: 911334
gauaauaggcugcuuuaac

SEQ ID NO: 911336 - RNA, 19 nt, Artificial Sequence
  Description of Artificial Sequence: Synthetic oligonucleotide
  Sense strand starting at position 612 of SEQ ID NO: 588690
ucagauuugaggcguuuga

SEQ ID NO: 911337 - RNA, 19 nt, Artificial Sequence
  Description of Artificial Sequence: Synthetic oligonucleotide
  Antisense strand to SEQ ID NO: 911336
ucaaacgccucaaaucuga

SEQ ID NO: 911338 - RNA, 19 nt, Artificial Sequence
  Description of Artificial Sequence: Synthetic oligonucleotide
  Sense strand starting at position 789 of SEQ ID NO: 588690
uuauauguguuuccagaga

SEQ ID NO: 911339 - RNA, 19 nt, Artificial Sequence
  Description of Artificial Sequence: Synthetic oligonucleotide
  Antisense strand to SEQ ID NO: 911338
ucucuggaaacacauauaa

SEQ ID NO: 911340 - RNA, 19 nt, Artificial Sequence
  Description of Artificial Sequence: Synthetic oligonucleotide
  Sense strand starting at position 840 of SEQ ID NO: 588690
guggaagaaugucuggaga

SEQ ID NO: 911341 - RNA, 19 nt, Artificial Sequence
  Description of Artificial Sequence: Synthetic oligonucleotide
  Antisense strand to SEQ ID NO: 911340
ucuccagacauucuuccac

SEQ ID NO: 911342 - RNA, 19 nt, Artificial Sequence
  Description of Artificial Sequence: Synthetic oligonucleotide
  Sense strand starting at position 930 of SEQ ID NO: 588690
ucccucauccucgaaggaa

SEQ ID NO: 911343 - RNA, 19 nt, Artificial Sequence
  Description of Artificial Sequence: Synthetic oligonucleotide
  Antisense strand to SEQ ID NO: 911342
uuccuucgaggaugaggga

SEQ ID NO: 911344 - RNA, 19 nt, Artificial Sequence
  Description of Artificial Sequence: Synthetic oligonucleotide
  Sense strand starting at position 933 of SEQ ID NO: 588690
cucauccucgaaggaaaua

SEQ ID NO: 911345 - RNA, 19 nt, Artificial Sequence
  Description of Artificial Sequence: Synthetic oligonucleotide
  Antisense strand to SEQ ID NO: 911344
uauuuccuucgaggaugag

SEQ ID NO: 911346 - RNA, 19 nt, Artificial Sequence
  Description of Artificial Sequence: Synthetic oligonucleotide
  Sense strand starting at position 984 of SEQ ID NO: 588690
accacaucuguggaucauu

SEQ ID NO: 911347 - RNA, 19 nt, Artificial Sequence
  Description of Artificial Sequence: Synthetic oligonucleotide
  Antisense strand to SEQ ID NO: 911346
aaugauccacagauguggu

SEQ ID NO: 911348 - RNA, 19 nt, Artificial Sequence
  Description of Artificial Sequence: Synthetic oligonucleotide
  Sense strand starting at position 989 of SEQ ID NO: 588690
aucuguggaucauuggcaa

SEQ ID NO: 911349 - RNA, 19 nt, Artificial Sequence
  Description of Artificial Sequence: Synthetic oligonucleotide
  Antisense strand to SEQ ID NO: 911348
uugccaaugauccacagau

SEQ ID NO: 911350 - RNA, 19 nt, Artificial Sequence
  Description of Artificial Sequence: Synthetic oligonucleotide
  Sense strand starting at position 1013 of SEQ ID NO: 588690
uguuaagauugcucaaauc

SEQ ID NO: 911351 - RNA, 19 nt, Artificial Sequence
  Description of Artificial Sequence: Synthetic oligonucleotide
  Antisense strand to SEQ ID NO: 911350
gauuugagcaaucuuaaca

SEQ ID NO: 911352 - RNA, 19 nt, Artificial Sequence
  Description of Artificial Sequence: Synthetic oligonucleotide
  Sense strand starting at position 1034 of SEQ ID NO: 588690
ggcagucucagagaguucu

SEQ ID NO: 911353 - RNA, 19 nt, Artificial Sequence
  Description of Artificial Sequence: Synthetic oligonucleotide
  Antisense strand to SEQ ID NO: 911352
agaacucucugagacugcc

SEQ ID NO: 911354 - RNA, 19 nt, Artificial Sequence
  Description of Artificial Sequence: Synthetic oligonucleotide
  Sense strand starting at position 1121 of SEQ ID NO: 588690
acuccuuuguaggcugaaa

SEQ ID NO: 911355 - RNA, 19 nt, Artificial Sequence
  Description of Artificial Sequence: Synthetic oligonucleotide
  Antisense strand to SEQ ID NO: 911354
uuucagccuacaaaggagu

SEQ ID NO: 911356 - RNA, 19 nt, Artificial Sequence
  Description of Artificial Sequence: Synthetic oligonucleotide
  Sense strand starting at position 1171 of SEQ ID NO: 588690
ggaggcucucauggaauau

SEQ ID NO: 911357 - RNA, 19 nt, Artificial Sequence
  Description of Artificial Sequence: Synthetic oligonucleotide
  Antisense strand to SEQ ID NO: 911356
auauuccaugagagccucc

SEQ ID NO: 911358 - RNA, 19 nt, Artificial Sequence
  Description of Artificial Sequence: Synthetic oligonucleotide
  Sense strand starting at position 1175 of SEQ ID NO: 588690
gcucucauggaauauuaua

SEQ ID NO: 911359 - RNA, 19 nt, Artificial Sequence
  Description of Artificial Sequence: Synthetic oligonucleotide
  Antisense strand to SEQ ID NO: 911358
uauaauauuccaugagagc

SEQ ID NO: 911360 - RNA, 19 nt, Artificial Sequence
  Description of Artificial Sequence: Synthetic oligonucleotide
  Sense strand starting at position 1195 of SEQ ID NO: 588690
ccaggacccaguuguauga

SEQ ID NO: 911361 - RNA, 19 nt, Artificial Sequence
  Description of Artificial Sequence: Synthetic oligonucleotide
  Antisense strand to SEQ ID NO: 911360
ucauacaacuggguccugg

SEQ ID NO: 911362 - RNA, 19 nt, Artificial Sequence
  Description of Artificial Sequence: Synthetic oligonucleotide
  Sense strand starting at position 1242 of SEQ ID NO: 588690
gugccagugcccuugucaa

SEQ ID NO: 911363 - RNA, 19 nt, Artificial Sequence
  Description of Artificial Sequence: Synthetic oligonucleotide
  Antisense strand to SEQ ID NO: 911362
uugacaagggcacuggcac

SEQ ID NO: 911364 - RNA, 19 nt, Artificial Sequence
  Description of Artificial Sequence: Synthetic oligonucleotide
  Sense strand starting at position 1445 of SEQ ID NO: 588690
ugagcauucggucauaaua

SEQ ID NO: 911365 - RNA, 19 nt, Artificial Sequence
  Description of Artificial Sequence: Synthetic oligonucleotide
  Antisense strand to SEQ ID NO: 911364
uauuaugaccgaaugcuca

SEQ ID NO: 911366 - RNA, 19 nt, Artificial Sequence
  Description of Artificial Sequence: Synthetic oligonucleotide
  Sense strand starting at position 1455 of SEQ ID NO: 588690
gucauaauauuccuggagu

SEQ ID NO: 911367 - RNA, 19 nt, Artificial Sequence
  Description of Artificial Sequence: Synthetic oligonucleotide
  Antisense strand to SEQ ID NO: 911366
acuccaggaauauuaugac

SEQ ID NO: 911368 - RNA, 19 nt, Artificial Sequence
  Description of Artificial Sequence: Synthetic oligonucleotide
  Sense strand starting at position 1458 of SEQ ID NO: 588690
auaauauuccuggagucgu

SEQ ID NO: 911369 - RNA, 19 nt, Artificial Sequence
  Description of Artificial Sequence: Synthetic oligonucleotide
  Antisense strand to SEQ ID NO: 911368
acgacuccaggaauauuau

SEQ ID NO: 911370 - RNA, 19 nt, Artificial Sequence
  Description of Artificial Sequence: Synthetic oligonucleotide
  Sense strand starting at position 1586 of SEQ ID NO: 588690
ggucuccaucuauagacau

SEQ ID NO: 911371 - RNA, 19 nt, Artificial Sequence
  Description of Artificial Sequence: Synthetic oligonucleotide
  Antisense strand to SEQ ID NO: 911370
augucuauagauggagacc

SEQ ID NO: 911372 - RNA, 19 nt, Artificial Sequence
  Description of Artificial Sequence: Synthetic oligonucleotide
  Sense strand starting at position 2553 of SEQ ID NO: 588690
ggcccacaugcuuaagaug

SEQ ID NO: 911373 - RNA, 19 nt, Artificial Sequence
  Description of Artificial Sequence: Synthetic oligonucleotide
  Antisense strand to SEQ ID NO: 911372
caucuuaagcaugugggcc

SEQ ID NO: 911374 - RNA, 19 nt, Artificial Sequence
  Description of Artificial Sequence: Synthetic oligonucleotide
  Sense strand starting at position 2603 of SEQ ID NO: 588690
uaggguauaucuccagaga

SEQ ID NO: 911375 - RNA, 19 nt, Artificial Sequence
  Description of Artificial Sequence: Synthetic oligonucleotide
  Antisense strand to SEQ ID NO: 911374
ucucuggagauauacccua

SEQ ID NO: 911376 - RNA, 19 nt, Artificial Sequence
  Description of Artificial Sequence: Synthetic oligonucleotide
  Sense strand starting at position 2606 of SEQ ID NO: 588690
gguauaucuccagagaggc

SEQ ID NO: 911377 - RNA, 19 nt, Artificial Sequence
  Description of Artificial Sequence: Synthetic oligonucleotide
  Antisense strand to SEQ ID NO: 911376
gccucucuggagauauacc

SEQ ID NO: 911378 - RNA, 19 nt, Artificial Sequence
  Description of Artificial Sequence: Synthetic oligonucleotide
  Sense strand starting at position 2777 of SEQ ID NO: 588690
ggaucacauaggugucauu

SEQ ID NO: 911379 - RNA, 19 nt, Artificial Sequence
  Description of Artificial Sequence: Synthetic oligonucleotide
  Antisense strand to SEQ ID NO: 911378
aaugacaccuaugugaucc

SEQ ID NO: 911380 - RNA, 19 nt, Artificial Sequence
  Description of Artificial Sequence: Synthetic oligonucleotide
  Sense strand starting at position 2787 of SEQ ID NO: 588690
ggugucauuagagacgaau

SEQ ID NO: 911381 - RNA, 19 nt, Artificial Sequence
  Description of Artificial Sequence: Synthetic oligonucleotide
  Antisense strand to SEQ ID NO: 911380
auucgucucuaaugacacc

SEQ ID NO: 911382 - RNA, 19 nt, Artificial Sequence
  Description of Artificial Sequence: Synthetic oligonucleotide
  Sense strand starting at position 2789 of SEQ ID NO: 588690
ugucauuagagacgaauga

SEQ ID NO: 911383 - RNA, 19 nt, Artificial Sequence
  Description of Artificial Sequence: Synthetic oligonucleotide
  Antisense strand to SEQ ID NO: 911382
ucauucgucucuaaugaca

SEQ ID NO: 911384 - RNA, 19 nt, Artificial Sequence
  Description of Artificial Sequence: Synthetic oligonucleotide
  Sense strand starting at position 2856 of SEQ ID NO: 588690
cuuauuauccugugacauu

SEQ ID NO: 911385 - RNA, 19 nt, Artificial Sequence
  Description of Artificial Sequence: Synthetic oligonucleotide
  Antisense strand to SEQ ID NO: 911384
aaugucacaggauaauaag

SEQ ID NO: 911386 - RNA, 19 nt, Artificial Sequence
  Description of Artificial Sequence: Synthetic oligonucleotide
  Sense strand starting at position 3020 of SEQ ID NO: 588690
ggauguaagaaguggauca

SEQ ID NO: 911387 - RNA, 19 nt, Artificial Sequence
  Description of Artificial Sequence: Synthetic oligonucleotide
  Antisense strand to SEQ ID NO: 911386
ugauccacuucuuacaucc

SEQ ID NO: 911388 - RNA, 19 nt, Artificial Sequence
  Description of Artificial Sequence: Synthetic oligonucleotide
  Sense strand starting at position 3181 of SEQ ID NO: 588690
ucuuuagagccauaggauu

SEQ ID NO: 911389 - RNA, 19 nt, Artificial Sequence
  Description of Artificial Sequence: Synthetic oligonucleotide
  Antisense strand to SEQ ID NO: 911388
aauccuauggcucuaaaga

SEQ ID NO: 911390 - RNA, 19 nt, Artificial Sequence
  Description of Artificial Sequence: Synthetic oligonucleotide
  Sense strand starting at position 3721 of SEQ ID NO: 588690
uggagcugauuguuuaaua

SEQ ID NO: 911391 - RNA, 19 nt, Artificial Sequence
  Description of Artificial Sequence: Synthetic oligonucleotide
  Antisense strand to SEQ ID NO: 911390
uauuaaacaaucagcucca

SEQ ID NO: 911392 - RNA, 19 nt, Artificial Sequence
  Description of Artificial Sequence: Synthetic oligonucleotide
  Sense strand starting at position 3722 of SEQ ID NO: 588690
ggagcugauuguuuaauaa

SEQ ID NO: 911393 - RNA, 19 nt, Artificial Sequence
  Description of Artificial Sequence: Synthetic oligonucleotide
  Antisense strand to SEQ ID NO: 911392
uuauuaaacaaucagcucc

SEQ ID NO: 911394 - RNA, 19 nt, Artificial Sequence
  Description of Artificial Sequence: Synthetic oligonucleotide
  Sense strand starting at position 3745 of SEQ ID NO: 588690
aagccagugccagauucua

SEQ ID NO: 911395 - RNA, 19 nt, Artificial Sequence
  Description of Artificial Sequence: Synthetic oligonucleotide
  Antisense strand to SEQ ID NO: 911394
uagaaucuggcacuggcuu

SEQ ID NO: 911396 - RNA, 19 nt, Artificial Sequence
  Description of Artificial Sequence: Synthetic oligonucleotide
  Sense strand starting at position 3916 of SEQ ID NO: 588690
ucagcagagugauuguaga

SEQ ID NO: 911397 - RNA, 19 nt, Artificial Sequence
  Description of Artificial Sequence: Synthetic oligonucleotide
  Antisense strand to SEQ ID NO: 911396
ucuacaaucacucugcuga

SEQ ID NO: 911398 - RNA, 19 nt, Artificial Sequence
  Description of Artificial Sequence: Synthetic oligonucleotide
  Sense strand starting at position 7 of SEQ ID NO: 588691
gagugugggucuccuaaag

SEQ ID NO: 911399 - RNA, 19 nt, Artificial Sequence
  Description of Artificial Sequence: Synthetic oligonucleotide
  Antisense strand to SEQ ID NO: 911398
cuuuaggagacccacacuc

SEQ ID NO: 911400 - RNA, 19 nt, Artificial Sequence
  Description of Artificial Sequence: Synthetic oligonucleotide
  Sense strand starting at position 41 of SEQ ID NO: 588691
cuggauagucagugcuaca

SEQ ID NO: 911401 - RNA, 19 nt, Artificial Sequence
  Description of Artificial Sequence: Synthetic oligonucleotide
  Antisense strand to SEQ ID NO: 911400
uguagcacugacuauccag

SEQ ID NO: 911402 - RNA, 19 nt, Artificial Sequence
  Description of Artificial Sequence: Synthetic oligonucleotide
  Sense strand starting at position 51 of SEQ ID NO: 588691
agugcuacaucugugaaag

SEQ ID NO: 911403 - RNA, 19 nt, Artificial Sequence
  Description of Artificial Sequence: Synthetic oligonucleotide
  Antisense strand to SEQ ID NO: 911402
cuuucacagauguagcacu

SEQ ID NO: 911404 - RNA, 19 nt, Artificial Sequence
  Description of Artificial Sequence: Synthetic oligonucleotide
  Sense strand starting at position 241 of SEQ ID NO: 588691
aagauuguuugugcagaaa

SEQ ID NO: 911405 - RNA, 19 nt, Artificial Sequence
  Description of Artificial Sequence: Synthetic oligonucleotide
  Antisense strand to SEQ ID NO: 911404
uuucugcacaaacaaucuu

SEQ ID NO: 911406 - RNA, 19 nt, Artificial Sequence
  Description of Artificial Sequence: Synthetic oligonucleotide
  Sense strand starting at position 381 of SEQ ID NO: 588691
gcuggagcauuucuaaggu

SEQ ID NO: 911407 - RNA, 19 nt, Artificial Sequence
  Description of Artificial Sequence: Synthetic oligonucleotide
  Antisense strand to SEQ ID NO: 911406
accuuagaaaugcuccagc

SEQ ID NO: 911408 - RNA, 19 nt, Artificial Sequence
  Description of Artificial Sequence: Synthetic oligonucleotide
  Sense strand starting at position 408 of SEQ ID NO: 588691
cucgcaaaguguccgauuu

SEQ ID NO: 911409 - RNA, 19 nt, Artificial Sequence
  Description of Artificial Sequence: Synthetic oligonucleotide
  Antisense strand to SEQ ID NO: 911408
aaaucggacacuuugcgag

SEQ ID NO: 911410 - RNA, 19 nt, Artificial Sequence
  Description of Artificial Sequence: Synthetic oligonucleotide
  Sense strand starting at position 714 of SEQ ID NO: 588691
cuaaguccuggccauuaca

SEQ ID NO: 911411 - RNA, 19 nt, Artificial Sequence
  Description of Artificial Sequence: Synthetic oligonucleotide
  Antisense strand to SEQ ID NO: 911410
uguaauggccaggacuuag

SEQ ID NO: 911412 - RNA, 19 nt, Artificial Sequence
  Description of Artificial Sequence: Synthetic oligonucleotide
  Sense strand starting at position 2132 of SEQ ID NO: 588691
aguaaacaagcguaugcua

SEQ ID NO: 911413 - RNA, 19 nt, Artificial Sequence
  Description of Artificial Sequence: Synthetic oligonucleotide
  Antisense strand to SEQ ID NO: 911412
uagcauacgcuuguuuacu

SEQ ID NO: 911414 - RNA, 19 nt, Artificial Sequence
  Description of Artificial Sequence: Synthetic oligonucleotide
  Sense strand starting at position 2180 of SEQ ID NO: 588691
uugaaugagucccuguuaa

SEQ ID NO: 911415 - RNA, 19 nt, Artificial Sequence
  Description of Artificial Sequence: Synthetic oligonucleotide
  Antisense strand to SEQ ID NO: 911414
uuaacagggacucauucaa

SEQ ID NO: 911416 - RNA, 19 nt, Artificial Sequence
  Description of Artificial Sequence: Synthetic oligonucleotide
  Sense strand starting at position 2355 of SEQ ID NO: 588691
aggagacaaucuuaaagua

SEQ ID NO: 911417 - RNA, 19 nt, Artificial Sequence
  Description of Artificial Sequence: Synthetic oligonucleotide
  Antisense strand to SEQ ID NO: 911416
uacuuuaagauugucuccu

SEQ ID NO: 911418 - RNA, 19 nt, Artificial Sequence
  Description of Artificial Sequence: Synthetic oligonucleotide
  Sense strand starting at position 2565 of SEQ ID NO: 588691
gcugguaaaccucauccuu

SEQ ID NO: 911419 - RNA, 19 nt, Artificial Sequence
  Description of Artificial Sequence: Synthetic oligonucleotide
  Antisense strand to SEQ ID NO: 911418
aaggaugagguuuaccagc

SEQ ID NO: 911420 - RNA, 19 nt, Artificial Sequence
  Description of Artificial Sequence: Synthetic oligonucleotide
  Sense strand starting at position 2604 of SEQ ID NO: 588691
cuugaaacuugauucuuag

SEQ ID NO: 911421 - RNA, 19 nt, Artificial Sequence
  Description of Artificial Sequence: Synthetic oligonucleotide
  Antisense strand to SEQ ID NO: 911420
cuaagaaucaaguuucaag

SEQ ID NO: 911422 - RNA, 19 nt, Artificial Sequence
  Description of Artificial Sequence: Synthetic oligonucleotide
  Sense strand starting at position 2776 of SEQ ID NO: 588691
cuuaaaguuguacgaugau

SEQ ID NO: 911423 - RNA, 19 nt, Artificial Sequence
  Description of Artificial Sequence: Synthetic oligonucleotide
  Antisense strand to SEQ ID NO: 911422
aucaucguacaacuuuaag

SEQ ID NO: 911424 - RNA, 19 nt, Artificial Sequence
  Description of Artificial Sequence: Synthetic oligonucleotide
  Sense strand starting at position 2779 of SEQ ID NO: 588691
aaaguuguacgaugaugaa

SEQ ID NO: 911425 - RNA, 19 nt, Artificial Sequence
  Description of Artificial Sequence: Synthetic oligonucleotide
  Antisense strand to SEQ ID NO: 911424
uucaucaucguacaacuuu

SEQ ID NO: 911426 - RNA, 19 nt, Artificial Sequence
  Description of Artificial Sequence: Synthetic oligonucleotide
  Sense strand starting at position 2844 of SEQ ID NO: 588691
acccaaauguuuccaaagu

SEQ ID NO: 911427 - RNA, 19 nt, Artificial Sequence
  Description of Artificial Sequence: Synthetic oligonucleotide
  Antisense strand to SEQ ID NO: 911426
acuuuggaaacauuugggu

SEQ ID NO: 911428 - RNA, 19 nt, Artificial Sequence
  Description of Artificial Sequence: Synthetic oligonucleotide
  Sense strand starting at position 2853 of SEQ ID NO: 588691
uuuccaaaguucuuaugga

SEQ ID NO: 911429 - RNA, 19 nt, Artificial Sequence
  Description of Artificial Sequence: Synthetic oligonucleotide
  Antisense strand to SEQ ID NO: 911428
uccauaagaacuuuggaaa

SEQ ID NO: 911430 - RNA, 19 nt, Artificial Sequence
  Description of Artificial Sequence: Synthetic oligonucleotide
  Sense strand starting at position 2940 of SEQ ID NO: 588691
acaacugggucucugaauu

SEQ ID NO: 911431 - RNA, 19 nt, Artificial Sequence
  Description of Artificial Sequence: Synthetic oligonucleotide
  Antisense strand to SEQ ID NO: 911430
aauucagagacccaguugu

SEQ ID NO: 911432 - RNA, 19 nt, Artificial Sequence
  Description of Artificial Sequence: Synthetic oligonucleotide
  Sense strand starting at position 2979 of SEQ ID NO: 588691
uacucuguuggucauuaga

SEQ ID NO: 911433 - RNA, 19 nt, Artificial Sequence
  Description of Artificial Sequence: Synthetic oligonucleotide
  Antisense strand to SEQ ID NO: 911432
ucuaaugaccaacagagua

SEQ ID NO: 911434 - RNA, 19 nt, Artificial Sequence
  Description of Artificial Sequence: Synthetic oligonucleotide
  Sense strand starting at position 2981 of SEQ ID NO: 588691
cucuguuggucauuagaaa

SEQ ID NO: 911435 - RNA, 19 nt, Artificial Sequence
  Description of Artificial Sequence: Synthetic oligonucleotide
  Antisense strand to SEQ ID NO: 911434
uuucuaaugaccaacagag

SEQ ID NO: 911436 - RNA, 19 nt, Artificial Sequence
  Description of Artificial Sequence: Synthetic oligonucleotide
  Sense strand starting at position 2982 of SEQ ID NO: 588691
ucuguuggucauuagaaau

SEQ ID NO: 911437 - RNA, 19 nt, Artificial Sequence
  Description of Artificial Sequence: Synthetic oligonucleotide
  Antisense strand to SEQ ID NO: 911436
auuucuaaugaccaacaga

SEQ ID NO: 911438 - RNA, 19 nt, Artificial Sequence
  Description of Artificial Sequence: Synthetic oligonucleotide
  Sense strand starting at position 3239 of SEQ ID NO: 588691
uuguccaaguguuuaauaa

SEQ ID NO: 911439 - RNA, 19 nt, Artificial Sequence
  Description of Artificial Sequence: Synthetic oligonucleotide
  Antisense strand to SEQ ID NO: 911438
uuauuaaacacuuggacaa

SEQ ID NO: 911440 - RNA, 19 nt, Artificial Sequence
  Description of Artificial Sequence: Synthetic oligonucleotide
  Sense strand starting at position 3264 of SEQ ID NO: 588691
acauguuagcaauggugga

SEQ ID NO: 911441 - RNA, 19 nt, Artificial Sequence
  Description of Artificial Sequence: Synthetic oligonucleotide
  Antisense strand to SEQ ID NO: 911440
uccaccauugcuaacaugu

SEQ ID NO: 911442 - RNA, 19 nt, Artificial Sequence
  Description of Artificial Sequence: Synthetic oligonucleotide
  Sense strand starting at position 3265 of SEQ ID NO: 588691
cauguuagcaaugguggau

SEQ ID NO: 911443 - RNA, 19 nt, Artificial Sequence
  Description of Artificial Sequence: Synthetic oligonucleotide
  Antisense strand to SEQ ID NO: 911442
auccaccauugcuaacaug

SEQ ID NO: 911444 - RNA, 19 nt, Artificial Sequence
  Description of Artificial Sequence: Synthetic oligonucleotide
  Sense strand starting at position 3269 of SEQ ID NO: 588691
uuagcaaugguggauuaca

SEQ ID NO: 911445 - RNA, 19 nt, Artificial Sequence
  Description of Artificial Sequence: Synthetic oligonucleotide
  Antisense strand to SEQ ID NO: 911444
uguaauccaccauugcuaa

SEQ ID NO: 911446 - RNA, 19 nt, Artificial Sequence
  Description of Artificial Sequence: Synthetic oligonucleotide
  Sense strand starting at position 3328 of SEQ ID NO: 588691
aaauauucugugugaaguu

SEQ ID NO: 911447 - RNA, 19 nt, Artificial Sequence
  Description of Artificial Sequence: Synthetic oligonucleotide
  Antisense strand to SEQ ID NO: 911446
aacuucacacagaauauuu

SEQ ID NO: 911448 - RNA, 19 nt, Artificial Sequence
  Description of Artificial Sequence: Synthetic oligonucleotide
  Sense strand starting at position 3363 of SEQ ID NO: 588691
gcugaaagucugcgauaaa

SEQ ID NO: 911449 - RNA, 19 nt, Artificial Sequence
  Description of Artificial Sequence: Synthetic oligonucleotide
  Antisense strand to SEQ ID NO: 911448
uuuaucgcagacuuucagc

SEQ ID NO: 911450 - RNA, 19 nt, Artificial Sequence
  Description of Artificial Sequence: Synthetic oligonucleotide
  Sense strand starting at position 3438 of SEQ ID NO: 588691
uccagaucuuucuugagag

SEQ ID NO: 911451 - RNA, 19 nt, Artificial Sequence
  Description of Artificial Sequence: Synthetic oligonucleotide
  Antisense strand to SEQ ID NO: 911450
cucucaagaaagaucugga

SEQ ID NO: 911452 - RNA, 19 nt, Artificial Sequence
  Description of Artificial Sequence: Synthetic oligonucleotide
  Sense strand starting at position 3460 of SEQ ID NO: 588691
ggaacauugcuacacgcuu

SEQ ID NO: 911453 - RNA, 19 nt, Artificial Sequence
  Description of Artificial Sequence: Synthetic oligonucleotide
  Antisense strand to SEQ ID NO: 911452
aagcguguagcaauguucc

SEQ ID NO: 911454 - RNA, 19 nt, Artificial Sequence
  Description of Artificial Sequence: Synthetic oligonucleotide
  Sense strand starting at position 3498 of SEQ ID NO: 588691
ggaagaauguuuguuggca

SEQ ID NO: 911455 - RNA, 19 nt, Artificial Sequence
  Description of Artificial Sequence: Synthetic oligonucleotide
  Antisense strand to SEQ ID NO: 911454
ugccaacaaacauucuucc

SEQ ID NO: 911456 - RNA, 19 nt, Artificial Sequence
  Description of Artificial Sequence: Synthetic oligonucleotide
  Sense strand starting at position 3499 of SEQ ID NO: 588691
gaagaauguuuguuggcaa

SEQ ID NO: 911457 - RNA, 19 nt, Artificial Sequence
  Description of Artificial Sequence: Synthetic oligonucleotide
  Antisense strand to SEQ ID NO: 911456
uugccaacaaacauucuuc

SEQ ID NO: 911458 - RNA, 19 nt, Artificial Sequence
  Description of Artificial Sequence: Synthetic oligonucleotide
  Sense strand starting at position 3520 of SEQ ID NO: 588691
guaugacgauuugucggau

SEQ ID NO: 911459 - RNA, 19 nt, Artificial Sequence
  Description of Artificial Sequence: Synthetic oligonucleotide
  Antisense strand to SEQ ID NO: 911458
auccgacaaaucgucauac

SEQ ID NO: 911460 - RNA, 19 nt, Artificial Sequence
  Description of Artificial Sequence: Synthetic oligonucleotide
  Sense strand starting at position 3526 of SEQ ID NO: 588691
cgauuugucggaugagcaa

SEQ ID NO: 911461 - RNA, 19 nt, Artificial Sequence
  Description of Artificial Sequence: Synthetic oligonucleotide
  Antisense strand to SEQ ID NO: 911460
uugcucauccgacaaaucg

SEQ ID NO: 911462 - RNA, 19 nt, Artificial Sequence
  Description of Artificial Sequence: Synthetic oligonucleotide
  Sense strand starting at position 3573 of SEQ ID NO: 588691
uggaaugcgauauaugcaa

SEQ ID NO: 911463 - RNA, 19 nt, Artificial Sequence
  Description of Artificial Sequence: Synthetic oligonucleotide
  Antisense strand to SEQ ID NO: 911462
uugcauauaucgcauucca

SEQ ID NO: 911464 - RNA, 19 nt, Artificial Sequence
  Description of Artificial Sequence: Synthetic oligonucleotide
  Sense strand starting at position 3577 of SEQ ID NO: 588691
augcgauauaugcaaagau

SEQ ID NO: 911465 - RNA, 19 nt, Artificial Sequence
  Description of Artificial Sequence: Synthetic oligonucleotide
  Antisense strand to SEQ ID NO: 911464
aucuuugcauauaucgcau

SEQ ID NO: 911466 - RNA, 19 nt, Artificial Sequence
  Description of Artificial Sequence: Synthetic oligonucleotide
  Sense strand starting at position 3655 of SEQ ID NO: 588691
guugcugaauagucuuaga

SEQ ID NO: 911467 - RNA, 19 nt, Artificial Sequence
  Description of Artificial Sequence: Synthetic oligonucleotide
  Antisense strand to SEQ ID NO: 911466
ucuaagacuauucagcaac

SEQ ID NO: 911468 - RNA, 19 nt, Artificial Sequence
  Description of Artificial Sequence: Synthetic oligonucleotide
  Sense strand starting at position 3683 of SEQ ID NO: 588691
uuugaacucuguuucugua

SEQ ID NO: 911469 - RNA, 19 nt, Artificial Sequence
  Description of Artificial Sequence: Synthetic oligonucleotide
  Antisense strand to SEQ ID NO: 911468
uacagaaacagaguucaaa

SEQ ID NO: 911470 - RNA, 19 nt, Artificial Sequence
  Description of Artificial Sequence: Synthetic oligonucleotide
  Sense strand starting at position 3691 of SEQ ID NO: 588691
cuguuucuguagucauaaa

SEQ ID NO: 911471 - RNA, 19 nt, Artificial Sequence
  Description of Artificial Sequence: Synthetic oligonucleotide
  Antisense strand to SEQ ID NO: 911470
uuuaugacuacagaaacag

SEQ ID NO: 911472 - RNA, 19 nt, Artificial Sequence
  Description of Artificial Sequence: Synthetic oligonucleotide
  Sense strand starting at position 3729 of SEQ ID NO: 588691
cuaaauguguuuccagaga

SEQ ID NO: 911473 - RNA, 19 nt, Artificial Sequence
  Description of Artificial Sequence: Synthetic oligonucleotide
  Antisense strand to SEQ ID NO: 911472
ucucuggaaacacauuuag

SEQ ID NO: 911474 - RNA, 19 nt, Artificial Sequence
  Description of Artificial Sequence: Synthetic oligonucleotide
  Sense strand starting at position 3844 of SEQ ID NO: 588691
aaagguugccauuggauaa

SEQ ID NO: 911475 - RNA, 19 nt, Artificial Sequence
  Description of Artificial Sequence: Synthetic oligonucleotide
  Antisense strand to SEQ ID NO: 911474
uuauccaauggcaaccuuu

SEQ ID NO: 911476 - RNA, 19 nt, Artificial Sequence
  Description of Artificial Sequence: Synthetic oligonucleotide
  Sense strand starting at position 3869 of SEQ ID NO: 588691
agcuauguugaacaacaua

SEQ ID NO: 911477 - RNA, 19 nt, Artificial Sequence
  Description of Artificial Sequence: Synthetic oligonucleotide
  Antisense strand to SEQ ID NO: 911476
uauguuguucaacauagcu

SEQ ID NO: 911478 - RNA, 19 nt, Artificial Sequence
  Description of Artificial Sequence: Synthetic oligonucleotide
  Sense strand starting at position 1 of SEQ ID NO: 588693
gugcuuggcugucagcaga

SEQ ID NO: 911479 - RNA, 19 nt, Artificial Sequence
  Description of Artificial Sequence: Synthetic oligonucleotide
  Antisense strand to SEQ ID NO: 911478
ucugcugacagccaagcac

SEQ ID NO: 911480 - RNA, 19 nt, Artificial Sequence
  Description of Artificial Sequence: Synthetic oligonucleotide
  Sense strand starting at position 66 of SEQ ID NO: 588693
aucagaauuuacugagaau

SEQ ID NO: 911481 - RNA, 19 nt, Artificial Sequence
  Description of Artificial Sequence: Synthetic oligonucleotide
  Antisense strand to SEQ ID NO: 911480
auucucaguaaauucugau

SEQ ID NO: 911482 - RNA, 19 nt, Artificial Sequence
  Description of Artificial Sequence: Synthetic oligonucleotide
  Sense strand starting at position 121 of SEQ ID NO: 588693
gacugaaugcuagaugucu

SEQ ID NO: 911483 - RNA, 19 nt, Artificial Sequence
  Description of Artificial Sequence: Synthetic oligonucleotide
  Antisense strand to SEQ ID NO: 911482
agacaucuagcauucaguc

SEQ ID NO: 911484 - RNA, 19 nt, Artificial Sequence
  Description of Artificial Sequence: Synthetic oligonucleotide
  Sense strand starting at position 264 of SEQ ID NO: 588693
gccauaauaugugaaugaa

SEQ ID NO: 911485 - RNA, 19 nt, Artificial Sequence
  Description of Artificial Sequence: Synthetic oligonucleotide
  Antisense strand to SEQ ID NO: 911484
uucauucacauauuauggc

SEQ ID NO: 911486 - RNA, 19 nt, Artificial Sequence
  Description of Artificial Sequence: Synthetic oligonucleotide
  Sense strand starting at position 319 of SEQ ID NO: 588693
ugcugcuuauuaugguuua

SEQ ID NO: 911487 - RNA, 19 nt, Artificial Sequence
  Description of Artificial Sequence: Synthetic oligonucleotide
  Antisense strand to SEQ ID NO: 911486
uaaaccauaauaagcagca

SEQ ID NO: 911488 - RNA, 19 nt, Artificial Sequence
  Description of Artificial Sequence: Synthetic oligonucleotide
  Sense strand starting at position 322 of SEQ ID NO: 588693
ugcuuauuaugguuuagca

SEQ ID NO: 911489 - RNA, 19 nt, Artificial Sequence
  Description of Artificial Sequence: Synthetic oligonucleotide
  Antisense strand to SEQ ID NO: 911488
ugcuaaaccauaauaagca

SEQ ID NO: 911490 - RNA, 19 nt, Artificial Sequence
  Description of Artificial Sequence: Synthetic oligonucleotide
  Sense strand starting at position 324 of SEQ ID NO: 588693
cuuauuaugguuuagcaua

SEQ ID NO: 911491 - RNA, 19 nt, Artificial Sequence
  Description of Artificial Sequence: Synthetic oligonucleotide
  Antisense strand to SEQ ID NO: 911490
uaugcuaaaccauaauaag

SEQ ID NO: 911492 - RNA, 19 nt, Artificial Sequence
  Description of Artificial Sequence: Synthetic oligonucleotide
  Sense strand starting at position 392 of SEQ ID NO: 588693
ggaucagaauaguauugca

SEQ ID NO: 911493 - RNA, 19 nt, Artificial Sequence
  Description of Artificial Sequence: Synthetic oligonucleotide
  Antisense strand to SEQ ID NO: 911492
ugcaauacuauucugaucc

SEQ ID NO: 911494 - RNA, 19 nt, Artificial Sequence
  Description of Artificial Sequence: Synthetic oligonucleotide
  Sense strand starting at position 395 of SEQ ID NO: 588693
ucagaauaguauugcaaag

SEQ ID NO: 911495 - RNA, 19 nt, Artificial Sequence
  Description of Artificial Sequence: Synthetic oligonucleotide
  Antisense strand to SEQ ID NO: 911494
cuuugcaauacuauucuga

SEQ ID NO: 911496 - RNA, 19 nt, Artificial Sequence
  Description of Artificial Sequence: Synthetic oligonucleotide
  Sense strand starting at position 435 of SEQ ID NO: 588693
ggcugacucgccuaucaac

SEQ ID NO: 911497 - RNA, 19 nt, Artificial Sequence
  Description of Artificial Sequence: Synthetic oligonucleotide
  Antisense strand to SEQ ID NO: 911496
guugauaggcgagucagcc

SEQ ID NO: 911498 - RNA, 19 nt, Artificial Sequence
  Description of Artificial Sequence: Synthetic oligonucleotide
  Sense strand starting at position 526 of SEQ ID NO: 588693
ucccuuggauagugcuaua

SEQ ID NO: 911499 - RNA, 19 nt, Artificial Sequence
  Description of Artificial Sequence: Synthetic oligonucleotide
  Antisense strand to SEQ ID NO: 911498
uauagcacuauccaaggga

SEQ ID NO: 911500 - RNA, 19 nt, Artificial Sequence
  Description of Artificial Sequence: Synthetic oligonucleotide
  Sense strand starting at position 536 of SEQ ID NO: 588693
agugcuauauccuggacuu

SEQ ID NO: 911501 - RNA, 19 nt, Artificial Sequence
  Description of Artificial Sequence: Synthetic oligonucleotide
  Antisense strand to SEQ ID NO: 911500
aaguccaggauauagcacu

SEQ ID NO: 911502 - RNA, 19 nt, Artificial Sequence
  Description of Artificial Sequence: Synthetic oligonucleotide
  Sense strand starting at position 537 of SEQ ID NO: 588693
gugcuauauccuggacuuc

SEQ ID NO: 911503 - RNA, 19 nt, Artificial Sequence
  Description of Artificial Sequence: Synthetic oligonucleotide
  Antisense strand to SEQ ID NO: 911502
gaaguccaggauauagcac

SEQ ID NO: 911504 - RNA, 19 nt, Artificial Sequence
  Description of Artificial Sequence: Synthetic oligonucleotide
  Sense strand starting at position 665 of SEQ ID NO: 588693
aacaguagagcuuguuuaa

SEQ ID NO: 911505 - RNA, 19 nt, Artificial Sequence
  Description of Artificial Sequence: Synthetic oligonucleotide
  Antisense strand to SEQ ID NO: 911504
uuaaacaagcucuacuguu

SEQ ID NO: 911506 - RNA, 19 nt, Artificial Sequence
  Description of Artificial Sequence: Synthetic oligonucleotide
  Sense strand starting at position 668 of SEQ ID NO: 588693
aguagagcuuguuuaaugu

SEQ ID NO: 911507 - RNA, 19 nt, Artificial Sequence
  Description of Artificial Sequence: Synthetic oligonucleotide
  Antisense strand to SEQ ID NO: 911506
acauuaaacaagcucuacu

SEQ ID NO: 911508 - RNA, 19 nt, Artificial Sequence
  Description of Artificial Sequence: Synthetic oligonucleotide
  Sense strand starting at position 684 of SEQ ID NO: 588693
uguacuuguuugccacaua

SEQ ID NO: 911509 - RNA, 19 nt, Artificial Sequence
  Description of Artificial Sequence: Synthetic oligonucleotide
  Antisense strand to SEQ ID NO: 911508
uauguggcaaacaaguaca

SEQ ID NO: 911510 - RNA, 19 nt, Artificial Sequence
  Description of Artificial Sequence: Synthetic oligonucleotide
  Sense strand starting at position 685 of SEQ ID NO: 588693
guacuuguuugccacauac

SEQ ID NO: 911511 - RNA, 19 nt, Artificial Sequence
  Description of Artificial Sequence: Synthetic oligonucleotide
  Antisense strand to SEQ ID NO: 911510
guauguggcaaacaaguac

SEQ ID NO: 911512 - RNA, 19 nt, Artificial Sequence
  Description of Artificial Sequence: Synthetic oligonucleotide
  Sense strand starting at position 706 of SEQ ID NO: 588693
ggaagauaaugccaaauac

SEQ ID NO: 911513 - RNA, 19 nt, Artificial Sequence
  Description of Artificial Sequence: Synthetic oligonucleotide
  Antisense strand to SEQ ID NO: 911512
guauuuggcauuaucuucc

SEQ ID NO: 911514 - RNA, 19 nt, Artificial Sequence
  Description of Artificial Sequence: Synthetic oligonucleotide
  Sense strand starting at position 759 of SEQ ID NO: 588693
gcaguuaccucacgucaag

SEQ ID NO: 911515 - RNA, 19 nt, Artificial Sequence
  Description of Artificial Sequence: Synthetic oligonucleotide
  Antisense strand to SEQ ID NO: 911514
cuugacgugagguaacugc

SEQ ID NO: 911516 - RNA, 19 nt, Artificial Sequence
  Description of Artificial Sequence: Synthetic oligonucleotide
  Sense strand starting at position 768 of SEQ ID NO: 588693
ucacgucaagacugaaaga

SEQ ID NO: 911517 - RNA, 19 nt, Artificial Sequence
  Description of Artificial Sequence: Synthetic oligonucleotide
  Antisense strand to SEQ ID NO: 911516
ucuuucagucuugacguga

SEQ ID NO: 911518 - RNA, 19 nt, Artificial Sequence
  Description of Artificial Sequence: Synthetic oligonucleotide
  Sense strand starting at position 845 of SEQ ID NO: 588693
ccaaauauguaccuguagu

SEQ ID NO: 911519 - RNA, 19 nt, Artificial Sequence
  Description of Artificial Sequence: Synthetic oligonucleotide
  Antisense strand to SEQ ID NO: 911518
acuacagguacauauuugg

SEQ ID NO: 911520 - RNA, 19 nt, Artificial Sequence
  Description of Artificial Sequence: Synthetic oligonucleotide
  Sense strand starting at position 1026 of SEQ ID NO: 588693
gauguaauacaucguaugu

SEQ ID NO: 911521 - RNA, 19 nt, Artificial Sequence
  Description of Artificial Sequence: Synthetic oligonucleotide
  Antisense strand to SEQ ID NO: 911520
acauacgauguauuacauc

SEQ ID NO: 911522 - RNA, 19 nt, Artificial Sequence
  Description of Artificial Sequence: Synthetic oligonucleotide
  Sense strand starting at position 1028 of SEQ ID NO: 588693
uguaauacaucguaugugu

SEQ ID NO: 911523 - RNA, 19 nt, Artificial Sequence
  Description of Artificial Sequence: Synthetic oligonucleotide
  Antisense strand to SEQ ID NO: 911522
acacauacgauguauuaca

SEQ ID NO: 911524 - RNA, 19 nt, Artificial Sequence
  Description of Artificial Sequence: Synthetic oligonucleotide
  Sense strand starting at position 1031 of SEQ ID NO: 588693
aauacaucguaugugucua

SEQ ID NO: 911525 - RNA, 19 nt, Artificial Sequence
  Description of Artificial Sequence: Synthetic oligonucleotide
  Antisense strand to SEQ ID NO: 911524
uagacacauacgauguauu

SEQ ID NO: 911526 - RNA, 19 nt, Artificial Sequence
  Description of Artificial Sequence: Synthetic oligonucleotide
  Sense strand starting at position 1035 of SEQ ID NO: 588693
caucguaugugucuacaca

SEQ ID NO: 911527 - RNA, 19 nt, Artificial Sequence
  Description of Artificial Sequence: Synthetic oligonucleotide
  Antisense strand to SEQ ID NO: 911526
uguguagacacauacgaug

SEQ ID NO: 911528 - RNA, 19 nt, Artificial Sequence
  Description of Artificial Sequence: Synthetic oligonucleotide
  Sense strand starting at position 1036 of SEQ ID NO: 588693
aucguaugugucuacacau

SEQ ID NO: 911529 - RNA, 19 nt, Artificial Sequence
  Description of Artificial Sequence: Synthetic oligonucleotide
  Antisense strand to SEQ ID NO: 911528
auguguagacacauacgau

SEQ ID NO: 911530 - RNA, 19 nt, Artificial Sequence
  Description of Artificial Sequence: Synthetic oligonucleotide
  Sense strand starting at position 1063 of SEQ ID NO: 588693
uuccucgauucucuaaagu

SEQ ID NO: 911531 - RNA, 19 nt, Artificial Sequence
  Description of Artificial Sequence: Synthetic oligonucleotide
  Antisense strand to SEQ ID NO: 911530
acuuuagagaaucgaggaa

SEQ ID NO: 911532 - RNA, 19 nt, Artificial Sequence
  Description of Artificial Sequence: Synthetic oligonucleotide
  Sense strand starting at position 1164 of SEQ ID NO: 588693
gcuuaagacugucuaagua

SEQ ID NO: 911533 - RNA, 19 nt, Artificial Sequence
  Description of Artificial Sequence: Synthetic oligonucleotide
  Antisense strand to SEQ ID NO: 911532
uacuuagacagucuuaagc

SEQ ID NO: 911534 - RNA, 19 nt, Artificial Sequence
  Description of Artificial Sequence: Synthetic oligonucleotide
  Sense strand starting at position 1676 of SEQ ID NO: 588693
agguauuagcaucaccuau

SEQ ID NO: 911535 - RNA, 19 nt, Artificial Sequence
  Description of Artificial Sequence: Synthetic oligonucleotide
  Antisense strand to SEQ ID NO: 911534
auaggugaugcuaauaccu

SEQ ID NO: 911536 - RNA, 19 nt, Artificial Sequence
  Description of Artificial Sequence: Synthetic oligonucleotide
  Sense strand starting at position 1683 of SEQ ID NO: 588693
agcaucaccuauggaauaa

SEQ ID NO: 911537 - RNA, 19 nt, Artificial Sequence
  Description of Artificial Sequence: Synthetic oligonucleotide
  Antisense strand to SEQ ID NO: 911536
uuauuccauaggugaugcu

SEQ ID NO: 911538 - RNA, 19 nt, Artificial Sequence
  Description of Artificial Sequence: Synthetic oligonucleotide
  Sense strand starting at position 1704 of SEQ ID NO: 588693
uggcgccuuccuuuaaguu

SEQ ID NO: 911539 - RNA, 19 nt, Artificial Sequence
  Description of Artificial Sequence: Synthetic oligonucleotide
  Antisense strand to SEQ ID NO: 911538
aacuuaaaggaaggcgcca

SEQ ID NO: 911540 - RNA, 19 nt, Artificial Sequence
  Description of Artificial Sequence: Synthetic oligonucleotide
  Sense strand starting at position 1705 of SEQ ID NO: 588693
ggcgccuuccuuuaaguua

SEQ ID NO: 911541 - RNA, 19 nt, Artificial Sequence
  Description of Artificial Sequence: Synthetic oligonucleotide
  Antisense strand to SEQ ID NO: 911540
uaacuuaaaggaaggcgcc

SEQ ID NO: 911542 - RNA, 19 nt, Artificial Sequence
  Description of Artificial Sequence: Synthetic oligonucleotide
  Sense strand starting at position 2030 of SEQ ID NO: 588693
ggugacagcucggcaaagu

SEQ ID NO: 911543 - RNA, 19 nt, Artificial Sequence
  Description of Artificial Sequence: Synthetic oligonucleotide
  Antisense strand to SEQ ID NO: 911542
acuuugccgagcugucacc

SEQ ID NO: 911544 - RNA, 19 nt, Artificial Sequence
  Description of Artificial Sequence: Synthetic oligonucleotide
  Sense strand starting at position 2031 of SEQ ID NO: 588693
gugacagcucggcaaaguu

SEQ ID NO: 911545 - RNA, 19 nt, Artificial Sequence
  Description of Artificial Sequence: Synthetic oligonucleotide
  Antisense strand to SEQ ID NO: 911544
aacuuugccgagcugucac

SEQ ID NO: 911546 - RNA, 19 nt, Artificial Sequence
  Description of Artificial Sequence: Synthetic oligonucleotide
  Sense strand starting at position 2252 of SEQ ID NO: 588693
gguuuaaaucccugggagg

SEQ ID NO: 911547 - RNA, 19 nt, Artificial Sequence
  Description of Artificial Sequence: Synthetic oligonucleotide
  Antisense strand to SEQ ID NO: 911546
ccucccagggauuuaaacc

SEQ ID NO: 911548 - RNA, 19 nt, Artificial Sequence
  Description of Artificial Sequence: Synthetic oligonucleotide
  Sense strand starting at position 2418 of SEQ ID NO: 588693
gccggcuuucggagaaagu

SEQ ID NO: 911549 - RNA, 19 nt, Artificial Sequence
  Description of Artificial Sequence: Synthetic oligonucleotide
  Antisense strand to SEQ ID NO: 911548
acuuucuccgaaagccggc

SEQ ID NO: 911550 - RNA, 19 nt, Artificial Sequence
  Description of Artificial Sequence: Synthetic oligonucleotide
  Sense strand starting at position 2419 of SEQ ID NO: 588693
ccggcuuucggagaaaguu

SEQ ID NO: 911551 - RNA, 19 nt, Artificial Sequence
  Description of Artificial Sequence: Synthetic oligonucleotide
  Antisense strand to SEQ ID NO: 911550
aacuuucuccgaaagccgg

SEQ ID NO: 911552 - RNA, 19 nt, Artificial Sequence
  Description of Artificial Sequence: Synthetic oligonucleotide
  Sense strand starting at position 2523 of SEQ ID NO: 588693
gaugcuuaaugagacgaca

SEQ ID NO: 911553 - RNA, 19 nt, Artificial Sequence
  Description of Artificial Sequence: Synthetic oligonucleotide
  Antisense strand to SEQ ID NO: 911552
ugucgucucauuaagcauc

SEQ ID NO: 911554 - RNA, 19 nt, Artificial Sequence
  Description of Artificial Sequence: Synthetic oligonucleotide
  Sense strand starting at position 165 of SEQ ID NO: 588694
gauguaauacaucguaugu

SEQ ID NO: 911555 - RNA, 19 nt, Artificial Sequence
  Description of Artificial Sequence: Synthetic oligonucleotide
  Antisense strand to SEQ ID NO: 911554
acauacgauguauuacauc

SEQ ID NO: 911556 - RNA, 19 nt, Artificial Sequence
  Description of Artificial Sequence: Synthetic oligonucleotide
  Sense strand starting at position 170 of SEQ ID NO: 588694
aauacaucguaugugucua

SEQ ID NO: 911557 - RNA, 19 nt, Artificial Sequence
  Description of Artificial Sequence: Synthetic oligonucleotide
  Antisense strand to SEQ ID NO: 911556
uagacacauacgauguauu

SEQ ID NO: 911558 - RNA, 19 nt, Artificial Sequence
  Description of Artificial Sequence: Synthetic oligonucleotide
  Sense strand starting at position 174 of SEQ ID NO: 588694
caucguaugugucuacaca

SEQ ID NO: 911559 - RNA, 19 nt, Artificial Sequence
  Description of Artificial Sequence: Synthetic oligonucleotide
  Antisense strand to SEQ ID NO: 911558
uguguagacacauacgaug

SEQ ID NO: 911560 - RNA, 19 nt, Artificial Sequence
  Description of Artificial Sequence: Synthetic oligonucleotide
  Sense strand starting at position 175 of SEQ ID NO: 588694
aucguaugugucuacacau

SEQ ID NO: 911561 - RNA, 19 nt, Artificial Sequence
  Description of Artificial Sequence: Synthetic oligonucleotide
  Antisense strand to SEQ ID NO: 911560
auguguagacacauacgau

SEQ ID NO: 911562 - RNA, 19 nt, Artificial Sequence
  Description of Artificial Sequence: Synthetic oligonucleotide
  Sense strand starting at position 202 of SEQ ID NO: 588694
uuccucgauucucuaaagu

SEQ ID NO: 911563 - RNA, 19 nt, Artificial Sequence
  Description of Artificial Sequence: Synthetic oligonucleotide
  Antisense strand to SEQ ID NO: 911562
acuuuagagaaucgaggaa

SEQ ID NO: 911564 - RNA, 19 nt, Artificial Sequence
  Description of Artificial Sequence: Synthetic oligonucleotide
  Sense strand starting at position 303 of SEQ ID NO: 588694
gcuuaagacugucuaagua

SEQ ID NO: 911565 - RNA, 19 nt, Artificial Sequence
  Description of Artificial Sequence: Synthetic oligonucleotide
  Antisense strand to SEQ ID NO: 911564
uacuuagacagucuuaagc

SEQ ID NO: 911566 - RNA, 19 nt, Artificial Sequence
  Description of Artificial Sequence: Synthetic oligonucleotide
  Sense strand starting at position 815 of SEQ ID NO: 588694
agguauuagcaucaccuau

SEQ ID NO: 911567 - RNA, 19 nt, Artificial Sequence
  Description of Artificial Sequence: Synthetic oligonucleotide
  Antisense strand to SEQ ID NO: 911566
auaggugaugcuaauaccu

SEQ ID NO: 911568 - RNA, 19 nt, Artificial Sequence
  Description of Artificial Sequence: Synthetic oligonucleotide
  Sense strand starting at position 822 of SEQ ID NO: 588694
agcaucaccuauggaauaa

SEQ ID NO: 911569 - RNA, 19 nt, Artificial Sequence
  Description of Artificial Sequence: Synthetic oligonucleotide
  Antisense strand to SEQ ID NO: 911568
uuauuccauaggugaugcu

SEQ ID NO: 911570 - RNA, 19 nt, Artificial Sequence
  Description of Artificial Sequence: Synthetic oligonucleotide
  Sense strand starting at position 843 of SEQ ID NO: 588694
uggcgccuuccuuuaaguu

SEQ ID NO: 911571 - RNA, 19 nt, Artificial Sequence
  Description of Artificial Sequence: Synthetic oligonucleotide
  Antisense strand to SEQ ID NO: 911570
aacuuaaaggaaggcgcca

SEQ ID NO: 911572 - RNA, 19 nt, Artificial Sequence
  Description of Artificial Sequence: Synthetic oligonucleotide
  Sense strand starting at position 844 of SEQ ID NO: 588694
ggcgccuuccuuuaaguua

SEQ ID NO: 911573 - RNA, 19 nt, Artificial Sequence
  Description of Artificial Sequence: Synthetic oligonucleotide
  Antisense strand to SEQ ID NO: 911572
uaacuuaaaggaaggcgcc

SEQ ID NO: 911574 - RNA, 19 nt, Artificial Sequence
  Description of Artificial Sequence: Synthetic oligonucleotide
  Sense strand starting at position 1169 of SEQ ID NO: 588694
ggugacagcucggcaaagu

SEQ ID NO: 911575 - RNA, 19 nt, Artificial Sequence
  Description of Artificial Sequence: Synthetic oligonucleotide
  Antisense strand to SEQ ID NO: 911574
acuuugccgagcugucacc

SEQ ID NO: 911576 - RNA, 19 nt, Artificial Sequence
  Description of Artificial Sequence: Synthetic oligonucleotide
  Sense strand starting at position 1170 of SEQ ID NO: 588694
gugacagcucggcaaaguu

SEQ ID NO: 911577 - RNA, 19 nt, Artificial Sequence
  Description of Artificial Sequence: Synthetic oligonucleotide
  Antisense strand to SEQ ID NO: 911576
aacuuugccgagcugucac

SEQ ID NO: 911578 - RNA, 19 nt, Artificial Sequence
  Description of Artificial Sequence: Synthetic oligonucleotide
  Sense strand starting at position 1391 of SEQ ID NO: 588694
gguuuaaaucccugggagg

SEQ ID NO: 911579 - RNA, 19 nt, Artificial Sequence
  Description of Artificial Sequence: Synthetic oligonucleotide
  Antisense strand to SEQ ID NO: 911578
ccucccagggauuuaaacc

SEQ ID NO: 911580 - RNA, 19 nt, Artificial Sequence
  Description of Artificial Sequence: Synthetic oligonucleotide
  Sense strand starting at position 1557 of SEQ ID NO: 588694
gccggcuuucggagaaagu

SEQ ID NO: 911581 - RNA, 19 nt, Artificial Sequence
  Description of Artificial Sequence: Synthetic oligonucleotide
  Antisense strand to SEQ ID NO: 911580
acuuucuccgaaagccggc

SEQ ID NO: 911582 - RNA, 19 nt, Artificial Sequence
  Description of Artificial Sequence: Synthetic oligonucleotide
  Sense strand starting at position 1558 of SEQ ID NO: 588694
ccggcuuucggagaaaguu

SEQ ID NO: 911583 - RNA, 19 nt, Artificial Sequence
  Description of Artificial Sequence: Synthetic oligonucleotide
  Antisense strand to SEQ ID NO: 911582
aacuuucuccgaaagccgg

SEQ ID NO: 911584 - RNA, 19 nt, Artificial Sequence
  Description of Artificial Sequence: Synthetic oligonucleotide
  Sense strand starting at position 1662 of SEQ ID NO: 588694
gaugcuuaaugagacgaca

SEQ ID NO: 911585 - RNA, 19 nt, Artificial Sequence
  Description of Artificial Sequence: Synthetic oligonucleotide
  Antisense strand to SEQ ID NO: 911584
ugucgucucauuaagcauc

SEQ ID NO: 911586 - RNA, 19 nt, Artificial Sequence
  Description of Artificial Sequence: Synthetic oligonucleotide
  Sense strand starting at position 3163 of SEQ ID NO: 588694
aagaaagggucgucccaau

SEQ ID NO: 911587 - RNA, 19 nt, Artificial Sequence
  Description of Artificial Sequence: Synthetic oligonucleotide
  Antisense strand to SEQ ID NO: 911586
auugggacgacccuuucuu

SEQ ID NO: 911588 - RNA, 19 nt, Artificial Sequence
  Description of Artificial Sequence: Synthetic oligonucleotide
  Sense strand starting at position 3346 of SEQ ID NO: 588694
ggucucacauacuugaagu

SEQ ID NO: 911589 - RNA, 19 nt, Artificial Sequence
  Description of Artificial Sequence: Synthetic oligonucleotide
  Antisense strand to SEQ ID NO: 911588
acuucaaguaugugagacc

SEQ ID NO: 911590 - RNA, 19 nt, Artificial Sequence
  Description of Artificial Sequence: Synthetic oligonucleotide
  Sense strand starting at position 3357 of SEQ ID NO: 588694
cuugaagucugagcugagu

SEQ ID NO: 911591 - RNA, 19 nt, Artificial Sequence
  Description of Artificial Sequence: Synthetic oligonucleotide
  Antisense strand to SEQ ID NO: 911590
acucagcucagacuucaag

SEQ ID NO: 911592 - RNA, 19 nt, Artificial Sequence
  Description of Artificial Sequence: Synthetic oligonucleotide
  Sense strand starting at position 3378 of SEQ ID NO: 588694
accugacugccauagacuu

SEQ ID NO: 911593 - RNA, 19 nt, Artificial Sequence
  Description of Artificial Sequence: Synthetic oligonucleotide
  Antisense strand to SEQ ID NO: 911592
aagucuauggcagucaggu

SEQ ID NO: 911594 - RNA, 19 nt, Artificial Sequence
  Description of Artificial Sequence: Synthetic oligonucleotide
  Sense strand starting at position 3386 of SEQ ID NO: 588694
gccauagacuuuccauuga

SEQ ID NO: 911595 - RNA, 19 nt, Artificial Sequence
  Description of Artificial Sequence: Synthetic oligonucleotide
  Antisense strand to SEQ ID NO: 911594
ucaauggaaagucuauggc

SEQ ID NO: 911596 - RNA, 19 nt, Artificial Sequence
  Description of Artificial Sequence: Synthetic oligonucleotide
  Sense strand starting at position 3409 of SEQ ID NO: 588694
ggaaaugugucagagagaa

SEQ ID NO: 911597 - RNA, 19 nt, Artificial Sequence
  Description of Artificial Sequence: Synthetic oligonucleotide
  Antisense strand to SEQ ID NO: 911596
uucucucugacacauuucc

SEQ ID NO: 911598 - RNA, 19 nt, Artificial Sequence
  Description of Artificial Sequence: Synthetic oligonucleotide
  Sense strand starting at position 3534 of SEQ ID NO: 588694
cagcguuugcuauucgaug

SEQ ID NO: 911599 - RNA, 19 nt, Artificial Sequence
  Description of Artificial Sequence: Synthetic oligonucleotide
  Antisense strand to SEQ ID NO: 911598
caucgaauagcaaacgcug

SEQ ID NO: 911600 - RNA, 19 nt, Artificial Sequence
  Description of Artificial Sequence: Synthetic oligonucleotide
  Sense strand starting at position 3545 of SEQ ID NO: 588694
auucgaugccuccagaugu

SEQ ID NO: 911601 - RNA, 19 nt, Artificial Sequence
  Description of Artificial Sequence: Synthetic oligonucleotide
  Antisense strand to SEQ ID NO: 911600
acaucuggaggcaucgaau

SEQ ID NO: 911602 - RNA, 19 nt, Artificial Sequence
  Description of Artificial Sequence: Synthetic oligonucleotide
  Sense strand starting at position 3594 of SEQ ID NO: 588694
caaagauacguuuguuuag

SEQ ID NO: 911603 - RNA, 19 nt, Artificial Sequence
  Description of Artificial Sequence: Synthetic oligonucleotide
  Antisense strand to SEQ ID NO: 911602
cuaaacaaacguaucuuug

SEQ ID NO: 911604 - RNA, 19 nt, Artificial Sequence
  Description of Artificial Sequence: Synthetic oligonucleotide
  Sense strand starting at position 3596 of SEQ ID NO: 588694
aagauacguuuguuuagga

SEQ ID NO: 911605 - RNA, 19 nt, Artificial Sequence
  Description of Artificial Sequence: Synthetic oligonucleotide
  Antisense strand to SEQ ID NO: 911604
uccuaaacaaacguaucuu

SEQ ID NO: 911606 - RNA, 19 nt, Artificial Sequence
  Description of Artificial Sequence: Synthetic oligonucleotide
  Sense strand starting at position 3597 of SEQ ID NO: 588694
agauacguuuguuuaggaa

SEQ ID NO: 911607 - RNA, 19 nt, Artificial Sequence
  Description of Artificial Sequence: Synthetic oligonucleotide
  Antisense strand to SEQ ID NO: 911606
uuccuaaacaaacguaucu

SEQ ID NO: 911608 - RNA, 19 nt, Artificial Sequence
  Description of Artificial Sequence: Synthetic oligonucleotide
  Sense strand starting at position 3656 of SEQ ID NO: 588694
gucauuuaauguugguaac

SEQ ID NO: 911609 - RNA, 19 nt, Artificial Sequence
  Description of Artificial Sequence: Synthetic oligonucleotide
  Antisense strand to SEQ ID NO: 911608
guuaccaacauuaaaugac

SEQ ID NO: 911610 - RNA, 19 nt, Artificial Sequence
  Description of Artificial Sequence: Synthetic oligonucleotide
  Sense strand starting at position 3736 of SEQ ID NO: 588694
acugaaggcucacauuauu

SEQ ID NO: 911611 - RNA, 19 nt, Artificial Sequence
  Description of Artificial Sequence: Synthetic oligonucleotide
  Antisense strand to SEQ ID NO: 911610
aauaaugugagccuucagu

SEQ ID NO: 911612 - RNA, 19 nt, Artificial Sequence
  Description of Artificial Sequence: Synthetic oligonucleotide
  Sense strand starting at position 3782 of SEQ ID NO: 588694
gagacuugagauugcucuu

SEQ ID NO: 911613 - RNA, 19 nt, Artificial Sequence
  Description of Artificial Sequence: Synthetic oligonucleotide
  Antisense strand to SEQ ID NO: 911612
aagagcaaucucaagucuc

SEQ ID NO: 911614 - RNA, 19 nt, Artificial Sequence
  Description of Artificial Sequence: Synthetic oligonucleotide
  Sense strand starting at position 3785 of SEQ ID NO: 588694
acuugagauugcucuuaag

SEQ ID NO: 911615 - RNA, 19 nt, Artificial Sequence
  Description of Artificial Sequence: Synthetic oligonucleotide
  Antisense strand to SEQ ID NO: 911614
cuuaagagcaaucucaagu

SEQ ID NO: 911616 - RNA, 19 nt, Artificial Sequence
  Description of Artificial Sequence: Synthetic oligonucleotide
  Sense strand starting at position 3823 of SEQ ID NO: 588694
cugcaauguguguucccga

SEQ ID NO: 911617 - RNA, 19 nt, Artificial Sequence
  Description of Artificial Sequence: Synthetic oligonucleotide
  Antisense strand to SEQ ID NO: 911616
ucgggaacacacauugcag

SEQ ID NO: 911618 - RNA, 19 nt, Artificial Sequence
  Description of Artificial Sequence: Synthetic oligonucleotide
  Sense strand starting at position 3824 of SEQ ID NO: 588694
ugcaauguguguucccgau

SEQ ID NO: 911619 - RNA, 19 nt, Artificial Sequence
  Description of Artificial Sequence: Synthetic oligonucleotide
  Antisense strand to SEQ ID NO: 911618
aucgggaacacacauugca

SEQ ID NO: 911620 - RNA, 19 nt, Artificial Sequence
  Description of Artificial Sequence: Synthetic oligonucleotide
  Sense strand starting at position 3826 of SEQ ID NO: 588694
caauguguguucccgauuu

SEQ ID NO: 911621 - RNA, 19 nt, Artificial Sequence
  Description of Artificial Sequence: Synthetic oligonucleotide
  Antisense strand to SEQ ID NO: 911620
aaaucgggaacacacauug

SEQ ID NO: 911622 - RNA, 19 nt, Artificial Sequence
  Description of Artificial Sequence: Synthetic oligonucleotide
  Sense strand starting at position 3853 of SEQ ID NO: 588694
uugagcucacccuagauga

SEQ ID NO: 911623 - RNA, 19 nt, Artificial Sequence
  Description of Artificial Sequence: Synthetic oligonucleotide
  Antisense strand to SEQ ID NO: 911622
ucaucuagggugagcucaa

SEQ ID NO: 911624 - RNA, 19 nt, Artificial Sequence
  Description of Artificial Sequence: Synthetic oligonucleotide
  Sense strand starting at position 3855 of SEQ ID NO: 588694
gagcucacccuagaugagu

SEQ ID NO: 911625 - RNA, 19 nt, Artificial Sequence
  Description of Artificial Sequence: Synthetic oligonucleotide
  Antisense strand to SEQ ID NO: 911624
acucaucuagggugagcuc

SEQ ID NO: 911626 - RNA, 19 nt, Artificial Sequence
  Description of Artificial Sequence: Synthetic oligonucleotide
  Sense strand starting at position 3864 of SEQ ID NO: 588694
cuagaugaguccuuugguu

SEQ ID NO: 911627 - RNA, 19 nt, Artificial Sequence
  Description of Artificial Sequence: Synthetic oligonucleotide
  Antisense strand to SEQ ID NO: 911626
aaccaaaggacucaucuag

SEQ ID NO: 911628 - RNA, 19 nt, Artificial Sequence
  Description of Artificial Sequence: Synthetic oligonucleotide
  Sense strand starting at position 3921 of SEQ ID NO: 588694
ucaguaagcugucuuaccu

SEQ ID NO: 911629 - RNA, 19 nt, Artificial Sequence
  Description of Artificial Sequence: Synthetic oligonucleotide
  Antisense strand to SEQ ID NO: 911628
agguaagacagcuuacuga

SEQ ID NO: 911630 - RNA, 19 nt, Artificial Sequence
  Description of Artificial Sequence: Synthetic oligonucleotide
  Sense strand starting at position 3928 of SEQ ID NO: 588694
gcugucuuaccugaaacca

SEQ ID NO: 911631 - RNA, 19 nt, Artificial Sequence
  Description of Artificial Sequence: Synthetic oligonucleotide
  Antisense strand to SEQ ID NO: 911630
ugguuucagguaagacagc

SEQ ID NO: 911632 - RNA, 19 nt, Artificial Sequence
  Description of Artificial Sequence: Synthetic oligonucleotide
  Sense strand starting at position 3979 of SEQ ID NO: 588694
cuuacucugcaggguuuaa

SEQ ID NO: 911633 - RNA, 19 nt, Artificial Sequence
  Description of Artificial Sequence: Synthetic oligonucleotide
  Antisense strand to SEQ ID NO: 911632
uuaaacccugcagaguaag

SEQ ID NO: 911634 - RNA, 19 nt, Artificial Sequence
  Description of Artificial Sequence: Synthetic oligonucleotide
  Sense strand starting at position 86 of SEQ ID NO: 588709
gguggagaccucuaagcug

SEQ ID NO: 911635 - RNA, 19 nt, Artificial Sequence
  Description of Artificial Sequence: Synthetic oligonucleotide
  Antisense strand to SEQ ID NO: 911634
cagcuuagaggucuccacc

SEQ ID NO: 911636 - RNA, 19 nt, Artificial Sequence
  Description of Artificial Sequence: Synthetic oligonucleotide
  Sense strand starting at position 89 of SEQ ID NO: 588709
ggagaccucuaagcugaaa

SEQ ID NO: 911637 - RNA, 19 nt, Artificial Sequence
  Description of Artificial Sequence: Synthetic oligonucleotide
  Antisense strand to SEQ ID NO: 911636
uuucagcuuagaggucucc

SEQ ID NO: 911638 - RNA, 19 nt, Artificial Sequence
  Description of Artificial Sequence: Synthetic oligonucleotide
  Sense strand starting at position 102 of SEQ ID NO: 588709
cugaaaucuaaaggguagu

SEQ ID NO: 911639 - RNA, 19 nt, Artificial Sequence
  Description of Artificial Sequence: Synthetic oligonucleotide
  Antisense strand to SEQ ID NO: 911638
acuacccuuuagauuucag

SEQ ID NO: 911640 - RNA, 19 nt, Artificial Sequence
  Description of Artificial Sequence: Synthetic oligonucleotide
  Sense strand starting at position 253 of SEQ ID NO: 588709
ggaggucaugcugaguauu

SEQ ID NO: 911641 - RNA, 19 nt, Artificial Sequence
  Description of Artificial Sequence: Synthetic oligonucleotide
  Antisense strand to SEQ ID NO: 911640
aauacucagcaugaccucc

SEQ ID NO: 911642 - RNA, 19 nt, Artificial Sequence
  Description of Artificial Sequence: Synthetic oligonucleotide
  Sense strand starting at position 302 of SEQ ID NO: 588709
ugaggucaguuugugauuu

SEQ ID NO: 911643 - RNA, 19 nt, Artificial Sequence
  Description of Artificial Sequence: Synthetic oligonucleotide
  Antisense strand to SEQ ID NO: 911642
aaaucacaaacugaccuca

SEQ ID NO: 911644 - RNA, 19 nt, Artificial Sequence
  Description of Artificial Sequence: Synthetic oligonucleotide
  Sense strand starting at position 303 of SEQ ID NO: 588709
gaggucaguuugugauuua

SEQ ID NO: 911645 - RNA, 19 nt, Artificial Sequence
  Description of Artificial Sequence: Synthetic oligonucleotide
  Antisense strand to SEQ ID NO: 911644
uaaaucacaaacugaccuc

SEQ ID NO: 911646 - RNA, 19 nt, Artificial Sequence
  Description of Artificial Sequence: Synthetic oligonucleotide
  Sense strand starting at position 304 of SEQ ID NO: 588709
aggucaguuugugauuuag

SEQ ID NO: 911647 - RNA, 19 nt, Artificial Sequence
  Description of Artificial Sequence: Synthetic oligonucleotide
  Antisense strand to SEQ ID NO: 911646
cuaaaucacaaacugaccu

SEQ ID NO: 911648 - RNA, 19 nt, Artificial Sequence
  Description of Artificial Sequence: Synthetic oligonucleotide
  Sense strand starting at position 321 of SEQ ID NO: 588709
agagaacucccucgagucu

SEQ ID NO: 911649 - RNA, 19 nt, Artificial Sequence
  Description of Artificial Sequence: Synthetic oligonucleotide
  Antisense strand to SEQ ID NO: 911648
agacucgagggaguucucu

SEQ ID NO: 911650 - RNA, 19 nt, Artificial Sequence
  Description of Artificial Sequence: Synthetic oligonucleotide
  Sense strand starting at position 373 of SEQ ID NO: 588709
ccggauguggucuguggaa

SEQ ID NO: 911651 - RNA, 19 nt, Artificial Sequence
  Description of Artificial Sequence: Synthetic oligonucleotide
  Antisense strand to SEQ ID NO: 911650
uuccacagaccacauccgg

SEQ ID NO: 911652 - RNA, 19 nt, Artificial Sequence
  Description of Artificial Sequence: Synthetic oligonucleotide
  Sense strand starting at position 374 of SEQ ID NO: 588709
cggauguggucuguggaau

SEQ ID NO: 911653 - RNA, 19 nt, Artificial Sequence
  Description of Artificial Sequence: Synthetic oligonucleotide
  Antisense strand to SEQ ID NO: 911652
auuccacagaccacauccg

SEQ ID NO: 911654 - RNA, 19 nt, Artificial Sequence
  Description of Artificial Sequence: Synthetic oligonucleotide
  Sense strand starting at position 375 of SEQ ID NO: 588709
ggauguggucuguggaaug

SEQ ID NO: 911655 - RNA, 19 nt, Artificial Sequence
  Description of Artificial Sequence: Synthetic oligonucleotide
  Antisense strand to SEQ ID NO: 911654
cauuccacagaccacaucc

SEQ ID NO: 911656 - RNA, 19 nt, Artificial Sequence
  Description of Artificial Sequence: Synthetic oligonucleotide
  Sense strand starting at position 860 of SEQ ID NO: 588709
uggagauucgugggacaga

SEQ ID NO: 911657 - RNA, 19 nt, Artificial Sequence
  Description of Artificial Sequence: Synthetic oligonucleotide
  Antisense strand to SEQ ID NO: 911656
ucugucccacgaaucucca

SEQ ID NO: 911658 - RNA, 19 nt, Artificial Sequence
  Description of Artificial Sequence: Synthetic oligonucleotide
  Sense strand starting at position 861 of SEQ ID NO: 588709
ggagauucgugggacagau

SEQ ID NO: 911659 - RNA, 19 nt, Artificial Sequence
  Description of Artificial Sequence: Synthetic oligonucleotide
  Antisense strand to SEQ ID NO: 911658
aucugucccacgaaucucc

SEQ ID NO: 911660 - RNA, 19 nt, Artificial Sequence
  Description of Artificial Sequence: Synthetic oligonucleotide
  Sense strand starting at position 949 of SEQ ID NO: 588709
cacgucaucccaugcaguu

SEQ ID NO: 911661 - RNA, 19 nt, Artificial Sequence
  Description of Artificial Sequence: Synthetic oligonucleotide
  Antisense strand to SEQ ID NO: 911660
aacugcaugggaugacgug

SEQ ID NO: 911662 - RNA, 19 nt, Artificial Sequence
  Description of Artificial Sequence: Synthetic oligonucleotide
  Sense strand starting at position 1044 of SEQ ID NO: 588709
ggaggugacugcucugcau

SEQ ID NO: 911663 - RNA, 19 nt, Artificial Sequence
  Description of Artificial Sequence: Synthetic oligonucleotide
  Antisense strand to SEQ ID NO: 911662
augcagagcagucaccucc

SEQ ID NO: 911664 - RNA, 19 nt, Artificial Sequence
  Description of Artificial Sequence: Synthetic oligonucleotide
  Sense strand starting at position 1162 of SEQ ID NO: 588709
uccacuacuugugagacuu

SEQ ID NO: 911665 - RNA, 19 nt, Artificial Sequence
  Description of Artificial Sequence: Synthetic oligonucleotide
  Antisense strand to SEQ ID NO: 911664
aagucucacaaguagugga

SEQ ID NO: 911666 - RNA, 19 nt, Artificial Sequence
  Description of Artificial Sequence: Synthetic oligonucleotide
  Sense strand starting at position 1278 of SEQ ID NO: 588709
cgaauagagcaaugguuau

SEQ ID NO: 911667 - RNA, 19 nt, Artificial Sequence
  Description of Artificial Sequence: Synthetic oligonucleotide
  Antisense strand to SEQ ID NO: 911666
auaaccauugcucuauucg

SEQ ID NO: 911668 - RNA, 19 nt, Artificial Sequence
  Description of Artificial Sequence: Synthetic oligonucleotide
  Sense strand starting at position 1282 of SEQ ID NO: 588709
uagagcaaugguuaugauu

SEQ ID NO: 911669 - RNA, 19 nt, Artificial Sequence
  Description of Artificial Sequence: Synthetic oligonucleotide
  Antisense strand to SEQ ID NO: 911668
aaucauaaccauugcucua

SEQ ID NO: 911670 - RNA, 19 nt, Artificial Sequence
  Description of Artificial Sequence: Synthetic oligonucleotide
  Sense strand starting at position 1288 of SEQ ID NO: 588709
aaugguuaugauuaucagu

SEQ ID NO: 911671 - RNA, 19 nt, Artificial Sequence
  Description of Artificial Sequence: Synthetic oligonucleotide
  Antisense strand to SEQ ID NO: 911670
acugauaaucauaaccauu

SEQ ID NO: 911672 - RNA, 19 nt, Artificial Sequence
  Description of Artificial Sequence: Synthetic oligonucleotide
  Sense strand starting at position 1290 of SEQ ID NO: 588709
ugguuaugauuaucaguag

SEQ ID NO: 911673 - RNA, 19 nt, Artificial Sequence
  Description of Artificial Sequence: Synthetic oligonucleotide
  Antisense strand to SEQ ID NO: 911672
cuacugauaaucauaacca

SEQ ID NO: 911674 - RNA, 19 nt, Artificial Sequence
  Description of Artificial Sequence: Synthetic oligonucleotide
  Sense strand starting at position 1291 of SEQ ID NO: 588709
gguuaugauuaucaguaga

SEQ ID NO: 911675 - RNA, 19 nt, Artificial Sequence
  Description of Artificial Sequence: Synthetic oligonucleotide
  Antisense strand to SEQ ID NO: 911674
ucuacugauaaucauaacc

SEQ ID NO: 911676 - RNA, 19 nt, Artificial Sequence
  Description of Artificial Sequence: Synthetic oligonucleotide
  Sense strand starting at position 1327 of SEQ ID NO: 588709
agucaaaccuggccuuaga

SEQ ID NO: 911677 - RNA, 19 nt, Artificial Sequence
  Description of Artificial Sequence: Synthetic oligonucleotide
  Antisense strand to SEQ ID NO: 911676
ucuaaggccagguuugacu

SEQ ID NO: 911678 - RNA, 19 nt, Artificial Sequence
  Description of Artificial Sequence: Synthetic oligonucleotide
  Sense strand starting at position 1490 of SEQ ID NO: 588709
acgggagcccuugauagua

SEQ ID NO: 911679 - RNA, 19 nt, Artificial Sequence
  Description of Artificial Sequence: Synthetic oligonucleotide
  Antisense strand to SEQ ID NO: 911678
uacuaucaagggcucccgu

SEQ ID NO: 911680 - RNA, 19 nt, Artificial Sequence
  Description of Artificial Sequence: Synthetic oligonucleotide
  Sense strand starting at position 1502 of SEQ ID NO: 588709
gauaguaggagcugugaug

SEQ ID NO: 911681 - RNA, 19 nt, Artificial Sequence
  Description of Artificial Sequence: Synthetic oligonucleotide
  Antisense strand to SEQ ID NO: 911680
caucacagcuccuacuauc

SEQ ID NO: 911682 - RNA, 19 nt, Artificial Sequence
  Description of Artificial Sequence: Synthetic oligonucleotide
  Sense strand starting at position 1511 of SEQ ID NO: 588709
agcugugaugccggugauu

SEQ ID NO: 911683 - RNA, 19 nt, Artificial Sequence
  Description of Artificial Sequence: Synthetic oligonucleotide
  Antisense strand to SEQ ID NO: 911682
aaucaccggcaucacagcu

SEQ ID NO: 911684 - RNA, 19 nt, Artificial Sequence
  Description of Artificial Sequence: Synthetic oligonucleotide
  Sense strand starting at position 1513 of SEQ ID NO: 588709
cugugaugccggugauuca

SEQ ID NO: 911685 - RNA, 19 nt, Artificial Sequence
  Description of Artificial Sequence: Synthetic oligonucleotide
  Antisense strand to SEQ ID NO: 911684
ugaaucaccggcaucacag

SEQ ID NO: 911686 - RNA, 19 nt, Artificial Sequence
  Description of Artificial Sequence: Synthetic oligonucleotide
  Sense strand starting at position 1520 of SEQ ID NO: 588709
gccggugauucagucacau

SEQ ID NO: 911687 - RNA, 19 nt, Artificial Sequence
  Description of Artificial Sequence: Synthetic oligonucleotide
  Antisense strand to SEQ ID NO: 911686
augugacugaaucaccggc

SEQ ID NO: 911688 - RNA, 19 nt, Artificial Sequence
  Description of Artificial Sequence: Synthetic oligonucleotide
  Sense strand starting at position 1653 of SEQ ID NO: 588709
augagagcuugaccuccua

SEQ ID NO: 911689 - RNA, 19 nt, Artificial Sequence
  Description of Artificial Sequence: Synthetic oligonucleotide
  Antisense strand to SEQ ID NO: 911688
uaggaggucaagcucucau

SEQ ID NO: 911690 - RNA, 19 nt, Artificial Sequence
  Description of Artificial Sequence: Synthetic oligonucleotide
  Sense strand starting at position 1669 of SEQ ID NO: 588709
cuaacagcucccugaagga

SEQ ID NO: 911691 - RNA, 19 nt, Artificial Sequence
  Description of Artificial Sequence: Synthetic oligonucleotide
  Antisense strand to SEQ ID NO: 911690
uccuucagggagcuguuag

SEQ ID NO: 911692 - RNA, 19 nt, Artificial Sequence
  Description of Artificial Sequence: Synthetic oligonucleotide
  Sense strand starting at position 1730 of SEQ ID NO: 588709
ggaaguguugagggauauc

SEQ ID NO: 911693 - RNA, 19 nt, Artificial Sequence
  Description of Artificial Sequence: Synthetic oligonucleotide
  Antisense strand to SEQ ID NO: 911692
gauaucccucaacacuucc

SEQ ID NO: 911694 - RNA, 19 nt, Artificial Sequence
  Description of Artificial Sequence: Synthetic oligonucleotide
  Sense strand starting at position 2249 of SEQ ID NO: 588709
ggaggcgaguaaccuaaau

SEQ ID NO: 911695 - RNA, 19 nt, Artificial Sequence
  Description of Artificial Sequence: Synthetic oligonucleotide
  Antisense strand to SEQ ID NO: 911694
auuuagguuacucgccucc

SEQ ID NO: 911696 - RNA, 19 nt, Artificial Sequence
  Description of Artificial Sequence: Synthetic oligonucleotide
  Sense strand starting at position 2279 of SEQ ID NO: 588709
cacccauuccggcgugaaa

SEQ ID NO: 911697 - RNA, 19 nt, Artificial Sequence
  Description of Artificial Sequence: Synthetic oligonucleotide
  Antisense strand to SEQ ID NO: 911696
uuucacgccggaaugggug

SEQ ID NO: 911698 - RNA, 19 nt, Artificial Sequence
  Description of Artificial Sequence: Synthetic oligonucleotide
  Sense strand starting at position 2281 of SEQ ID NO: 588709
cccauuccggcgugaaauc

SEQ ID NO: 911699 - RNA, 19 nt, Artificial Sequence
  Description of Artificial Sequence: Synthetic oligonucleotide
  Antisense strand to SEQ ID NO: 911698
gauuucacgccggaauggg

SEQ ID NO: 911700 - RNA, 19 nt, Artificial Sequence
  Description of Artificial Sequence: Synthetic oligonucleotide
  Sense strand starting at position 2446 of SEQ ID NO: 588709
gggauuuaguggugagcga

SEQ ID NO: 911701 - RNA, 19 nt, Artificial Sequence
  Description of Artificial Sequence: Synthetic oligonucleotide
  Antisense strand to SEQ ID NO: 911700
ucgcucaccacuaaauccc

SEQ ID NO: 911702 - RNA, 19 nt, Artificial Sequence
  Description of Artificial Sequence: Synthetic oligonucleotide
  Sense strand starting at position 2831 of SEQ ID NO: 588709
gucagagacugucuuguuu

SEQ ID NO: 911703 - RNA, 19 nt, Artificial Sequence
  Description of Artificial Sequence: Synthetic oligonucleotide
  Antisense strand to SEQ ID NO: 911702
aaacaagacagucucugac

SEQ ID NO: 911704 - RNA, 19 nt, Artificial Sequence
  Description of Artificial Sequence: Synthetic oligonucleotide
  Sense strand starting at position 2835 of SEQ ID NO: 588709
gagacugucuuguuuauug

SEQ ID NO: 911705 - RNA, 19 nt, Artificial Sequence
  Description of Artificial Sequence: Synthetic oligonucleotide
  Antisense strand to SEQ ID NO: 911704
caauaaacaagacagucuc

SEQ ID NO: 911706 - RNA, 19 nt, Artificial Sequence
  Description of Artificial Sequence: Synthetic oligonucleotide
  Sense strand starting at position 2837 of SEQ ID NO: 588709
gacugucuuguuuauuguu

SEQ ID NO: 911707 - RNA, 19 nt, Artificial Sequence
  Description of Artificial Sequence: Synthetic oligonucleotide
  Antisense strand to SEQ ID NO: 911706
aacaauaaacaagacaguc

SEQ ID NO: 911708 - RNA, 19 nt, Artificial Sequence
  Description of Artificial Sequence: Synthetic oligonucleotide
  Sense strand starting at position 2839 of SEQ ID NO: 588709
cugucuuguuuauuguuua

SEQ ID NO: 911709 - RNA, 19 nt, Artificial Sequence
  Description of Artificial Sequence: Synthetic oligonucleotide
  Antisense strand to SEQ ID NO: 911708
uaaacaauaaacaagacag

SEQ ID NO: 911710 - RNA, 19 nt, Artificial Sequence
  Description of Artificial Sequence: Synthetic oligonucleotide
  Sense strand starting at position 2945 of SEQ ID NO: 588709
cggaugagugucuauggga

SEQ ID NO: 911711 - RNA, 19 nt, Artificial Sequence
  Description of Artificial Sequence: Synthetic oligonucleotide
  Antisense strand to SEQ ID NO: 911710
ucccauagacacucauccg

SEQ ID NO: 911712 - RNA, 19 nt, Artificial Sequence
  Description of Artificial Sequence: Synthetic oligonucleotide
  Sense strand starting at position 3258 of SEQ ID NO: 588709
ggauuauaggcaggcguca

SEQ ID NO: 911713 - RNA, 19 nt, Artificial Sequence
  Description of Artificial Sequence: Synthetic oligonucleotide
  Antisense strand to SEQ ID NO: 911712
ugacgccugccuauaaucc

SEQ ID NO: 911714 - RNA, 19 nt, Artificial Sequence
  Description of Artificial Sequence: Synthetic oligonucleotide
  Sense strand starting at position 269 of SEQ ID NO: 588710
ggccgaaucugggcucuua

SEQ ID NO: 911715 - RNA, 19 nt, Artificial Sequence
  Description of Artificial Sequence: Synthetic oligonucleotide
  Antisense strand to SEQ ID NO: 911714
uaagagcccagauucggcc

SEQ ID NO: 911716 - RNA, 19 nt, Artificial Sequence
  Description of Artificial Sequence: Synthetic oligonucleotide
  Sense strand starting at position 310 of SEQ ID NO: 588710
gggacacccuucuaaacuu

SEQ ID NO: 911717 - RNA, 19 nt, Artificial Sequence
  Description of Artificial Sequence: Synthetic oligonucleotide
  Antisense strand to SEQ ID NO: 911716
aaguuuagaaggguguccc

SEQ ID NO: 911718 - RNA, 19 nt, Artificial Sequence
  Description of Artificial Sequence: Synthetic oligonucleotide
  Sense strand starting at position 384 of SEQ ID NO: 588710
auggucuugcccugaaagu

SEQ ID NO: 911719 - RNA, 19 nt, Artificial Sequence
  Description of Artificial Sequence: Synthetic oligonucleotide
  Antisense strand to SEQ ID NO: 911718
acuuucagggcaagaccau

SEQ ID NO: 911720 - RNA, 19 nt, Artificial Sequence
  Description of Artificial Sequence: Synthetic oligonucleotide
  Sense strand starting at position 385 of SEQ ID NO: 588710
uggucuugcccugaaaguu

SEQ ID NO: 911721 - RNA, 19 nt, Artificial Sequence
  Description of Artificial Sequence: Synthetic oligonucleotide
  Antisense strand to SEQ ID NO: 911720
aacuuucagggcaagacca

SEQ ID NO: 911722 - RNA, 19 nt, Artificial Sequence
  Description of Artificial Sequence: Synthetic oligonucleotide
  Sense strand starting at position 551 of SEQ ID NO: 588710
gcuuccagugacuacuuau

SEQ ID NO: 911723 - RNA, 19 nt, Artificial Sequence
  Description of Artificial Sequence: Synthetic oligonucleotide
  Antisense strand to SEQ ID NO: 911722
auaaguagucacuggaagc

SEQ ID NO: 911724 - RNA, 19 nt, Artificial Sequence
  Description of Artificial Sequence: Synthetic oligonucleotide
  Sense strand starting at position 561 of SEQ ID NO: 588710
acuacuuaugugcacugaa

SEQ ID NO: 911725 - RNA, 19 nt, Artificial Sequence
  Description of Artificial Sequence: Synthetic oligonucleotide
  Antisense strand to SEQ ID NO: 911724
uucagugcacauaaguagu

SEQ ID NO: 911726 - RNA, 19 nt, Artificial Sequence
  Description of Artificial Sequence: Synthetic oligonucleotide
  Sense strand starting at position 564 of SEQ ID NO: 588710
acuuaugugcacugaacua

SEQ ID NO: 911727 - RNA, 19 nt, Artificial Sequence
  Description of Artificial Sequence: Synthetic oligonucleotide
  Antisense strand to SEQ ID NO: 911726
uaguucagugcacauaagu

SEQ ID NO: 911728 - RNA, 19 nt, Artificial Sequence
  Description of Artificial Sequence: Synthetic oligonucleotide
  Sense strand starting at position 1081 of SEQ ID NO: 588710
ggccuauuauuguuucuga

SEQ ID NO: 911729 - RNA, 19 nt, Artificial Sequence
  Description of Artificial Sequence: Synthetic oligonucleotide
  Antisense strand to SEQ ID NO: 911728
ucagaaacaauaauaggcc

SEQ ID NO: 911730 - RNA, 19 nt, Artificial Sequence
  Description of Artificial Sequence: Synthetic oligonucleotide
  Sense strand starting at position 1084 of SEQ ID NO: 588710
cuauuauuguuucugaguu

SEQ ID NO: 911731 - RNA, 19 nt, Artificial Sequence
  Description of Artificial Sequence: Synthetic oligonucleotide
  Antisense strand to SEQ ID NO: 911730
aacucagaaacaauaauag

SEQ ID NO: 911732 - RNA, 19 nt, Artificial Sequence
  Description of Artificial Sequence: Synthetic oligonucleotide
  Sense strand starting at position 1088 of SEQ ID NO: 588710
uauuguuucugaguuaaag

SEQ ID NO: 911733 - RNA, 19 nt, Artificial Sequence
  Description of Artificial Sequence: Synthetic oligonucleotide
  Antisense strand to SEQ ID NO: 911732
cuuuaacucagaaacaaua

SEQ ID NO: 911734 - RNA, 19 nt, Artificial Sequence
  Description of Artificial Sequence: Synthetic oligonucleotide
  Sense strand starting at position 1390 of SEQ ID NO: 588710
cucgguuucucaucuagga

SEQ ID NO: 911735 - RNA, 19 nt, Artificial Sequence
  Description of Artificial Sequence: Synthetic oligonucleotide
  Antisense strand to SEQ ID NO: 911734
uccuagaugagaaaccgag

SEQ ID NO: 911736 - RNA, 19 nt, Artificial Sequence
  Description of Artificial Sequence: Synthetic oligonucleotide
  Sense strand starting at position 1392 of SEQ ID NO: 588710
cgguuucucaucuaggaag

SEQ ID NO: 911737 - RNA, 19 nt, Artificial Sequence
  Description of Artificial Sequence: Synthetic oligonucleotide
  Antisense strand to SEQ ID NO: 911736
cuuccuagaugagaaaccg

SEQ ID NO: 911738 - RNA, 19 nt, Artificial Sequence
  Description of Artificial Sequence: Synthetic oligonucleotide
  Sense strand starting at position 1394 of SEQ ID NO: 588710
guuucucaucuaggaagga

SEQ ID NO: 911739 - RNA, 19 nt, Artificial Sequence
  Description of Artificial Sequence: Synthetic oligonucleotide
  Antisense strand to SEQ ID NO: 911738
uccuuccuagaugagaaac

SEQ ID NO: 911740 - RNA, 19 nt, Artificial Sequence
  Description of Artificial Sequence: Synthetic oligonucleotide
  Sense strand starting at position 1431 of SEQ ID NO: 588710
agcguccuucugggaauua

SEQ ID NO: 911741 - RNA, 19 nt, Artificial Sequence
  Description of Artificial Sequence: Synthetic oligonucleotide
  Antisense strand to SEQ ID NO: 911740
uaauucccagaaggacgcu

SEQ ID NO: 911742 - RNA, 19 nt, Artificial Sequence
  Description of Artificial Sequence: Synthetic oligonucleotide
  Sense strand starting at position 1432 of SEQ ID NO: 588710
gcguccuucugggaauuaa

SEQ ID NO: 911743 - RNA, 19 nt, Artificial Sequence
  Description of Artificial Sequence: Synthetic oligonucleotide
  Antisense strand to SEQ ID NO: 911742
uuaauucccagaaggacgc

SEQ ID NO: 911744 - RNA, 19 nt, Artificial Sequence
  Description of Artificial Sequence: Synthetic oligonucleotide
  Sense strand starting at position 1487 of SEQ ID NO: 588710
cacugagugcuccagagau

SEQ ID NO: 911745 - RNA, 19 nt, Artificial Sequence
  Description of Artificial Sequence: Synthetic oligonucleotide
  Antisense strand to SEQ ID NO: 911744
aucucuggagcacucagug

SEQ ID NO: 911746 - RNA, 19 nt, Artificial Sequence
  Description of Artificial Sequence: Synthetic oligonucleotide
  Sense strand starting at position 1614 of SEQ ID NO: 588710
cgcgaguuucggcugggau

SEQ ID NO: 911747 - RNA, 19 nt, Artificial Sequence
  Description of Artificial Sequence: Synthetic oligonucleotide
  Antisense strand to SEQ ID NO: 911746
aucccagccgaaacucgcg

SEQ ID NO: 911748 - RNA, 19 nt, Artificial Sequence
  Description of Artificial Sequence: Synthetic oligonucleotide
  Sense strand starting at position 1615 of SEQ ID NO: 588710
gcgaguuucggcugggaug

SEQ ID NO: 911749 - RNA, 19 nt, Artificial Sequence
  Description of Artificial Sequence: Synthetic oligonucleotide
  Antisense strand to SEQ ID NO: 911748
caucccagccgaaacucgc

SEQ ID NO: 911750 - RNA, 19 nt, Artificial Sequence
  Description of Artificial Sequence: Synthetic oligonucleotide
  Sense strand starting at position 1654 of SEQ ID NO: 588710
ccacucaccucucggagau

SEQ ID NO: 911751 - RNA, 19 nt, Artificial Sequence
  Description of Artificial Sequence: Synthetic oligonucleotide
  Antisense strand to SEQ ID NO: 911750
aucuccgagaggugagugg

SEQ ID NO: 911752 - RNA, 19 nt, Artificial Sequence
  Description of Artificial Sequence: Synthetic oligonucleotide
  Sense strand starting at position 1696 of SEQ ID NO: 588710
ucugcaugacgaugaagua

SEQ ID NO: 911753 - RNA, 19 nt, Artificial Sequence
  Description of Artificial Sequence: Synthetic oligonucleotide
  Antisense strand to SEQ ID NO: 911752
uacuucaucgucaugcaga

SEQ ID NO: 911754 - RNA, 19 nt, Artificial Sequence
  Description of Artificial Sequence: Synthetic oligonucleotide
  Sense strand starting at position 2100 of SEQ ID NO: 588710
ccagguauaugaugaccua

SEQ ID NO: 911755 - RNA, 19 nt, Artificial Sequence
  Description of Artificial Sequence: Synthetic oligonucleotide
  Antisense strand to SEQ ID NO: 911754
uaggucaucauauaccugg

SEQ ID NO: 911756 - RNA, 19 nt, Artificial Sequence
  Description of Artificial Sequence: Synthetic oligonucleotide
  Sense strand starting at position 2507 of SEQ ID NO: 588710
ugggaauucugcccuccca

SEQ ID NO: 911757 - RNA, 19 nt, Artificial Sequence
  Description of Artificial Sequence: Synthetic oligonucleotide
  Antisense strand to SEQ ID NO: 911756
ugggagggcagaauuccca

SEQ ID NO: 911758 - RNA, 19 nt, Artificial Sequence
  Description of Artificial Sequence: Synthetic oligonucleotide
  Sense strand starting at position 2780 of SEQ ID NO: 588710
ugcaguugguccugggaca

SEQ ID NO: 911759 - RNA, 19 nt, Artificial Sequence
  Description of Artificial Sequence: Synthetic oligonucleotide
  Antisense strand to SEQ ID NO: 911758
ugucccaggaccaacugca

SEQ ID NO: 911760 - RNA, 19 nt, Artificial Sequence
  Description of Artificial Sequence: Synthetic oligonucleotide
  Sense strand starting at position 2832 of SEQ ID NO: 588710
gcucaagucucagggacaa

SEQ ID NO: 911761 - RNA, 19 nt, Artificial Sequence
  Description of Artificial Sequence: Synthetic oligonucleotide
  Antisense strand to SEQ ID NO: 911760
uugucccugagacuugagc

SEQ ID NO: 911762 - RNA, 19 nt, Artificial Sequence
  Description of Artificial Sequence: Synthetic oligonucleotide
  Sense strand starting at position 2943 of SEQ ID NO: 588710
ucgugaaccuggguuagga

SEQ ID NO: 911763 - RNA, 19 nt, Artificial Sequence
  Description of Artificial Sequence: Synthetic oligonucleotide
  Antisense strand to SEQ ID NO: 911762
uccuaacccagguucacga

SEQ ID NO: 911764 - RNA, 19 nt, Artificial Sequence
  Description of Artificial Sequence: Synthetic oligonucleotide
  Sense strand starting at position 3139 of SEQ ID NO: 588710
cugaguugggcagaugcau

SEQ ID NO: 911765 - RNA, 19 nt, Artificial Sequence
  Description of Artificial Sequence: Synthetic oligonucleotide
  Antisense strand to SEQ ID NO: 911764
augcaucugcccaacucag

SEQ ID NO: 911766 - RNA, 19 nt, Artificial Sequence
  Description of Artificial Sequence: Synthetic oligonucleotide
  Sense strand starting at position 3199 of SEQ ID NO: 588710
cggcaaggccugaguguau

SEQ ID NO: 911767 - RNA, 19 nt, Artificial Sequence
  Description of Artificial Sequence: Synthetic oligonucleotide
  Antisense strand to SEQ ID NO: 911766
auacacucaggccuugccg

SEQ ID NO: 911768 - RNA, 19 nt, Artificial Sequence
  Description of Artificial Sequence: Synthetic oligonucleotide
  Sense strand starting at position 3298 of SEQ ID NO: 588710
gccagauucuguccaguac

SEQ ID NO: 911769 - RNA, 19 nt, Artificial Sequence
  Description of Artificial Sequence: Synthetic oligonucleotide
  Antisense strand to SEQ ID NO: 911768
guacuggacagaaucuggc

SEQ ID NO: 911770 - RNA, 19 nt, Artificial Sequence
  Description of Artificial Sequence: Synthetic oligonucleotide
  Sense strand starting at position 3299 of SEQ ID NO: 588710
ccagauucuguccaguaca

SEQ ID NO: 911771 - RNA, 19 nt, Artificial Sequence
  Description of Artificial Sequence: Synthetic oligonucleotide
  Antisense strand to SEQ ID NO: 911770
uguacuggacagaaucugg

SEQ ID NO: 911772 - RNA, 19 nt, Artificial Sequence
  Description of Artificial Sequence: Synthetic oligonucleotide
  Sense strand starting at position 3392 of SEQ ID NO: 588710
gguggagaccucuaagcug

SEQ ID NO: 911773 - RNA, 19 nt, Artificial Sequence
  Description of Artificial Sequence: Synthetic oligonucleotide
  Antisense strand to SEQ ID NO: 911772
cagcuuagaggucuccacc

SEQ ID NO: 911774 - RNA, 19 nt, Artificial Sequence
  Description of Artificial Sequence: Synthetic oligonucleotide
  Sense strand starting at position 3395 of SEQ ID NO: 588710
ggagaccucuaagcugaaa

SEQ ID NO: 911775 - RNA, 19 nt, Artificial Sequence
  Description of Artificial Sequence: Synthetic oligonucleotide
  Antisense strand to SEQ ID NO: 911774
uuucagcuuagaggucucc

SEQ ID NO: 911776 - RNA, 19 nt, Artificial Sequence
  Description of Artificial Sequence: Synthetic oligonucleotide
  Sense strand starting at position 3408 of SEQ ID NO: 588710
cugaaaucuaaaggguagu

SEQ ID NO: 911777 - RNA, 19 nt, Artificial Sequence
  Description of Artificial Sequence: Synthetic oligonucleotide
  Antisense strand to SEQ ID NO: 911776
acuacccuuuagauuucag

SEQ ID NO: 911778 - RNA, 19 nt, Artificial Sequence
  Description of Artificial Sequence: Synthetic oligonucleotide
  Sense strand starting at position 3559 of SEQ ID NO: 588710
ggaggucaugcugaguauu

SEQ ID NO: 911779 - RNA, 19 nt, Artificial Sequence
  Description of Artificial Sequence: Synthetic oligonucleotide
  Antisense strand to SEQ ID NO: 911778
aauacucagcaugaccucc

SEQ ID NO: 911780 - RNA, 19 nt, Artificial Sequence
  Description of Artificial Sequence: Synthetic oligonucleotide
  Sense strand starting at position 3608 of SEQ ID NO: 588710
ugaggucaguuugugauuu

SEQ ID NO: 911781 - RNA, 19 nt, Artificial Sequence
  Description of Artificial Sequence: Synthetic oligonucleotide
  Antisense strand to SEQ ID NO: 911780
aaaucacaaacugaccuca

SEQ ID NO: 911782 - RNA, 19 nt, Artificial Sequence
  Description of Artificial Sequence: Synthetic oligonucleotide
  Sense strand starting at position 3609 of SEQ ID NO: 588710
gaggucaguuugugauuua

SEQ ID NO: 911783 - RNA, 19 nt, Artificial Sequence
  Description of Artificial Sequence: Synthetic oligonucleotide
  Antisense strand to SEQ ID NO: 911782
uaaaucacaaacugaccuc

SEQ ID NO: 911784 - RNA, 19 nt, Artificial Sequence
  Description of Artificial Sequence: Synthetic oligonucleotide
  Sense strand starting at position 3610 of SEQ ID NO: 588710
aggucaguuugugauuuag

SEQ ID NO: 911785 - RNA, 19 nt, Artificial Sequence
  Description of Artificial Sequence: Synthetic oligonucleotide
  Antisense strand to SEQ ID NO: 911784
cuaaaucacaaacugaccu

SEQ ID NO: 911786 - RNA, 19 nt, Artificial Sequence
  Description of Artificial Sequence: Synthetic oligonucleotide
  Sense strand starting at position 3627 of SEQ ID NO: 588710
agagaacucccucgagucu

SEQ ID NO: 911787 - RNA, 19 nt, Artificial Sequence
  Description of Artificial Sequence: Synthetic oligonucleotide
  Antisense strand to SEQ ID NO: 911786
agacucgagggaguucucu

SEQ ID NO: 911788 - RNA, 19 nt, Artificial Sequence
  Description of Artificial Sequence: Synthetic oligonucleotide
  Sense strand starting at position 3679 of SEQ ID NO: 588710
ccggauguggucuguggaa

SEQ ID NO: 911789 - RNA, 19 nt, Artificial Sequence
  Description of Artificial Sequence: Synthetic oligonucleotide
  Antisense strand to SEQ ID NO: 911788
uuccacagaccacauccgg

SEQ ID NO: 911790 - RNA, 19 nt, Artificial Sequence
  Description of Artificial Sequence: Synthetic oligonucleotide
  Sense strand starting at position 3680 of SEQ ID NO: 588710
cggauguggucuguggaau

SEQ ID NO: 911791 - RNA, 19 nt, Artificial Sequence
  Description of Artificial Sequence: Synthetic oligonucleotide
  Antisense strand to SEQ ID NO: 911790
auuccacagaccacauccg

SEQ ID NO: 911792 - RNA, 19 nt, Artificial Sequence
  Description of Artificial Sequence: Synthetic oligonucleotide
  Sense strand starting at position 3681 of SEQ ID NO: 588710
ggauguggucuguggaaug

SEQ ID NO: 911793 - RNA, 19 nt, Artificial Sequence
  Description of Artificial Sequence: Synthetic oligonucleotide
  Antisense strand to SEQ ID NO: 911792
cauuccacagaccacaucc

SEQ ID NO: 911794 - RNA, 19 nt, Artificial Sequence
  Description of Artificial Sequence: Synthetic oligonucleotide
  Sense strand starting at position 85 of SEQ ID NO: 588766
gggccuuugugauuucuuu

SEQ ID NO: 911795 - RNA, 19 nt, Artificial Sequence
  Description of Artificial Sequence: Synthetic oligonucleotide
  Antisense strand to SEQ ID NO: 911794
aaagaaaucacaaaggccc

SEQ ID NO: 911796 - RNA, 19 nt, Artificial Sequence
  Description of Artificial Sequence: Synthetic oligonucleotide
  Sense strand starting at position 118 of SEQ ID NO: 588766
gcauaagaagugugaugaa

SEQ ID NO: 911797 - RNA, 19 nt, Artificial Sequence
  Description of Artificial Sequence: Synthetic oligonucleotide
  Antisense strand to SEQ ID NO: 911796
uucaucacacuucuuaugc

SEQ ID NO: 911798 - RNA, 19 nt, Artificial Sequence
  Description of Artificial Sequence: Synthetic oligonucleotide
  Sense strand starting at position 280 of SEQ ID NO: 588766
ggcaucacuccucaguaga

SEQ ID NO: 911799 - RNA, 19 nt, Artificial Sequence
  Description of Artificial Sequence: Synthetic oligonucleotide
  Antisense strand to SEQ ID NO: 911798
ucuacugaggagugaugcc

SEQ ID NO: 911800 - RNA, 19 nt, Artificial Sequence
  Description of Artificial Sequence: Synthetic oligonucleotide
  Sense strand starting at position 547 of SEQ ID NO: 588766
ugacauaaauggcuuuaaa

SEQ ID NO: 911801 - RNA, 19 nt, Artificial Sequence
  Description of Artificial Sequence: Synthetic oligonucleotide
  Antisense strand to SEQ ID NO: 911800
uuuaaagccauuuauguca

SEQ ID NO: 911802 - RNA, 19 nt, Artificial Sequence
  Description of Artificial Sequence: Synthetic oligonucleotide
  Sense strand starting at position 601 of SEQ ID NO: 588766
guuaauuauuugcuggcau

SEQ ID NO: 911803 - RNA, 19 nt, Artificial Sequence
  Description of Artificial Sequence: Synthetic oligonucleotide
  Antisense strand to SEQ ID NO: 911802
augccagcaaauaauuaac

SEQ ID NO: 911804 - RNA, 19 nt, Artificial Sequence
  Description of Artificial Sequence: Synthetic oligonucleotide
  Sense strand starting at position 615 of SEQ ID NO: 588766
ggcauuagacucgaaauuc

SEQ ID NO: 911805 - RNA, 19 nt, Artificial Sequence
  Description of Artificial Sequence: Synthetic oligonucleotide
  Antisense strand to SEQ ID NO: 911804
gaauuucgagucuaaugcc

SEQ ID NO: 911806 - RNA, 19 nt, Artificial Sequence
  Description of Artificial Sequence: Synthetic oligonucleotide
  Sense strand starting at position 872 of SEQ ID NO: 588766
acaggauacuugucuugga

SEQ ID NO: 911807 - RNA, 19 nt, Artificial Sequence
  Description of Artificial Sequence: Synthetic oligonucleotide
  Antisense strand to SEQ ID NO: 911806
uccaagacaaguauccugu

SEQ ID NO: 911808 - RNA, 19 nt, Artificial Sequence
  Description of Artificial Sequence: Synthetic oligonucleotide
  Sense strand starting at position 873 of SEQ ID NO: 588766
caggauacuugucuuggaa

SEQ ID NO: 911809 - RNA, 19 nt, Artificial Sequence
  Description of Artificial Sequence: Synthetic oligonucleotide
  Antisense strand to SEQ ID NO: 911808
uuccaagacaaguauccug

SEQ ID NO: 911810 - RNA, 19 nt, Artificial Sequence
  Description of Artificial Sequence: Synthetic oligonucleotide
  Sense strand starting at position 876 of SEQ ID NO: 588766
gauacuugucuuggaaaca

SEQ ID NO: 911811 - RNA, 19 nt, Artificial Sequence
  Description of Artificial Sequence: Synthetic oligonucleotide
  Antisense strand to SEQ ID NO: 911810
uguuuccaagacaaguauc

SEQ ID NO: 911812 - RNA, 19 nt, Artificial Sequence
  Description of Artificial Sequence: Synthetic oligonucleotide
  Sense strand starting at position 939 of SEQ ID NO: 588766
aaauguuaaugacugcaga

SEQ ID NO: 911813 - RNA, 19 nt, Artificial Sequence
  Description of Artificial Sequence: Synthetic oligonucleotide
  Antisense strand to SEQ ID NO: 911812
ucugcagucauuaacauuu

SEQ ID NO: 911814 - RNA, 19 nt, Artificial Sequence
  Description of Artificial Sequence: Synthetic oligonucleotide
  Sense strand starting at position 940 of SEQ ID NO: 588766
aauguuaaugacugcagau

SEQ ID NO: 911815 - RNA, 19 nt, Artificial Sequence
  Description of Artificial Sequence: Synthetic oligonucleotide
  Antisense strand to SEQ ID NO: 911814
aucugcagucauuaacauu

SEQ ID NO: 911816 - RNA, 19 nt, Artificial Sequence
  Description of Artificial Sequence: Synthetic oligonucleotide
  Sense strand starting at position 942 of SEQ ID NO: 588766
uguuaaugacugcagaugu

SEQ ID NO: 911817 - RNA, 19 nt, Artificial Sequence
  Description of Artificial Sequence: Synthetic oligonucleotide
  Antisense strand to SEQ ID NO: 911816
acaucugcagucauuaaca

SEQ ID NO: 911818 - RNA, 19 nt, Artificial Sequence
  Description of Artificial Sequence: Synthetic oligonucleotide
  Sense strand starting at position 969 of SEQ ID NO: 588766
uuacucauacuaggugauu

SEQ ID NO: 911819 - RNA, 19 nt, Artificial Sequence
  Description of Artificial Sequence: Synthetic oligonucleotide
  Antisense strand to SEQ ID NO: 911818
aaucaccuaguaugaguaa

SEQ ID NO: 911820 - RNA, 19 nt, Artificial Sequence
  Description of Artificial Sequence: Synthetic oligonucleotide
  Sense strand starting at position 1247 of SEQ ID NO: 588766
gugucucuaguccacagaa

SEQ ID NO: 911821 - RNA, 19 nt, Artificial Sequence
  Description of Artificial Sequence: Synthetic oligonucleotide
  Antisense strand to SEQ ID NO: 911820
uucuguggacuagagacac

SEQ ID NO: 911822 - RNA, 19 nt, Artificial Sequence
  Description of Artificial Sequence: Synthetic oligonucleotide
  Sense strand starting at position 1249 of SEQ ID NO: 588766
gucucuaguccacagaauu

SEQ ID NO: 911823 - RNA, 19 nt, Artificial Sequence
  Description of Artificial Sequence: Synthetic oligonucleotide
  Antisense strand to SEQ ID NO: 911822
aauucuguggacuagagac

SEQ ID NO: 911824 - RNA, 19 nt, Artificial Sequence
  Description of Artificial Sequence: Synthetic oligonucleotide
  Sense strand starting at position 1307 of SEQ ID NO: 588766
gucaguucugcuugauuug

SEQ ID NO: 911825 - RNA, 19 nt, Artificial Sequence
  Description of Artificial Sequence: Synthetic oligonucleotide
  Antisense strand to SEQ ID NO: 911824
caaaucaagcagaacugac

SEQ ID NO: 911826 - RNA, 19 nt, Artificial Sequence
  Description of Artificial Sequence: Synthetic oligonucleotide
  Sense strand starting at position 1608 of SEQ ID NO: 588766
agcaguuagaugcacaaga

SEQ ID NO: 911827 - RNA, 19 nt, Artificial Sequence
  Description of Artificial Sequence: Synthetic oligonucleotide
  Antisense strand to SEQ ID NO: 911826
ucuugugcaucuaacugcu

SEQ ID NO: 911828 - RNA, 19 nt, Artificial Sequence
  Description of Artificial Sequence: Synthetic oligonucleotide
  Sense strand starting at position 1704 of SEQ ID NO: 588766
ggaggaucccgcagugucu

SEQ ID NO: 911829 - RNA, 19 nt, Artificial Sequence
  Description of Artificial Sequence: Synthetic oligonucleotide
  Antisense strand to SEQ ID NO: 911828
agacacugcgggauccucc

SEQ ID NO: 911830 - RNA, 19 nt, Artificial Sequence
  Description of Artificial Sequence: Synthetic oligonucleotide
  Sense strand starting at position 1724 of SEQ ID NO: 588766
aggauuuacuuccaaagga

SEQ ID NO: 911831 - RNA, 19 nt, Artificial Sequence
  Description of Artificial Sequence: Synthetic oligonucleotide
  Antisense strand to SEQ ID NO: 911830
uccuuuggaaguaaauccu

SEQ ID NO: 911832 - RNA, 19 nt, Artificial Sequence
  Description of Artificial Sequence: Synthetic oligonucleotide
  Sense strand starting at position 1819 of SEQ ID NO: 588766
gggagaauggcuuacucuc

SEQ ID NO: 911833 - RNA, 19 nt, Artificial Sequence
  Description of Artificial Sequence: Synthetic oligonucleotide
  Antisense strand to SEQ ID NO: 911832
gagaguaagccauucuccc

SEQ ID NO: 911834 - RNA, 19 nt, Artificial Sequence
  Description of Artificial Sequence: Synthetic oligonucleotide
  Sense strand starting at position 2159 of SEQ ID NO: 588766
aggaaauaacuugguuugu

SEQ ID NO: 911835 - RNA, 19 nt, Artificial Sequence
  Description of Artificial Sequence: Synthetic oligonucleotide
  Antisense strand to SEQ ID NO: 911834
acaaaccaaguuauuuccu

SEQ ID NO: 911836 - RNA, 19 nt, Artificial Sequence
  Description of Artificial Sequence: Synthetic oligonucleotide
  Sense strand starting at position 2160 of SEQ ID NO: 588766
ggaaauaacuugguuugua

SEQ ID NO: 911837 - RNA, 19 nt, Artificial Sequence
  Description of Artificial Sequence: Synthetic oligonucleotide
  Antisense strand to SEQ ID NO: 911836
uacaaaccaaguuauuucc

SEQ ID NO: 911838 - RNA, 19 nt, Artificial Sequence
  Description of Artificial Sequence: Synthetic oligonucleotide
  Sense strand starting at position 2161 of SEQ ID NO: 588766
gaaauaacuugguuuguaa

SEQ ID NO: 911839 - RNA, 19 nt, Artificial Sequence
  Description of Artificial Sequence: Synthetic oligonucleotide
  Antisense strand to SEQ ID NO: 911838
uuacaaaccaaguuauuuc

SEQ ID NO: 911840 - RNA, 19 nt, Artificial Sequence
  Description of Artificial Sequence: Synthetic oligonucleotide
  Sense strand starting at position 2343 of SEQ ID NO: 588766
guaaauacaucagugcaaa

SEQ ID NO: 911841 - RNA, 19 nt, Artificial Sequence
  Description of Artificial Sequence: Synthetic oligonucleotide
  Antisense strand to SEQ ID NO: 911840
uuugcacugauguauuuac

SEQ ID NO: 911842 - RNA, 19 nt, Artificial Sequence
  Description of Artificial Sequence: Synthetic oligonucleotide
  Sense strand starting at position 2367 of SEQ ID NO: 588766
acaccagugcuaugagaaa

SEQ ID NO: 911843 - RNA, 19 nt, Artificial Sequence
  Description of Artificial Sequence: Synthetic oligonucleotide
  Antisense strand to SEQ ID NO: 911842
uuucucauagcacuggugu

SEQ ID NO: 911844 - RNA, 19 nt, Artificial Sequence
  Description of Artificial Sequence: Synthetic oligonucleotide
  Sense strand starting at position 2462 of SEQ ID NO: 588766
guugaaaugacagggcuaa

SEQ ID NO: 911845 - RNA, 19 nt, Artificial Sequence
  Description of Artificial Sequence: Synthetic oligonucleotide
  Antisense strand to SEQ ID NO: 911844
uuagcccugucauuucaac

SEQ ID NO: 911846 - RNA, 19 nt, Artificial Sequence
  Description of Artificial Sequence: Synthetic oligonucleotide
  Sense strand starting at position 2463 of SEQ ID NO: 588766
uugaaaugacagggcuaau

SEQ ID NO: 911847 - RNA, 19 nt, Artificial Sequence
  Description of Artificial Sequence: Synthetic oligonucleotide
  Antisense strand to SEQ ID NO: 911846
auuagcccugucauuucaa

SEQ ID NO: 911848 - RNA, 19 nt, Artificial Sequence
  Description of Artificial Sequence: Synthetic oligonucleotide
  Sense strand starting at position 2495 of SEQ ID NO: 588766
guaaauagcagagguuaga

SEQ ID NO: 911849 - RNA, 19 nt, Artificial Sequence
  Description of Artificial Sequence: Synthetic oligonucleotide
  Antisense strand to SEQ ID NO: 911848
ucuaaccucugcuauuuac

SEQ ID NO: 911850 - RNA, 19 nt, Artificial Sequence
  Description of Artificial Sequence: Synthetic oligonucleotide
  Sense strand starting at position 2535 of SEQ ID NO: 588766
ggcuucuucccugaagaca

SEQ ID NO: 911851 - RNA, 19 nt, Artificial Sequence
  Description of Artificial Sequence: Synthetic oligonucleotide
  Antisense strand to SEQ ID NO: 911850
ugucuucagggaagaagcc

SEQ ID NO: 911852 - RNA, 19 nt, Artificial Sequence
  Description of Artificial Sequence: Synthetic oligonucleotide
  Sense strand starting at position 2569 of SEQ ID NO: 588766
cuaguuuggcaucaauaag

SEQ ID NO: 911853 - RNA, 19 nt, Artificial Sequence
  Description of Artificial Sequence: Synthetic oligonucleotide
  Antisense strand to SEQ ID NO: 911852
cuuauugaugccaaacuag

SEQ ID NO: 911854 - RNA, 19 nt, Artificial Sequence
  Description of Artificial Sequence: Synthetic oligonucleotide
  Sense strand starting at position 2652 of SEQ ID NO: 588766
gguuuaauuuccucagucu

SEQ ID NO: 911855 - RNA, 19 nt, Artificial Sequence
  Description of Artificial Sequence: Synthetic oligonucleotide
  Antisense strand to SEQ ID NO: 911854
agacugaggaaauuaaacc

SEQ ID NO: 911856 - RNA, 19 nt, Artificial Sequence
  Description of Artificial Sequence: Synthetic oligonucleotide
  Sense strand starting at position 2815 of SEQ ID NO: 588766
gcagguacaccagaugauu

SEQ ID NO: 911857 - RNA, 19 nt, Artificial Sequence
  Description of Artificial Sequence: Synthetic oligonucleotide
  Antisense strand to SEQ ID NO: 911856
aaucaucugguguaccugc

SEQ ID NO: 911858 - RNA, 19 nt, Artificial Sequence
  Description of Artificial Sequence: Synthetic oligonucleotide
  Sense strand starting at position 2912 of SEQ ID NO: 588766
uggaaauagugucucaaac

SEQ ID NO: 911859 - RNA, 19 nt, Artificial Sequence
  Description of Artificial Sequence: Synthetic oligonucleotide
  Antisense strand to SEQ ID NO: 911858
guuugagacacuauuucca

SEQ ID NO: 911860 - RNA, 19 nt, Artificial Sequence
  Description of Artificial Sequence: Synthetic oligonucleotide
  Sense strand starting at position 2927 of SEQ ID NO: 588766
aaacuaggccuugaaguuu

SEQ ID NO: 911861 - RNA, 19 nt, Artificial Sequence
  Description of Artificial Sequence: Synthetic oligonucleotide
  Antisense strand to SEQ ID NO: 911860
aaacuucaaggccuaguuu

SEQ ID NO: 911862 - RNA, 19 nt, Artificial Sequence
  Description of Artificial Sequence: Synthetic oligonucleotide
  Sense strand starting at position 2936 of SEQ ID NO: 588766
cuugaaguuuaaccaggau

SEQ ID NO: 911863 - RNA, 19 nt, Artificial Sequence
  Description of Artificial Sequence: Synthetic oligonucleotide
  Antisense strand to SEQ ID NO: 911862
auccugguuaaacuucaag

SEQ ID NO: 911864 - RNA, 19 nt, Artificial Sequence
  Description of Artificial Sequence: Synthetic oligonucleotide
  Sense strand starting at position 2980 of SEQ ID NO: 588766
ccaggaauucuaugcaaag

SEQ ID NO: 911865 - RNA, 19 nt, Artificial Sequence
  Description of Artificial Sequence: Synthetic oligonucleotide
  Antisense strand to SEQ ID NO: 911864
cuuugcauagaauuccugg

SEQ ID NO: 911866 - RNA, 19 nt, Artificial Sequence
  Description of Artificial Sequence: Synthetic oligonucleotide
  Sense strand starting at position 3089 of SEQ ID NO: 588766
cuggaagccuucuuagaac

SEQ ID NO: 911867 - RNA, 19 nt, Artificial Sequence
  Description of Artificial Sequence: Synthetic oligonucleotide
  Antisense strand to SEQ ID NO: 911866
guucuaagaaggcuuccag

SEQ ID NO: 911868 - RNA, 19 nt, Artificial Sequence
  Description of Artificial Sequence: Synthetic oligonucleotide
  Sense strand starting at position 3116 of SEQ ID NO: 588766
gaguacuaccaucagaguu

SEQ ID NO: 911869 - RNA, 19 nt, Artificial Sequence
  Description of Artificial Sequence: Synthetic oligonucleotide
  Antisense strand to SEQ ID NO: 911868
aacucugaugguaguacuc

SEQ ID NO: 911870 - RNA, 19 nt, Artificial Sequence
  Description of Artificial Sequence: Synthetic oligonucleotide
  Sense strand starting at position 3604 of SEQ ID NO: 588766
agaaccuucugguugaagu

SEQ ID NO: 911871 - RNA, 19 nt, Artificial Sequence
  Description of Artificial Sequence: Synthetic oligonucleotide
  Antisense strand to SEQ ID NO: 911870
acuucaaccagaagguucu

SEQ ID NO: 911872 - RNA, 19 nt, Artificial Sequence
  Description of Artificial Sequence: Synthetic oligonucleotide
  Sense strand starting at position 3614 of SEQ ID NO: 588766
gguugaagucaugggaaac

SEQ ID NO: 911873 - RNA, 19 nt, Artificial Sequence
  Description of Artificial Sequence: Synthetic oligonucleotide
  Antisense strand to SEQ ID NO: 911872
guuucccaugacuucaacc

SEQ ID NO: 911874 - RNA, 19 nt, Artificial Sequence
  Description of Artificial Sequence: Synthetic oligonucleotide
  Sense strand starting at position 101 of SEQ ID NO: 588767
ccaagauauuuagagcuuu

SEQ ID NO: 911875 - RNA, 19 nt, Artificial Sequence
  Description of Artificial Sequence: Synthetic oligonucleotide
  Antisense strand to SEQ ID NO: 911874
aaagcucuaaauaucuugg

SEQ ID NO: 911876 - RNA, 19 nt, Artificial Sequence
  Description of Artificial Sequence: Synthetic oligonucleotide
  Sense strand starting at position 299 of SEQ ID NO: 588767
caaggaagcccuuagguau

SEQ ID NO: 911877 - RNA, 19 nt, Artificial Sequence
  Description of Artificial Sequence: Synthetic oligonucleotide
  Antisense strand to SEQ ID NO: 911876
auaccuaagggcuuccuug

SEQ ID NO: 911878 - RNA, 19 nt, Artificial Sequence
  Description of Artificial Sequence: Synthetic oligonucleotide
  Sense strand starting at position 302 of SEQ ID NO: 588767
ggaagcccuuagguauaau

SEQ ID NO: 911879 - RNA, 19 nt, Artificial Sequence
  Description of Artificial Sequence: Synthetic oligonucleotide
  Antisense strand to SEQ ID NO: 911878
auuauaccuaagggcuucc

SEQ ID NO: 911880 - RNA, 19 nt, Artificial Sequence
  Description of Artificial Sequence: Synthetic oligonucleotide
  Sense strand starting at position 305 of SEQ ID NO: 588767
agcccuuagguauaauuaa

SEQ ID NO: 911881 - RNA, 19 nt, Artificial Sequence
  Description of Artificial Sequence: Synthetic oligonucleotide
  Antisense strand to SEQ ID NO: 911880
uuaauuauaccuaagggcu

SEQ ID NO: 911882 - RNA, 19 nt, Artificial Sequence
  Description of Artificial Sequence: Synthetic oligonucleotide
  Sense strand starting at position 345 of SEQ ID NO: 588767
gaaauucucugagauaagu

SEQ ID NO: 911883 - RNA, 19 nt, Artificial Sequence
  Description of Artificial Sequence: Synthetic oligonucleotide
  Antisense strand to SEQ ID NO: 911882
acuuaucucagagaauuuc

SEQ ID NO: 911884 - RNA, 19 nt, Artificial Sequence
  Description of Artificial Sequence: Synthetic oligonucleotide
  Sense strand starting at position 419 of SEQ ID NO: 588767
guauuauacugagaaagaa

SEQ ID NO: 911885 - RNA, 19 nt, Artificial Sequence
  Description of Artificial Sequence: Synthetic oligonucleotide
  Antisense strand to SEQ ID NO: 911884
uucuuucucaguauaauac

SEQ ID NO: 911886 - RNA, 19 nt, Artificial Sequence
  Description of Artificial Sequence: Synthetic oligonucleotide
  Sense strand starting at position 481 of SEQ ID NO: 588767
auuagacucuagucaguau

SEQ ID NO: 911887 - RNA, 19 nt, Artificial Sequence
  Description of Artificial Sequence: Synthetic oligonucleotide
  Antisense strand to SEQ ID NO: 911886
auacugacuagagucuaau

SEQ ID NO: 911888 - RNA, 19 nt, Artificial Sequence
  Description of Artificial Sequence: Synthetic oligonucleotide
  Sense strand starting at position 484 of SEQ ID NO: 588767
agacucuagucaguauaag

SEQ ID NO: 911889 - RNA, 19 nt, Artificial Sequence
  Description of Artificial Sequence: Synthetic oligonucleotide
  Antisense strand to SEQ ID NO: 911888
cuuauacugacuagagucu

SEQ ID NO: 911890 - RNA, 19 nt, Artificial Sequence
  Description of Artificial Sequence: Synthetic oligonucleotide
  Sense strand starting at position 485 of SEQ ID NO: 588767
gacucuagucaguauaagu

SEQ ID NO: 911891 - RNA, 19 nt, Artificial Sequence
  Description of Artificial Sequence: Synthetic oligonucleotide
  Antisense strand to SEQ ID NO: 911890
acuuauacugacuagaguc

SEQ ID NO: 911892 - RNA, 19 nt, Artificial Sequence
  Description of Artificial Sequence: Synthetic oligonucleotide
  Sense strand starting at position 573 of SEQ ID NO: 588767
guaucuacuguauauguaa

SEQ ID NO: 911893 - RNA, 19 nt, Artificial Sequence
  Description of Artificial Sequence: Synthetic oligonucleotide
  Antisense strand to SEQ ID NO: 911892
uuacauauacaguagauac

SEQ ID NO: 911894 - RNA, 19 nt, Artificial Sequence
  Description of Artificial Sequence: Synthetic oligonucleotide
  Sense strand starting at position 615 of SEQ ID NO: 588767
gaauccauuuggcagugau

SEQ ID NO: 911895 - RNA, 19 nt, Artificial Sequence
  Description of Artificial Sequence: Synthetic oligonucleotide
  Antisense strand to SEQ ID NO: 911894
aucacugccaaauggauuc

SEQ ID NO: 911896 - RNA, 19 nt, Artificial Sequence
  Description of Artificial Sequence: Synthetic oligonucleotide
  Sense strand starting at position 646 of SEQ ID NO: 588767
gcugaaauguuauugauuc

SEQ ID NO: 911897 - RNA, 19 nt, Artificial Sequence
  Description of Artificial Sequence: Synthetic oligonucleotide
  Antisense strand to SEQ ID NO: 911896
gaaucaauaacauuucagc

SEQ ID NO: 911898 - RNA, 19 nt, Artificial Sequence
  Description of Artificial Sequence: Synthetic oligonucleotide
  Sense strand starting at position 812 of SEQ ID NO: 588767
aaagaagaguguccuacuu

SEQ ID NO: 911899 - RNA, 19 nt, Artificial Sequence
  Description of Artificial Sequence: Synthetic oligonucleotide
  Antisense strand to SEQ ID NO: 911898
aaguaggacacucuucuuu

SEQ ID NO: 911900 - RNA, 19 nt, Artificial Sequence
  Description of Artificial Sequence: Synthetic oligonucleotide
  Sense strand starting at position 879 of SEQ ID NO: 588767
gaggaauacugccugcaaa

SEQ ID NO: 911901 - RNA, 19 nt, Artificial Sequence
  Description of Artificial Sequence: Synthetic oligonucleotide
  Antisense strand to SEQ ID NO: 911900
uuugcaggcaguauuccuc

SEQ ID NO: 911902 - RNA, 19 nt, Artificial Sequence
  Description of Artificial Sequence: Synthetic oligonucleotide
  Sense strand starting at position 1260 of SEQ ID NO: 588767
gggaguuagcauggauuag

SEQ ID NO: 911903 - RNA, 19 nt, Artificial Sequence
  Description of Artificial Sequence: Synthetic oligonucleotide
  Antisense strand to SEQ ID NO: 911902
cuaauccaugcuaacuccc

SEQ ID NO: 911904 - RNA, 19 nt, Artificial Sequence
  Description of Artificial Sequence: Synthetic oligonucleotide
  Sense strand starting at position 1270 of SEQ ID NO: 588767
auggauuagggcugagguu

SEQ ID NO: 911905 - RNA, 19 nt, Artificial Sequence
  Description of Artificial Sequence: Synthetic oligonucleotide
  Antisense strand to SEQ ID NO: 911904
aaccucagcccuaauccau

SEQ ID NO: 911906 - RNA, 19 nt, Artificial Sequence
  Description of Artificial Sequence: Synthetic oligonucleotide
  Sense strand starting at position 1516 of SEQ ID NO: 588767
gcgaaccacuucucaaaua

SEQ ID NO: 911907 - RNA, 19 nt, Artificial Sequence
  Description of Artificial Sequence: Synthetic oligonucleotide
  Antisense strand to SEQ ID NO: 911906
uauuugagaagugguucgc

SEQ ID NO: 911908 - RNA, 19 nt, Artificial Sequence
  Description of Artificial Sequence: Synthetic oligonucleotide
  Sense strand starting at position 1544 of SEQ ID NO: 588767
gaaguuauauaagucaagu

SEQ ID NO: 911909 - RNA, 19 nt, Artificial Sequence
  Description of Artificial Sequence: Synthetic oligonucleotide
  Antisense strand to SEQ ID NO: 911908
acuugacuuauauaacuuc

SEQ ID NO: 911910 - RNA, 19 nt, Artificial Sequence
  Description of Artificial Sequence: Synthetic oligonucleotide
  Sense strand starting at position 1842 of SEQ ID NO: 588767
uucgauuucugauuguuuc

SEQ ID NO: 911911 - RNA, 19 nt, Artificial Sequence
  Description of Artificial Sequence: Synthetic oligonucleotide
  Antisense strand to SEQ ID NO: 911910
gaaacaaucagaaaucgaa

SEQ ID NO: 911912 - RNA, 19 nt, Artificial Sequence
  Description of Artificial Sequence: Synthetic oligonucleotide
  Sense strand starting at position 2700 of SEQ ID NO: 588767
ucagguguucgcgugcuuu

SEQ ID NO: 911913 - RNA, 19 nt, Artificial Sequence
  Description of Artificial Sequence: Synthetic oligonucleotide
  Antisense strand to SEQ ID NO: 911912
aaagcacgcgaacaccuga

SEQ ID NO: 911914 - RNA, 19 nt, Artificial Sequence
  Description of Artificial Sequence: Synthetic oligonucleotide
  Sense strand starting at position 2706 of SEQ ID NO: 588767
guucgcgugcuuucgguua

SEQ ID NO: 911915 - RNA, 19 nt, Artificial Sequence
  Description of Artificial Sequence: Synthetic oligonucleotide
  Antisense strand to SEQ ID NO: 911914
uaaccgaaagcacgcgaac

SEQ ID NO: 911916 - RNA, 19 nt, Artificial Sequence
  Description of Artificial Sequence: Synthetic oligonucleotide
  Sense strand starting at position 2710 of SEQ ID NO: 588767
gcgugcuuucgguuauuau

SEQ ID NO: 911917 - RNA, 19 nt, Artificial Sequence
  Description of Artificial Sequence: Synthetic oligonucleotide
  Antisense strand to SEQ ID NO: 911916
auaauaaccgaaagcacgc

SEQ ID NO: 911918 - RNA, 19 nt, Artificial Sequence
  Description of Artificial Sequence: Synthetic oligonucleotide
  Sense strand starting at position 2713 of SEQ ID NO: 588767
ugcuuucgguuauuauuau

SEQ ID NO: 911919 - RNA, 19 nt, Artificial Sequence
  Description of Artificial Sequence: Synthetic oligonucleotide
  Antisense strand to SEQ ID NO: 911918
auaauaauaaccgaaagca

SEQ ID NO: 911920 - RNA, 19 nt, Artificial Sequence
  Description of Artificial Sequence: Synthetic oligonucleotide
  Sense strand starting at position 2817 of SEQ ID NO: 588767
uggaaucgaugcuuaugaa

SEQ ID NO: 911921 - RNA, 19 nt, Artificial Sequence
  Description of Artificial Sequence: Synthetic oligonucleotide
  Antisense strand to SEQ ID NO: 911920
uucauaagcaucgauucca

SEQ ID NO: 911922 - RNA, 19 nt, Artificial Sequence
  Description of Artificial Sequence: Synthetic oligonucleotide
  Sense strand starting at position 2958 of SEQ ID NO: 588767
gggauagagcucugccaag

SEQ ID NO: 911923 - RNA, 19 nt, Artificial Sequence
  Description of Artificial Sequence: Synthetic oligonucleotide
  Antisense strand to SEQ ID NO: 911922
cuuggcagagcucuauccc

SEQ ID NO: 911924 - RNA, 19 nt, Artificial Sequence
  Description of Artificial Sequence: Synthetic oligonucleotide
  Sense strand starting at position 3001 of SEQ ID NO: 588767
guacaagaguugcugagaa

SEQ ID NO: 911925 - RNA, 19 nt, Artificial Sequence
  Description of Artificial Sequence: Synthetic oligonucleotide
  Antisense strand to SEQ ID NO: 911924
uucucagcaacucuuguac

SEQ ID NO: 911926 - RNA, 19 nt, Artificial Sequence
  Description of Artificial Sequence: Synthetic oligonucleotide
  Sense strand starting at position 3017 of SEQ ID NO: 588767
gaauaugccucgcugcaga

SEQ ID NO: 911927 - RNA, 19 nt, Artificial Sequence
  Description of Artificial Sequence: Synthetic oligonucleotide
  Antisense strand to SEQ ID NO: 911926
ucugcagcgaggcauauuc

SEQ ID NO: 911928 - RNA, 19 nt, Artificial Sequence
  Description of Artificial Sequence: Synthetic oligonucleotide
  Sense strand starting at position 3109 of SEQ ID NO: 588767
gugcaucagauguggugua

SEQ ID NO: 911929 - RNA, 19 nt, Artificial Sequence
  Description of Artificial Sequence: Synthetic oligonucleotide
  Antisense strand to SEQ ID NO: 911928
uacaccacaucugaugcac

SEQ ID NO: 911930 - RNA, 19 nt, Artificial Sequence
  Description of Artificial Sequence: Synthetic oligonucleotide
  Sense strand starting at position 3114 of SEQ ID NO: 588767
ucagaugugguguaccaca

SEQ ID NO: 911931 - RNA, 19 nt, Artificial Sequence
  Description of Artificial Sequence: Synthetic oligonucleotide
  Antisense strand to SEQ ID NO: 911930
ugugguacaccacaucuga

SEQ ID NO: 911932 - RNA, 19 nt, Artificial Sequence
  Description of Artificial Sequence: Synthetic oligonucleotide
  Sense strand starting at position 3391 of SEQ ID NO: 588767
cagagcauuccagguacca

SEQ ID NO: 911933 - RNA, 19 nt, Artificial Sequence
  Description of Artificial Sequence: Synthetic oligonucleotide
  Antisense strand to SEQ ID NO: 911932
ugguaccuggaaugcucug

SEQ ID NO: 911934 - RNA, 19 nt, Artificial Sequence
  Description of Artificial Sequence: Synthetic oligonucleotide
  Sense strand starting at position 3404 of SEQ ID NO: 588767
guaccaucuggucaaaggu

SEQ ID NO: 911935 - RNA, 19 nt, Artificial Sequence
  Description of Artificial Sequence: Synthetic oligonucleotide
  Antisense strand to SEQ ID NO: 911934
accuuugaccagaugguac

SEQ ID NO: 911936 - RNA, 19 nt, Artificial Sequence
  Description of Artificial Sequence: Synthetic oligonucleotide
  Sense strand starting at position 3414 of SEQ ID NO: 588767
gucaaagguucuguaagca

SEQ ID NO: 911937 - RNA, 19 nt, Artificial Sequence
  Description of Artificial Sequence: Synthetic oligonucleotide
  Antisense strand to SEQ ID NO: 911936
ugcuuacagaaccuuugac

SEQ ID NO: 911938 - RNA, 19 nt, Artificial Sequence
  Description of Artificial Sequence: Synthetic oligonucleotide
  Sense strand starting at position 3424 of SEQ ID NO: 588767
cuguaagcacuguagaaga

SEQ ID NO: 911939 - RNA, 19 nt, Artificial Sequence
  Description of Artificial Sequence: Synthetic oligonucleotide
  Antisense strand to SEQ ID NO: 911938
ucuucuacagugcuuacag

SEQ ID NO: 911940 - RNA, 19 nt, Artificial Sequence
  Description of Artificial Sequence: Synthetic oligonucleotide
  Sense strand starting at position 3504 of SEQ ID NO: 588767
gaucuaaucgcagaaaugu

SEQ ID NO: 911941 - RNA, 19 nt, Artificial Sequence
  Description of Artificial Sequence: Synthetic oligonucleotide
  Antisense strand to SEQ ID NO: 911940
acauuucugcgauuagauc

SEQ ID NO: 911942 - RNA, 19 nt, Artificial Sequence
  Description of Artificial Sequence: Synthetic oligonucleotide
  Sense strand starting at position 3513 of SEQ ID NO: 588767
gcagaaaugucacuuucuc

SEQ ID NO: 911943 - RNA, 19 nt, Artificial Sequence
  Description of Artificial Sequence: Synthetic oligonucleotide
  Antisense strand to SEQ ID NO: 911942
gagaaagugacauuucugc

SEQ ID NO: 911944 - RNA, 19 nt, Artificial Sequence
  Description of Artificial Sequence: Synthetic oligonucleotide
  Sense strand starting at position 3522 of SEQ ID NO: 588767
ucacuuucucccgaagaga

SEQ ID NO: 911945 - RNA, 19 nt, Artificial Sequence
  Description of Artificial Sequence: Synthetic oligonucleotide
  Antisense strand to SEQ ID NO: 911944
ucucuucgggagaaaguga

SEQ ID NO: 911946 - RNA, 19 nt, Artificial Sequence
  Description of Artificial Sequence: Synthetic oligonucleotide
  Sense strand starting at position 3545 of SEQ ID NO: 588767
aagcuuagucacuauaggu

SEQ ID NO: 911947 - RNA, 19 nt, Artificial Sequence
  Description of Artificial Sequence: Synthetic oligonucleotide
  Antisense strand to SEQ ID NO: 911946
accuauagugacuaagcuu

SEQ ID NO: 911948 - RNA, 19 nt, Artificial Sequence
  Description of Artificial Sequence: Synthetic oligonucleotide
  Sense strand starting at position 3551 of SEQ ID NO: 588767
agucacuauagguggaauu

SEQ ID NO: 911949 - RNA, 19 nt, Artificial Sequence
  Description of Artificial Sequence: Synthetic oligonucleotide
  Antisense strand to SEQ ID NO: 911948
aauuccaccuauagugacu

SEQ ID NO: 911950 - RNA, 19 nt, Artificial Sequence
  Description of Artificial Sequence: Synthetic oligonucleotide
  Sense strand starting at position 3880 of SEQ ID NO: 588767
ccaagaugaugaugacuga

SEQ ID NO: 911951 - RNA, 19 nt, Artificial Sequence
  Description of Artificial Sequence: Synthetic oligonucleotide
  Antisense strand to SEQ ID NO: 911950
ucagucaucaucaucuugg

SEQ ID NO: 911952 - RNA, 19 nt, Artificial Sequence
  Description of Artificial Sequence: Synthetic oligonucleotide
  Sense strand starting at position 3980 of SEQ ID NO: 588767
gucaguguucaauaauggu

SEQ ID NO: 911953 - RNA, 19 nt, Artificial Sequence
  Description of Artificial Sequence: Synthetic oligonucleotide
  Antisense strand to SEQ ID NO: 911952
accauuauugaacacugac

SEQ ID NO: 911954 - RNA, 19 nt, Artificial Sequence
  Description of Artificial Sequence: Synthetic oligonucleotide
  Sense strand starting at position 130 of SEQ ID NO: 588859
accugaggauguguucuau

SEQ ID NO: 911955 - RNA, 19 nt, Artificial Sequence
  Description of Artificial Sequence: Synthetic oligonucleotide
  Antisense strand to SEQ ID NO: 911954
auagaacacauccucaggu

SEQ ID NO: 911956 - RNA, 19 nt, Artificial Sequence
  Description of Artificial Sequence: Synthetic oligonucleotide
  Sense strand starting at position 134 of SEQ ID NO: 588859
gaggauguguucuauuuaa

SEQ ID NO: 911957 - RNA, 19 nt, Artificial Sequence
  Description of Artificial Sequence: Synthetic oligonucleotide
  Antisense strand to SEQ ID NO: 911956
uuaaauagaacacauccuc

SEQ ID NO: 911958 - RNA, 19 nt, Artificial Sequence
  Description of Artificial Sequence: Synthetic oligonucleotide
  Sense strand starting at position 205 of SEQ ID NO: 588859
uucucaguguuauugagga

SEQ ID NO: 911959 - RNA, 19 nt, Artificial Sequence
  Description of Artificial Sequence: Synthetic oligonucleotide
  Antisense strand to SEQ ID NO: 911958
uccucaauaacacugagaa

SEQ ID NO: 911960 - RNA, 19 nt, Artificial Sequence
  Description of Artificial Sequence: Synthetic oligonucleotide
  Sense strand starting at position 207 of SEQ ID NO: 588859
cucaguguuauugaggaca

SEQ ID NO: 911961 - RNA, 19 nt, Artificial Sequence
  Description of Artificial Sequence: Synthetic oligonucleotide
  Antisense strand to SEQ ID NO: 911960
uguccucaauaacacugag

SEQ ID NO: 911962 - RNA, 19 nt, Artificial Sequence
  Description of Artificial Sequence: Synthetic oligonucleotide
  Sense strand starting at position 233 of SEQ ID NO: 588859
gauagaguuugugucucau

SEQ ID NO: 911963 - RNA, 19 nt, Artificial Sequence
  Description of Artificial Sequence: Synthetic oligonucleotide
  Antisense strand to SEQ ID NO: 911962
augagacacaaacucuauc

SEQ ID NO: 911964 - RNA, 19 nt, Artificial Sequence
  Description of Artificial Sequence: Synthetic oligonucleotide
  Sense strand starting at position 235 of SEQ ID NO: 588859
uagaguuugugucucauuu

SEQ ID NO: 911965 - RNA, 19 nt, Artificial Sequence
  Description of Artificial Sequence: Synthetic oligonucleotide
  Antisense strand to SEQ ID NO: 911964
aaaugagacacaaacucua

SEQ ID NO: 911966 - RNA, 19 nt, Artificial Sequence
  Description of Artificial Sequence: Synthetic oligonucleotide
  Sense strand starting at position 239 of SEQ ID NO: 588859
guuugugucucauuucuuu

SEQ ID NO: 911967 - RNA, 19 nt, Artificial Sequence
  Description of Artificial Sequence: Synthetic oligonucleotide
  Antisense strand to SEQ ID NO: 911966
aaagaaaugagacacaaac

SEQ ID NO: 911968 - RNA, 19 nt, Artificial Sequence
  Description of Artificial Sequence: Synthetic oligonucleotide
  Sense strand starting at position 285 of SEQ ID NO: 588859
gcaggauugaaauacugca

SEQ ID NO: 911969 - RNA, 19 nt, Artificial Sequence
  Description of Artificial Sequence: Synthetic oligonucleotide
  Antisense strand to SEQ ID NO: 911968
ugcaguauuucaauccugc

SEQ ID NO: 911970 - RNA, 19 nt, Artificial Sequence
  Description of Artificial Sequence: Synthetic oligonucleotide
  Sense strand starting at position 387 of SEQ ID NO: 588859
guggcagauuacuugaacu

SEQ ID NO: 911971 - RNA, 19 nt, Artificial Sequence
  Description of Artificial Sequence: Synthetic oligonucleotide
  Antisense strand to SEQ ID NO: 911970
aguucaaguaaucugccac

SEQ ID NO: 911972 - RNA, 19 nt, Artificial Sequence
  Description of Artificial Sequence: Synthetic oligonucleotide
  Sense strand starting at position 389 of SEQ ID NO: 588859
ggcagauuacuugaacugu

SEQ ID NO: 911973 - RNA, 19 nt, Artificial Sequence
  Description of Artificial Sequence: Synthetic oligonucleotide
  Antisense strand to SEQ ID NO: 911972
acaguucaaguaaucugcc

SEQ ID NO: 911974 - RNA, 19 nt, Artificial Sequence
  Description of Artificial Sequence: Synthetic oligonucleotide
  Sense strand starting at position 399 of SEQ ID NO: 588859
uugaacugugcugagcauu

SEQ ID NO: 911975 - RNA, 19 nt, Artificial Sequence
  Description of Artificial Sequence: Synthetic oligonucleotide
  Antisense strand to SEQ ID NO: 911974
aaugcucagcacaguucaa

SEQ ID NO: 911976 - RNA, 19 nt, Artificial Sequence
  Description of Artificial Sequence: Synthetic oligonucleotide
  Sense strand starting at position 440 of SEQ ID NO: 588859
cuugcauaaggguggaauu

SEQ ID NO: 911977 - RNA, 19 nt, Artificial Sequence
  Description of Artificial Sequence: Synthetic oligonucleotide
  Antisense strand to SEQ ID NO: 911976
aauuccacccuuaugcaag

SEQ ID NO: 911978 - RNA, 19 nt, Artificial Sequence
  Description of Artificial Sequence: Synthetic oligonucleotide
  Sense strand starting at position 460 of SEQ ID NO: 588859
uauugacuacaucgugauu

SEQ ID NO: 911979 - RNA, 19 nt, Artificial Sequence
  Description of Artificial Sequence: Synthetic oligonucleotide
  Antisense strand to SEQ ID NO: 911978
aaucacgauguagucaaua

SEQ ID NO: 911980 - RNA, 19 nt, Artificial Sequence
  Description of Artificial Sequence: Synthetic oligonucleotide
  Sense strand starting at position 483 of SEQ ID NO: 588859
caucuuuguguuggaggaa

SEQ ID NO: 911981 - RNA, 19 nt, Artificial Sequence
  Description of Artificial Sequence: Synthetic oligonucleotide
  Antisense strand to SEQ ID NO: 911980
uuccuccaacacaaagaug

SEQ ID NO: 911982 - RNA, 19 nt, Artificial Sequence
  Description of Artificial Sequence: Synthetic oligonucleotide
  Sense strand starting at position 602 of SEQ ID NO: 588859
ucucauuccgcugcuguaa

SEQ ID NO: 911983 - RNA, 19 nt, Artificial Sequence
  Description of Artificial Sequence: Synthetic oligonucleotide
  Antisense strand to SEQ ID NO: 911982
uuacagcagcggaaugaga

SEQ ID NO: 911984 - RNA, 19 nt, Artificial Sequence
  Description of Artificial Sequence: Synthetic oligonucleotide
  Sense strand starting at position 907 of SEQ ID NO: 588859
gcccaugacacuggucaga

SEQ ID NO: 911985 - RNA, 19 nt, Artificial Sequence
  Description of Artificial Sequence: Synthetic oligonucleotide
  Antisense strand to SEQ ID NO: 911984
ucugaccagugucaugggc

SEQ ID NO: 911986 - RNA, 19 nt, Artificial Sequence
  Description of Artificial Sequence: Synthetic oligonucleotide
  Sense strand starting at position 909 of SEQ ID NO: 588859
ccaugacacuggucagaca

SEQ ID NO: 911987 - RNA, 19 nt, Artificial Sequence
  Description of Artificial Sequence: Synthetic oligonucleotide
  Antisense strand to SEQ ID NO: 911986
ugucugaccagugucaugg

SEQ ID NO: 911988 - RNA, 19 nt, Artificial Sequence
  Description of Artificial Sequence: Synthetic oligonucleotide
  Sense strand starting at position 918 of SEQ ID NO: 588859
uggucagacaucugguaag

SEQ ID NO: 911989 - RNA, 19 nt, Artificial Sequence
  Description of Artificial Sequence: Synthetic oligonucleotide
  Antisense strand to SEQ ID NO: 911988
cuuaccagaugucugacca

SEQ ID NO: 911990 - RNA, 19 nt, Artificial Sequence
  Description of Artificial Sequence: Synthetic oligonucleotide
  Sense strand starting at position 1061 of SEQ ID NO: 588859
gcugucaagcgagcugauu

SEQ ID NO: 911991 - RNA, 19 nt, Artificial Sequence
  Description of Artificial Sequence: Synthetic oligonucleotide
  Antisense strand to SEQ ID NO: 911990
aaucagcucgcuugacagc

SEQ ID NO: 911992 - RNA, 19 nt, Artificial Sequence
  Description of Artificial Sequence: Synthetic oligonucleotide
  Sense strand starting at position 1091 of SEQ ID NO: 588859
cgcauuugcuugccucuaa

SEQ ID NO: 911993 - RNA, 19 nt, Artificial Sequence
  Description of Artificial Sequence: Synthetic oligonucleotide
  Antisense strand to SEQ ID NO: 911992
uuagaggcaagcaaaugcg

SEQ ID NO: 911994 - RNA, 19 nt, Artificial Sequence
  Description of Artificial Sequence: Synthetic oligonucleotide
  Sense strand starting at position 1632 of SEQ ID NO: 588859
aggucaucgaccgauguca

SEQ ID NO: 911995 - RNA, 19 nt, Artificial Sequence
  Description of Artificial Sequence: Synthetic oligonucleotide
  Antisense strand to SEQ ID NO: 911994
ugacaucggucgaugaccu

SEQ ID NO: 911996 - RNA, 19 nt, Artificial Sequence
  Description of Artificial Sequence: Synthetic oligonucleotide
  Sense strand starting at position 1641 of SEQ ID NO: 588859
accgaugucaccgagucau

SEQ ID NO: 911997 - RNA, 19 nt, Artificial Sequence
  Description of Artificial Sequence: Synthetic oligonucleotide
  Antisense strand to SEQ ID NO: 911996
augacucggugacaucggu

SEQ ID NO: 911998 - RNA, 19 nt, Artificial Sequence
  Description of Artificial Sequence: Synthetic oligonucleotide
  Sense strand starting at position 1660 of SEQ ID NO: 588859
uccugaagcgguuauacuu

SEQ ID NO: 911999 - RNA, 19 nt, Artificial Sequence
  Description of Artificial Sequence: Synthetic oligonucleotide
  Antisense strand to SEQ ID NO: 911998
aaguauaaccgcuucagga

SEQ ID NO: 912000 - RNA, 19 nt, Artificial Sequence
  Description of Artificial Sequence: Synthetic oligonucleotide
  Sense strand starting at position 1946 of SEQ ID NO: 588859
cauaguugccucugaugga

SEQ ID NO: 912001 - RNA, 19 nt, Artificial Sequence
  Description of Artificial Sequence: Synthetic oligonucleotide
  Antisense strand to SEQ ID NO: 912000
uccaucagaggcaacuaug

SEQ ID NO: 912002 - RNA, 19 nt, Artificial Sequence
  Description of Artificial Sequence: Synthetic oligonucleotide
  Sense strand starting at position 2002 of SEQ ID NO: 588859
gacucacucugagaggaga

SEQ ID NO: 912003 - RNA, 19 nt, Artificial Sequence
  Description of Artificial Sequence: Synthetic oligonucleotide
  Antisense strand to SEQ ID NO: 912002
ucuccucucagagugaguc

SEQ ID NO: 912004 - RNA, 19 nt, Artificial Sequence
  Description of Artificial Sequence: Synthetic oligonucleotide
  Sense strand starting at position 2058 of SEQ ID NO: 588859
cuuccuguagcagaagaaa

SEQ ID NO: 912005 - RNA, 19 nt, Artificial Sequence
  Description of Artificial Sequence: Synthetic oligonucleotide
  Antisense strand to SEQ ID NO: 912004
uuucuucugcuacaggaag

SEQ ID NO: 912006 - RNA, 19 nt, Artificial Sequence
  Description of Artificial Sequence: Synthetic oligonucleotide
  Sense strand starting at position 2280 of SEQ ID NO: 588859
acccauuauucuguuaggu

SEQ ID NO: 912007 - RNA, 19 nt, Artificial Sequence
  Description of Artificial Sequence: Synthetic oligonucleotide
  Antisense strand to SEQ ID NO: 912006
accuaacagaauaaugggu

SEQ ID NO: 912008 - RNA, 19 nt, Artificial Sequence
  Description of Artificial Sequence: Synthetic oligonucleotide
  Sense strand starting at position 2398 of SEQ ID NO: 588859
gcgaauccugaugaaucuu

SEQ ID NO: 912009 - RNA, 19 nt, Artificial Sequence
  Description of Artificial Sequence: Synthetic oligonucleotide
  Antisense strand to SEQ ID NO: 912008
aagauucaucaggauucgc

SEQ ID NO: 912010 - RNA, 19 nt, Artificial Sequence
  Description of Artificial Sequence: Synthetic oligonucleotide
  Sense strand starting at position 2597 of SEQ ID NO: 588859
auaugaacuucugcacagu

SEQ ID NO: 912011 - RNA, 19 nt, Artificial Sequence
  Description of Artificial Sequence: Synthetic oligonucleotide
  Antisense strand to SEQ ID NO: 912010
acugugcagaaguucauau

SEQ ID NO: 912012 - RNA, 19 nt, Artificial Sequence
  Description of Artificial Sequence: Synthetic oligonucleotide
  Sense strand starting at position 2651 of SEQ ID NO: 588859
gucuuucucagccaggguu

SEQ ID NO: 912013 - RNA, 19 nt, Artificial Sequence
  Description of Artificial Sequence: Synthetic oligonucleotide
  Antisense strand to SEQ ID NO: 912012
aacccuggcugagaaagac

SEQ ID NO: 912014 - RNA, 19 nt, Artificial Sequence
  Description of Artificial Sequence: Synthetic oligonucleotide
  Sense strand starting at position 2653 of SEQ ID NO: 588859
cuuucucagccaggguuaa

SEQ ID NO: 912015 - RNA, 19 nt, Artificial Sequence
  Description of Artificial Sequence: Synthetic oligonucleotide
  Antisense strand to SEQ ID NO: 912014
uuaacccuggcugagaaag

SEQ ID NO: 912016 - RNA, 19 nt, Artificial Sequence
  Description of Artificial Sequence: Synthetic oligonucleotide
  Sense strand starting at position 2717 of SEQ ID NO: 588859
ggcaacaggcuccagaaau

SEQ ID NO: 912017 - RNA, 19 nt, Artificial Sequence
  Description of Artificial Sequence: Synthetic oligonucleotide
  Antisense strand to SEQ ID NO: 912016
auuucuggagccuguugcc

SEQ ID NO: 912018 - RNA, 19 nt, Artificial Sequence
  Description of Artificial Sequence: Synthetic oligonucleotide
  Sense strand starting at position 3017 of SEQ ID NO: 588859
aggucugcccgagacugaa

SEQ ID NO: 912019 - RNA, 19 nt, Artificial Sequence
  Description of Artificial Sequence: Synthetic oligonucleotide
  Antisense strand to SEQ ID NO: 912018
uucagucucgggcagaccu

SEQ ID NO: 912020 - RNA, 19 nt, Artificial Sequence
  Description of Artificial Sequence: Synthetic oligonucleotide
  Sense strand starting at position 3132 of SEQ ID NO: 588859
gcaacuucugagcaagcga

SEQ ID NO: 912021 - RNA, 19 nt, Artificial Sequence
  Description of Artificial Sequence: Synthetic oligonucleotide
  Antisense strand to SEQ ID NO: 912020
ucgcuugcucagaaguugc

SEQ ID NO: 912022 - RNA, 19 nt, Artificial Sequence
  Description of Artificial Sequence: Synthetic oligonucleotide
  Sense strand starting at position 3221 of SEQ ID NO: 588859
acgugagguccugagucuu

SEQ ID NO: 912023 - RNA, 19 nt, Artificial Sequence
  Description of Artificial Sequence: Synthetic oligonucleotide
  Antisense strand to SEQ ID NO: 912022
aagacucaggaccucacgu

SEQ ID NO: 912024 - RNA, 19 nt, Artificial Sequence
  Description of Artificial Sequence: Synthetic oligonucleotide
  Sense strand starting at position 3506 of SEQ ID NO: 588859
gcgaaacagcccuaucauu

SEQ ID NO: 912025 - RNA, 19 nt, Artificial Sequence
  Description of Artificial Sequence: Synthetic oligonucleotide
  Antisense strand to SEQ ID NO: 912024
aaugauagggcuguuucgc

SEQ ID NO: 912026 - RNA, 19 nt, Artificial Sequence
  Description of Artificial Sequence: Synthetic oligonucleotide
  Sense strand starting at position 3567 of SEQ ID NO: 588859
augugaaugaaaugcuguu

SEQ ID NO: 912027 - RNA, 19 nt, Artificial Sequence
  Description of Artificial Sequence: Synthetic oligonucleotide
  Antisense strand to SEQ ID NO: 912026
aacagcauuucauucacau

SEQ ID NO: 912028 - RNA, 19 nt, Artificial Sequence
  Description of Artificial Sequence: Synthetic oligonucleotide
  Sense strand starting at position 3721 of SEQ ID NO: 588859
aggcuugcucaauagugga

SEQ ID NO: 912029 - RNA, 19 nt, Artificial Sequence
  Description of Artificial Sequence: Synthetic oligonucleotide
  Antisense strand to SEQ ID NO: 912028
uccacuauugagcaagccu

SEQ ID NO: 912030 - RNA, 19 nt, Artificial Sequence
  Description of Artificial Sequence: Synthetic oligonucleotide
  Sense strand starting at position 3725 of SEQ ID NO: 588859
uugcucaauaguggaagau

SEQ ID NO: 912031 - RNA, 19 nt, Artificial Sequence
  Description of Artificial Sequence: Synthetic oligonucleotide
  Antisense strand to SEQ ID NO: 912030
aucuuccacuauugagcaa

SEQ ID NO: 912032 - RNA, 19 nt, Artificial Sequence
  Description of Artificial Sequence: Synthetic oligonucleotide
  Sense strand starting at position 3726 of SEQ ID NO: 588859
ugcucaauaguggaagauu

SEQ ID NO: 912033 - RNA, 19 nt, Artificial Sequence
  Description of Artificial Sequence: Synthetic oligonucleotide
  Antisense strand to SEQ ID NO: 912032
aaucuuccacuauugagca

SEQ ID NO: 912034 - RNA, 19 nt, Artificial Sequence
  Description of Artificial Sequence: Synthetic oligonucleotide
  Sense strand starting at position 15 of SEQ ID NO: 588873
agcaguuacucaguagaag

SEQ ID NO: 912035 - RNA, 19 nt, Artificial Sequence
  Description of Artificial Sequence: Synthetic oligonucleotide
  Antisense strand to SEQ ID NO: 912034
cuucuacugaguaacugcu

SEQ ID NO: 912036 - RNA, 19 nt, Artificial Sequence
  Description of Artificial Sequence: Synthetic oligonucleotide
  Sense strand starting at position 26 of SEQ ID NO: 588873
aguagaaguccaggucuaa

SEQ ID NO: 912037 - RNA, 19 nt, Artificial Sequence
  Description of Artificial Sequence: Synthetic oligonucleotide
  Antisense strand to SEQ ID NO: 912036
uuagaccuggacuucuacu

SEQ ID NO: 912038 - RNA, 19 nt, Artificial Sequence
  Description of Artificial Sequence: Synthetic oligonucleotide
  Sense strand starting at position 78 of SEQ ID NO: 588873
ccaaacucagagugaguua

SEQ ID NO: 912039 - RNA, 19 nt, Artificial Sequence
  Description of Artificial Sequence: Synthetic oligonucleotide
  Antisense strand to SEQ ID NO: 912038
uaacucacucugaguuugg

SEQ ID NO: 912040 - RNA, 19 nt, Artificial Sequence
  Description of Artificial Sequence: Synthetic oligonucleotide
  Sense strand starting at position 81 of SEQ ID NO: 588873
aacucagagugaguuauaa

SEQ ID NO: 912041 - RNA, 19 nt, Artificial Sequence
  Description of Artificial Sequence: Synthetic oligonucleotide
  Antisense strand to SEQ ID NO: 912040
uuauaacucacucugaguu

SEQ ID NO: 912042 - RNA, 19 nt, Artificial Sequence
  Description of Artificial Sequence: Synthetic oligonucleotide
  Sense strand starting at position 92 of SEQ ID NO: 588873
aguuauaagggcugggaca

SEQ ID NO: 912043 - RNA, 19 nt, Artificial Sequence
  Description of Artificial Sequence: Synthetic oligonucleotide
  Antisense strand to SEQ ID NO: 912042
ugucccagcccuuauaacu

SEQ ID NO: 912044 - RNA, 19 nt, Artificial Sequence
  Description of Artificial Sequence: Synthetic oligonucleotide
  Sense strand starting at position 159 of SEQ ID NO: 588873
acacgaauuuaggaagaca

SEQ ID NO: 912045 - RNA, 19 nt, Artificial Sequence
  Description of Artificial Sequence: Synthetic oligonucleotide
  Antisense strand to SEQ ID NO: 912044
ugucuuccuaaauucgugu

SEQ ID NO: 912046 - RNA, 19 nt, Artificial Sequence
  Description of Artificial Sequence: Synthetic oligonucleotide
  Sense strand starting at position 231 of SEQ ID NO: 588873
uggcaagacucaccaucau

SEQ ID NO: 912047 - RNA, 19 nt, Artificial Sequence
  Description of Artificial Sequence: Synthetic oligonucleotide
  Antisense strand to SEQ ID NO: 912046
augauggugagucuugcca

SEQ ID NO: 912048 - RNA, 19 nt, Artificial Sequence
  Description of Artificial Sequence: Synthetic oligonucleotide
  Sense strand starting at position 357 of SEQ ID NO: 588873
uaggauuccugaguaccua

SEQ ID NO: 912049 - RNA, 19 nt, Artificial Sequence
  Description of Artificial Sequence: Synthetic oligonucleotide
  Antisense strand to SEQ ID NO: 912048
uagguacucaggaauccua

SEQ ID NO: 912050 - RNA, 19 nt, Artificial Sequence
  Description of Artificial Sequence: Synthetic oligonucleotide
  Sense strand starting at position 476 of SEQ ID NO: 588873
gcuggaaggacaugucaua

SEQ ID NO: 912051 - RNA, 19 nt, Artificial Sequence
  Description of Artificial Sequence: Synthetic oligonucleotide
  Antisense strand to SEQ ID NO: 912050
uaugacauguccuuccagc

SEQ ID NO: 912052 - RNA, 19 nt, Artificial Sequence
  Description of Artificial Sequence: Synthetic oligonucleotide
  Sense strand starting at position 501 of SEQ ID NO: 588873
uagaaagauucugcaguga

SEQ ID NO: 912053 - RNA, 19 nt, Artificial Sequence
  Description of Artificial Sequence: Synthetic oligonucleotide
  Antisense strand to SEQ ID NO: 912052
ucacugcagaaucuuucua

SEQ ID NO: 912054 - RNA, 19 nt, Artificial Sequence
  Description of Artificial Sequence: Synthetic oligonucleotide
  Sense strand starting at position 505 of SEQ ID NO: 588873
aagauucugcagugagacu

SEQ ID NO: 912055 - RNA, 19 nt, Artificial Sequence
  Description of Artificial Sequence: Synthetic oligonucleotide
  Antisense strand to SEQ ID NO: 912054
agucucacugcagaaucuu

SEQ ID NO: 912056 - RNA, 19 nt, Artificial Sequence
  Description of Artificial Sequence: Synthetic oligonucleotide
  Sense strand starting at position 829 of SEQ ID NO: 588873
ugagccuucgcugcuuuaa

SEQ ID NO: 912057 - RNA, 19 nt, Artificial Sequence
  Description of Artificial Sequence: Synthetic oligonucleotide
  Antisense strand to SEQ ID NO: 912056
uuaaagcagcgaaggcuca

SEQ ID NO: 912058 - RNA, 19 nt, Artificial Sequence
  Description of Artificial Sequence: Synthetic oligonucleotide
  Sense strand starting at position 830 of SEQ ID NO: 588873
gagccuucgcugcuuuaac

SEQ ID NO: 912059 - RNA, 19 nt, Artificial Sequence
  Description of Artificial Sequence: Synthetic oligonucleotide
  Antisense strand to SEQ ID NO: 912058
guuaaagcagcgaaggcuc

SEQ ID NO: 912060 - RNA, 19 nt, Artificial Sequence
  Description of Artificial Sequence: Synthetic oligonucleotide
  Sense strand starting at position 832 of SEQ ID NO: 588873
gccuucgcugcuuuaacau

SEQ ID NO: 912061 - RNA, 19 nt, Artificial Sequence
  Description of Artificial Sequence: Synthetic oligonucleotide
  Antisense strand to SEQ ID NO: 912060
auguuaaagcagcgaaggc

SEQ ID NO: 912062 - RNA, 19 nt, Artificial Sequence
  Description of Artificial Sequence: Synthetic oligonucleotide
  Sense strand starting at position 866 of SEQ ID NO: 588873
caaaguucucugggaggga

SEQ ID NO: 912063 - RNA, 19 nt, Artificial Sequence
  Description of Artificial Sequence: Synthetic oligonucleotide
  Antisense strand to SEQ ID NO: 912062
ucccucccagagaacuuug

SEQ ID NO: 912064 - RNA, 19 nt, Artificial Sequence
  Description of Artificial Sequence: Synthetic oligonucleotide
  Sense strand starting at position 1135 of SEQ ID NO: 588873
agaggaguccgccacaauu

SEQ ID NO: 912065 - RNA, 19 nt, Artificial Sequence
  Description of Artificial Sequence: Synthetic oligonucleotide
  Antisense strand to SEQ ID NO: 912064
aauuguggcggacuccucu

SEQ ID NO: 912066 - RNA, 19 nt, Artificial Sequence
  Description of Artificial Sequence: Synthetic oligonucleotide
  Sense strand starting at position 1137 of SEQ ID NO: 588873
aggaguccgccacaauuga

SEQ ID NO: 912067 - RNA, 19 nt, Artificial Sequence
  Description of Artificial Sequence: Synthetic oligonucleotide
  Antisense strand to SEQ ID NO: 912066
ucaauuguggcggacuccu

SEQ ID NO: 912068 - RNA, 19 nt, Artificial Sequence
  Description of Artificial Sequence: Synthetic oligonucleotide
  Sense strand starting at position 1158 of SEQ ID NO: 588873
uugauuuagggcugucgca

SEQ ID NO: 912069 - RNA, 19 nt, Artificial Sequence
  Description of Artificial Sequence: Synthetic oligonucleotide
  Antisense strand to SEQ ID NO: 912068
ugcgacagcccuaaaucaa

SEQ ID NO: 912070 - RNA, 19 nt, Artificial Sequence
  Description of Artificial Sequence: Synthetic oligonucleotide
  Sense strand starting at position 2337 of SEQ ID NO: 588873
gggugagugacugagaagu

SEQ ID NO: 912071 - RNA, 19 nt, Artificial Sequence
  Description of Artificial Sequence: Synthetic oligonucleotide
  Antisense strand to SEQ ID NO: 912070
acuucucagucacucaccc

SEQ ID NO: 912072 - RNA, 19 nt, Artificial Sequence
  Description of Artificial Sequence: Synthetic oligonucleotide
  Sense strand starting at position 2376 of SEQ ID NO: 588873
gagagauaccggcggauug

SEQ ID NO: 912073 - RNA, 19 nt, Artificial Sequence
  Description of Artificial Sequence: Synthetic oligonucleotide
  Antisense strand to SEQ ID NO: 912072
caauccgccgguaucucuc

SEQ ID NO: 912074 - RNA, 19 nt, Artificial Sequence
  Description of Artificial Sequence: Synthetic oligonucleotide
  Sense strand starting at position 2441 of SEQ ID NO: 588873
gggagacccuugccacauu

SEQ ID NO: 912075 - RNA, 19 nt, Artificial Sequence
  Description of Artificial Sequence: Synthetic oligonucleotide
  Antisense strand to SEQ ID NO: 912074
aauguggcaagggucuccc

SEQ ID NO: 912076 - RNA, 19 nt, Artificial Sequence
  Description of Artificial Sequence: Synthetic oligonucleotide
  Sense strand starting at position 2541 of SEQ ID NO: 588873
cucucuuggcgggaagaua

SEQ ID NO: 912077 - RNA, 19 nt, Artificial Sequence
  Description of Artificial Sequence: Synthetic oligonucleotide
  Antisense strand to SEQ ID NO: 912076
uaucuucccgccaagagag

SEQ ID NO: 912078 - RNA, 19 nt, Artificial Sequence
  Description of Artificial Sequence: Synthetic oligonucleotide
  Sense strand starting at position 2552 of SEQ ID NO: 588873
ggaagauagcccuggguuu

SEQ ID NO: 912079 - RNA, 19 nt, Artificial Sequence
  Description of Artificial Sequence: Synthetic oligonucleotide
  Antisense strand to SEQ ID NO: 912078
aaacccagggcuaucuucc

SEQ ID NO: 912080 - RNA, 19 nt, Artificial Sequence
  Description of Artificial Sequence: Synthetic oligonucleotide
  Sense strand starting at position 2577 of SEQ ID NO: 588873
ugcauucugggucacaauu

SEQ ID NO: 912081 - RNA, 19 nt, Artificial Sequence
  Description of Artificial Sequence: Synthetic oligonucleotide
  Antisense strand to SEQ ID NO: 912080
aauugugacccagaaugca

SEQ ID NO: 912082 - RNA, 19 nt, Artificial Sequence
  Description of Artificial Sequence: Synthetic oligonucleotide
  Sense strand starting at position 2587 of SEQ ID NO: 588873
gucacaauuucuccgguga

SEQ ID NO: 912083 - RNA, 19 nt, Artificial Sequence
  Description of Artificial Sequence: Synthetic oligonucleotide
  Antisense strand to SEQ ID NO: 912082
ucaccggagaaauugugac

SEQ ID NO: 912084 - RNA, 19 nt, Artificial Sequence
  Description of Artificial Sequence: Synthetic oligonucleotide
  Sense strand starting at position 2608 of SEQ ID NO: 588873
ugggaaugauugcugauga

SEQ ID NO: 912085 - RNA, 19 nt, Artificial Sequence
  Description of Artificial Sequence: Synthetic oligonucleotide
  Antisense strand to SEQ ID NO: 912084
ucaucagcaaucauuccca

SEQ ID NO: 912086 - RNA, 19 nt, Artificial Sequence
  Description of Artificial Sequence: Synthetic oligonucleotide
  Sense strand starting at position 2840 of SEQ ID NO: 588873
guguguuugccucuauucu

SEQ ID NO: 912087 - RNA, 19 nt, Artificial Sequence
  Description of Artificial Sequence: Synthetic oligonucleotide
  Antisense strand to SEQ ID NO: 912086
agaauagaggcaaacacac

SEQ ID NO: 912088 - RNA, 19 nt, Artificial Sequence
  Description of Artificial Sequence: Synthetic oligonucleotide
  Sense strand starting at position 2873 of SEQ ID NO: 588873
auuagauuaugaguccuca

SEQ ID NO: 912089 - RNA, 19 nt, Artificial Sequence
  Description of Artificial Sequence: Synthetic oligonucleotide
  Antisense strand to SEQ ID NO: 912088
ugaggacucauaaucuaau

SEQ ID NO: 912090 - RNA, 19 nt, Artificial Sequence
  Description of Artificial Sequence: Synthetic oligonucleotide
  Sense strand starting at position 2996 of SEQ ID NO: 588873
gaaauugcacuuuguaaag

SEQ ID NO: 912091 - RNA, 19 nt, Artificial Sequence
  Description of Artificial Sequence: Synthetic oligonucleotide
  Antisense strand to SEQ ID NO: 912090
cuuuacaaagugcaauuuc

SEQ ID NO: 912092 - RNA, 19 nt, Artificial Sequence
  Description of Artificial Sequence: Synthetic oligonucleotide
  Sense strand starting at position 3213 of SEQ ID NO: 588873
cugaucauugcagagcuuu

SEQ ID NO: 912093 - RNA, 19 nt, Artificial Sequence
  Description of Artificial Sequence: Synthetic oligonucleotide
  Antisense strand to SEQ ID NO: 912092
aaagcucugcaaugaucag

SEQ ID NO: 912094 - RNA, 19 nt, Artificial Sequence
  Description of Artificial Sequence: Synthetic oligonucleotide
  Sense strand starting at position 3437 of SEQ ID NO: 588873
gggugagaguagucauaga

SEQ ID NO: 912095 - RNA, 19 nt, Artificial Sequence
  Description of Artificial Sequence: Synthetic oligonucleotide
  Antisense strand to SEQ ID NO: 912094
ucuaugacuacucucaccc

SEQ ID NO: 912096 - RNA, 19 nt, Artificial Sequence
  Description of Artificial Sequence: Synthetic oligonucleotide
  Sense strand starting at position 3650 of SEQ ID NO: 588873
guucuuuccguuucucagu

SEQ ID NO: 912097 - RNA, 19 nt, Artificial Sequence
  Description of Artificial Sequence: Synthetic oligonucleotide
  Antisense strand to SEQ ID NO: 912096
acugagaaacggaaagaac

SEQ ID NO: 912098 - RNA, 19 nt, Artificial Sequence
  Description of Artificial Sequence: Synthetic oligonucleotide
  Sense strand starting at position 3655 of SEQ ID NO: 588873
uuccguuucucaguuauuu

SEQ ID NO: 912099 - RNA, 19 nt, Artificial Sequence
  Description of Artificial Sequence: Synthetic oligonucleotide
  Antisense strand to SEQ ID NO: 912098
aaauaacugagaaacggaa

SEQ ID NO: 912100 - RNA, 19 nt, Artificial Sequence
  Description of Artificial Sequence: Synthetic oligonucleotide
  Sense strand starting at position 3741 of SEQ ID NO: 588873
gaaaguauuugggagaagu

SEQ ID NO: 912101 - RNA, 19 nt, Artificial Sequence
  Description of Artificial Sequence: Synthetic oligonucleotide
  Antisense strand to SEQ ID NO: 912100
acuucucccaaauacuuuc

SEQ ID NO: 912102 - RNA, 19 nt, Artificial Sequence
  Description of Artificial Sequence: Synthetic oligonucleotide
  Sense strand starting at position 3749 of SEQ ID NO: 588873
uugggagaagucuguaaug

SEQ ID NO: 912103 - RNA, 19 nt, Artificial Sequence
  Description of Artificial Sequence: Synthetic oligonucleotide
  Antisense strand to SEQ ID NO: 912102
cauuacagacuucucccaa

SEQ ID NO: 912104 - RNA, 19 nt, Artificial Sequence
  Description of Artificial Sequence: Synthetic oligonucleotide
  Sense strand starting at position 3851 of SEQ ID NO: 588873
ccagauuccuggccagaga

SEQ ID NO: 912105 - RNA, 19 nt, Artificial Sequence
  Description of Artificial Sequence: Synthetic oligonucleotide
  Antisense strand to SEQ ID NO: 912104
ucucuggccaggaaucugg

SEQ ID NO: 912106 - RNA, 19 nt, Artificial Sequence
  Description of Artificial Sequence: Synthetic oligonucleotide
  Sense strand starting at position 3867 of SEQ ID NO: 588873
agauaaauucuugguggcu

SEQ ID NO: 912107 - RNA, 19 nt, Artificial Sequence
  Description of Artificial Sequence: Synthetic oligonucleotide
  Antisense strand to SEQ ID NO: 912106
agccaccaagaauuuaucu

SEQ ID NO: 912108 - RNA, 19 nt, Artificial Sequence
  Description of Artificial Sequence: Synthetic oligonucleotide
  Sense strand starting at position 3903 of SEQ ID NO: 588873
ugagcaggcuucucaagga

SEQ ID NO: 912109 - RNA, 19 nt, Artificial Sequence
  Description of Artificial Sequence: Synthetic oligonucleotide
  Antisense strand to SEQ ID NO: 912108
uccuugagaagccugcuca

SEQ ID NO: 912110 - RNA, 19 nt, Artificial Sequence
  Description of Artificial Sequence: Synthetic oligonucleotide
  Sense strand starting at position 3932 of SEQ ID NO: 588873
uugaauucuaggcauguga

SEQ ID NO: 912111 - RNA, 19 nt, Artificial Sequence
  Description of Artificial Sequence: Synthetic oligonucleotide
  Antisense strand to SEQ ID NO: 912110
ucacaugccuagaauucaa

SEQ ID NO: 912112 - RNA, 19 nt, Artificial Sequence
  Description of Artificial Sequence: Synthetic oligonucleotide
  Sense strand starting at position 3934 of SEQ ID NO: 588873
gaauucuaggcaugugacu

SEQ ID NO: 912113 - RNA, 19 nt, Artificial Sequence
  Description of Artificial Sequence: Synthetic oligonucleotide
  Antisense strand to SEQ ID NO: 912112
agucacaugccuagaauuc

SEQ ID NO: 912114 - RNA, 19 nt, Artificial Sequence
  Description of Artificial Sequence: Synthetic oligonucleotide
  Sense strand starting at position 122 of SEQ ID NO: 588880
uggcuuucucuguaaauga

SEQ ID NO: 912115 - RNA, 19 nt, Artificial Sequence
  Description of Artificial Sequence: Synthetic oligonucleotide
  Antisense strand to SEQ ID NO: 912114
ucauuuacagagaaagcca

SEQ ID NO: 912116 - RNA, 19 nt, Artificial Sequence
  Description of Artificial Sequence: Synthetic oligonucleotide
  Sense strand starting at position 259 of SEQ ID NO: 588880
auaaaucuacccgaaguuu

SEQ ID NO: 912117 - RNA, 19 nt, Artificial Sequence
  Description of Artificial Sequence: Synthetic oligonucleotide
  Antisense strand to SEQ ID NO: 912116
aaacuucggguagauuuau

SEQ ID NO: 912118 - RNA, 19 nt, Artificial Sequence
  Description of Artificial Sequence: Synthetic oligonucleotide
  Sense strand starting at position 300 of SEQ ID NO: 588880
cgggauaagcggugaaaca

SEQ ID NO: 912119 - RNA, 19 nt, Artificial Sequence
  Description of Artificial Sequence: Synthetic oligonucleotide
  Antisense strand to SEQ ID NO: 912118
uguuucaccgcuuaucccg

SEQ ID NO: 912120 - RNA, 19 nt, Artificial Sequence
  Description of Artificial Sequence: Synthetic oligonucleotide
  Sense strand starting at position 301 of SEQ ID NO: 588880
gggauaagcggugaaacau

SEQ ID NO: 912121 - RNA, 19 nt, Artificial Sequence
  Description of Artificial Sequence: Synthetic oligonucleotide
  Antisense strand to SEQ ID NO: 912120
auguuucaccgcuuauccc

SEQ ID NO: 912122 - RNA, 19 nt, Artificial Sequence
  Description of Artificial Sequence: Synthetic oligonucleotide
  Sense strand starting at position 779 of SEQ ID NO: 588880
auaggauccuggcucuuaa

SEQ ID NO: 912123 - RNA, 19 nt, Artificial Sequence
  Description of Artificial Sequence: Synthetic oligonucleotide
  Antisense strand to SEQ ID NO: 912122
uuaagagccaggauccuau

SEQ ID NO: 912124 - RNA, 19 nt, Artificial Sequence
  Description of Artificial Sequence: Synthetic oligonucleotide
  Sense strand starting at position 864 of SEQ ID NO: 588880
ggccucuuccaugaggacu

SEQ ID NO: 912125 - RNA, 19 nt, Artificial Sequence
  Description of Artificial Sequence: Synthetic oligonucleotide
  Antisense strand to SEQ ID NO: 912124
aguccucauggaagaggcc

SEQ ID NO: 912126 - RNA, 19 nt, Artificial Sequence
  Description of Artificial Sequence: Synthetic oligonucleotide
  Sense strand starting at position 879 of SEQ ID NO: 588880
gacugacagugaucccaca

SEQ ID NO: 912127 - RNA, 19 nt, Artificial Sequence
  Description of Artificial Sequence: Synthetic oligonucleotide
  Antisense strand to SEQ ID NO: 912126
ugugggaucacugucaguc

SEQ ID NO: 912128 - RNA, 19 nt, Artificial Sequence
  Description of Artificial Sequence: Synthetic oligonucleotide
  Sense strand starting at position 979 of SEQ ID NO: 588880
gagacucauguccauuagu

SEQ ID NO: 912129 - RNA, 19 nt, Artificial Sequence
  Description of Artificial Sequence: Synthetic oligonucleotide
  Antisense strand to SEQ ID NO: 912128
acuaauggacaugagucuc

SEQ ID NO: 912130 - RNA, 19 nt, Artificial Sequence
  Description of Artificial Sequence: Synthetic oligonucleotide
  Sense strand starting at position 982 of SEQ ID NO: 588880
acucauguccauuaguagu

SEQ ID NO: 912131 - RNA, 19 nt, Artificial Sequence
  Description of Artificial Sequence: Synthetic oligonucleotide
  Antisense strand to SEQ ID NO: 912130
acuacuaauggacaugagu

SEQ ID NO: 912132 - RNA, 19 nt, Artificial Sequence
  Description of Artificial Sequence: Synthetic oligonucleotide
  Sense strand starting at position 988 of SEQ ID NO: 588880
guccauuaguaguuauaaa

SEQ ID NO: 912133 - RNA, 19 nt, Artificial Sequence
  Description of Artificial Sequence: Synthetic oligonucleotide
  Antisense strand to SEQ ID NO: 912132
uuuauaacuacuaauggac

SEQ ID NO: 912134 - RNA, 19 nt, Artificial Sequence
  Description of Artificial Sequence: Synthetic oligonucleotide
  Sense strand starting at position 1197 of SEQ ID NO: 588880
ccucauucuggauguugau

SEQ ID NO: 912135 - RNA, 19 nt, Artificial Sequence
  Description of Artificial Sequence: Synthetic oligonucleotide
  Antisense strand to SEQ ID NO: 912134
aucaacauccagaaugagg

SEQ ID NO: 912136 - RNA, 19 nt, Artificial Sequence
  Description of Artificial Sequence: Synthetic oligonucleotide
  Sense strand starting at position 1242 of SEQ ID NO: 588880
ucugacugccaagauaagu

SEQ ID NO: 912137 - RNA, 19 nt, Artificial Sequence
  Description of Artificial Sequence: Synthetic oligonucleotide
  Antisense strand to SEQ ID NO: 912136
acuuaucuuggcagucaga

SEQ ID NO: 912138 - RNA, 19 nt, Artificial Sequence
  Description of Artificial Sequence: Synthetic oligonucleotide
  Sense strand starting at position 1247 of SEQ ID NO: 588880
cugccaagauaaguuuauu

SEQ ID NO: 912139 - RNA, 19 nt, Artificial Sequence
  Description of Artificial Sequence: Synthetic oligonucleotide
  Antisense strand to SEQ ID NO: 912138
aauaaacuuaucuuggcag

SEQ ID NO: 912140 - RNA, 19 nt, Artificial Sequence
  Description of Artificial Sequence: Synthetic oligonucleotide
  Sense strand starting at position 1362 of SEQ ID NO: 588880
ucauaugcugaaugaacua

SEQ ID NO: 912141 - RNA, 19 nt, Artificial Sequence
  Description of Artificial Sequence: Synthetic oligonucleotide
  Antisense strand to SEQ ID NO: 912140
uaguucauucagcauauga

SEQ ID NO: 912142 - RNA, 19 nt, Artificial Sequence
  Description of Artificial Sequence: Synthetic oligonucleotide
  Sense strand starting at position 1990 of SEQ ID NO: 588880
gcuuucuucugaucuggga

SEQ ID NO: 912143 - RNA, 19 nt, Artificial Sequence
  Description of Artificial Sequence: Synthetic oligonucleotide
  Antisense strand to SEQ ID NO: 912142
ucccagaucagaagaaagc

SEQ ID NO: 912144 - RNA, 19 nt, Artificial Sequence
  Description of Artificial Sequence: Synthetic oligonucleotide
  Sense strand starting at position 2196 of SEQ ID NO: 588880
ucagguacauucuuuaaga

SEQ ID NO: 912145 - RNA, 19 nt, Artificial Sequence
  Description of Artificial Sequence: Synthetic oligonucleotide
  Antisense strand to SEQ ID NO: 912144
ucuuaaagaauguaccuga

SEQ ID NO: 912146 - RNA, 19 nt, Artificial Sequence
  Description of Artificial Sequence: Synthetic oligonucleotide
  Sense strand starting at position 2397 of SEQ ID NO: 588880
auccaauauccauguguga

SEQ ID NO: 912147 - RNA, 19 nt, Artificial Sequence
  Description of Artificial Sequence: Synthetic oligonucleotide
  Antisense strand to SEQ ID NO: 912146
ucacacauggauauuggau

SEQ ID NO: 912148 - RNA, 19 nt, Artificial Sequence
  Description of Artificial Sequence: Synthetic oligonucleotide
  Sense strand starting at position 2424 of SEQ ID NO: 588880
cucccagugggaugguaaa

SEQ ID NO: 912149 - RNA, 19 nt, Artificial Sequence
  Description of Artificial Sequence: Synthetic oligonucleotide
  Antisense strand to SEQ ID NO: 912148
uuuaccaucccacugggag

SEQ ID NO: 912150 - RNA, 19 nt, Artificial Sequence
  Description of Artificial Sequence: Synthetic oligonucleotide
  Sense strand starting at position 2537 of SEQ ID NO: 588880
uuggauaaccuguaagcca

SEQ ID NO: 912151 - RNA, 19 nt, Artificial Sequence
  Description of Artificial Sequence: Synthetic oligonucleotide
  Antisense strand to SEQ ID NO: 912150
uggcuuacagguuauccaa

SEQ ID NO: 912152 - RNA, 19 nt, Artificial Sequence
  Description of Artificial Sequence: Synthetic oligonucleotide
  Sense strand starting at position 2545 of SEQ ID NO: 588880
ccuguaagccaacauauga

SEQ ID NO: 912153 - RNA, 19 nt, Artificial Sequence
  Description of Artificial Sequence: Synthetic oligonucleotide
  Antisense strand to SEQ ID NO: 912152
ucauauguuggcuuacagg

SEQ ID NO: 912154 - RNA, 19 nt, Artificial Sequence
  Description of Artificial Sequence: Synthetic oligonucleotide
  Sense strand starting at position 2612 of SEQ ID NO: 588880
uccaaauucugaguuuagu

SEQ ID NO: 912155 - RNA, 19 nt, Artificial Sequence
  Description of Artificial Sequence: Synthetic oligonucleotide
  Antisense strand to SEQ ID NO: 912154
acuaaacucagaauuugga

SEQ ID NO: 912156 - RNA, 19 nt, Artificial Sequence
  Description of Artificial Sequence: Synthetic oligonucleotide
  Sense strand starting at position 2791 of SEQ ID NO: 588880
cuugcauagauguagauga

SEQ ID NO: 912157 - RNA, 19 nt, Artificial Sequence
  Description of Artificial Sequence: Synthetic oligonucleotide
  Antisense strand to SEQ ID NO: 912156
ucaucuacaucuaugcaag

SEQ ID NO: 912158 - RNA, 19 nt, Artificial Sequence
  Description of Artificial Sequence: Synthetic oligonucleotide
  Sense strand starting at position 2815 of SEQ ID NO: 588880
uggcauaagauugaugcuu

SEQ ID NO: 912159 - RNA, 19 nt, Artificial Sequence
  Description of Artificial Sequence: Synthetic oligonucleotide
  Antisense strand to SEQ ID NO: 912158
aagcaucaaucuuaugcca

SEQ ID NO: 912160 - RNA, 19 nt, Artificial Sequence
  Description of Artificial Sequence: Synthetic oligonucleotide
  Sense strand starting at position 2901 of SEQ ID NO: 588880
cagguauacggccagauua

SEQ ID NO: 912161 - RNA, 19 nt, Artificial Sequence
  Description of Artificial Sequence: Synthetic oligonucleotide
  Antisense strand to SEQ ID NO: 912160
uaaucuggccguauaccug

SEQ ID NO: 912162 - RNA, 19 nt, Artificial Sequence
  Description of Artificial Sequence: Synthetic oligonucleotide
  Sense strand starting at position 2903 of SEQ ID NO: 588880
gguauacggccagauuaca

SEQ ID NO: 912163 - RNA, 19 nt, Artificial Sequence
  Description of Artificial Sequence: Synthetic oligonucleotide
  Antisense strand to SEQ ID NO: 912162
uguaaucuggccguauacc

SEQ ID NO: 912164 - RNA, 19 nt, Artificial Sequence
  Description of Artificial Sequence: Synthetic oligonucleotide
  Sense strand starting at position 2938 of SEQ ID NO: 588880
ggaagucguagcuaucuaa

SEQ ID NO: 912165 - RNA, 19 nt, Artificial Sequence
  Description of Artificial Sequence: Synthetic oligonucleotide
  Antisense strand to SEQ ID NO: 912164
uuagauagcuacgacuucc

SEQ ID NO: 912166 - RNA, 19 nt, Artificial Sequence
  Description of Artificial Sequence: Synthetic oligonucleotide
  Sense strand starting at position 3087 of SEQ ID NO: 588880
guguaaauuaaugaggugu

SEQ ID NO: 912167 - RNA, 19 nt, Artificial Sequence
  Description of Artificial Sequence: Synthetic oligonucleotide
  Antisense strand to SEQ ID NO: 912166
acaccucauuaauuuacac

SEQ ID NO: 912168 - RNA, 19 nt, Artificial Sequence
  Description of Artificial Sequence: Synthetic oligonucleotide
  Sense strand starting at position 3095 of SEQ ID NO: 588880
uaaugagguguuuauauca

SEQ ID NO: 912169 - RNA, 19 nt, Artificial Sequence
  Description of Artificial Sequence: Synthetic oligonucleotide
  Antisense strand to SEQ ID NO: 912168
ugauauaaacaccucauua

SEQ ID NO: 912170 - RNA, 19 nt, Artificial Sequence
  Description of Artificial Sequence: Synthetic oligonucleotide
  Sense strand starting at position 3191 of SEQ ID NO: 588880
agcaucuuugacgauauau

SEQ ID NO: 912171 - RNA, 19 nt, Artificial Sequence
  Description of Artificial Sequence: Synthetic oligonucleotide
  Antisense strand to SEQ ID NO: 912170
auauaucgucaaagaugcu

SEQ ID NO: 912172 - RNA, 19 nt, Artificial Sequence
  Description of Artificial Sequence: Synthetic oligonucleotide
  Sense strand starting at position 3270 of SEQ ID NO: 588880
cuauauuaacauggguaau

SEQ ID NO: 912173 - RNA, 19 nt, Artificial Sequence
  Description of Artificial Sequence: Synthetic oligonucleotide
  Antisense strand to SEQ ID NO: 912172
auuacccauguuaauauag

SEQ ID NO: 912174 - RNA, 19 nt, Artificial Sequence
  Description of Artificial Sequence: Synthetic oligonucleotide
  Sense strand starting at position 3428 of SEQ ID NO: 588880
cuccuauagucccuaguaa

SEQ ID NO: 912175 - RNA, 19 nt, Artificial Sequence
  Description of Artificial Sequence: Synthetic oligonucleotide
  Antisense strand to SEQ ID NO: 912174
uuacuagggacuauaggag

SEQ ID NO: 912176 - RNA, 19 nt, Artificial Sequence
  Description of Artificial Sequence: Synthetic oligonucleotide
  Sense strand starting at position 3429 of SEQ ID NO: 588880
uccuauagucccuaguaag

SEQ ID NO: 912177 - RNA, 19 nt, Artificial Sequence
  Description of Artificial Sequence: Synthetic oligonucleotide
  Antisense strand to SEQ ID NO: 912176
cuuacuagggacuauagga

SEQ ID NO: 912178 - RNA, 19 nt, Artificial Sequence
  Description of Artificial Sequence: Synthetic oligonucleotide
  Sense strand starting at position 3435 of SEQ ID NO: 588880
agucccuaguaaguauaaa

SEQ ID NO: 912179 - RNA, 19 nt, Artificial Sequence
  Description of Artificial Sequence: Synthetic oligonucleotide
  Antisense strand to SEQ ID NO: 912178
uuuauacuuacuagggacu

SEQ ID NO: 912180 - RNA, 19 nt, Artificial Sequence
  Description of Artificial Sequence: Synthetic oligonucleotide
  Sense strand starting at position 3568 of SEQ ID NO: 588880
uuauuaaccggcuaaaggu

SEQ ID NO: 912181 - RNA, 19 nt, Artificial Sequence
  Description of Artificial Sequence: Synthetic oligonucleotide
  Antisense strand to SEQ ID NO: 912180
accuuuagccgguuaauaa

SEQ ID NO: 912182 - RNA, 19 nt, Artificial Sequence
  Description of Artificial Sequence: Synthetic oligonucleotide
  Sense strand starting at position 3633 of SEQ ID NO: 588880
auccucuauuggccaaaga

SEQ ID NO: 912183 - RNA, 19 nt, Artificial Sequence
  Description of Artificial Sequence: Synthetic oligonucleotide
  Antisense strand to SEQ ID NO: 912182
ucuuuggccaauagaggau

SEQ ID NO: 912184 - RNA, 19 nt, Artificial Sequence
  Description of Artificial Sequence: Synthetic oligonucleotide
  Sense strand starting at position 3847 of SEQ ID NO: 588880
aagaauuugucccuaucgu

SEQ ID NO: 912185 - RNA, 19 nt, Artificial Sequence
  Description of Artificial Sequence: Synthetic oligonucleotide
  Antisense strand to SEQ ID NO: 912184
acgauagggacaaauucuu

SEQ ID NO: 912186 - RNA, 19 nt, Artificial Sequence
  Description of Artificial Sequence: Synthetic oligonucleotide
  Sense strand starting at position 3899 of SEQ ID NO: 588880
aucuuaaagugguuaaauc

SEQ ID NO: 912187 - RNA, 19 nt, Artificial Sequence
  Description of Artificial Sequence: Synthetic oligonucleotide
  Antisense strand to SEQ ID NO: 912186
gauuuaaccacuuuaagau

SEQ ID NO: 912188 - RNA, 19 nt, Artificial Sequence
  Description of Artificial Sequence: Synthetic oligonucleotide
  Sense strand starting at position 3942 of SEQ ID NO: 588880
uugcaaaugcugggaaaca

SEQ ID NO: 912189 - RNA, 19 nt, Artificial Sequence
  Description of Artificial Sequence: Synthetic oligonucleotide
  Antisense strand to SEQ ID NO: 912188
uguuucccagcauuugcaa

SEQ ID NO: 912190 - RNA, 19 nt, Artificial Sequence
  Description of Artificial Sequence: Synthetic oligonucleotide
  Sense strand starting at position 3953 of SEQ ID NO: 588880
gggaaacaguccuuaguau

SEQ ID NO: 912191 - RNA, 19 nt, Artificial Sequence
  Description of Artificial Sequence: Synthetic oligonucleotide
  Antisense strand to SEQ ID NO: 912190
auacuaaggacuguuuccc

SEQ ID NO: 912192 - RNA, 19 nt, Artificial Sequence
  Description of Artificial Sequence: Synthetic oligonucleotide
  Sense strand starting at position 3954 of SEQ ID NO: 588880
ggaaacaguccuuaguauu

SEQ ID NO: 912193 - RNA, 19 nt, Artificial Sequence
  Description of Artificial Sequence: Synthetic oligonucleotide
  Antisense strand to SEQ ID NO: 912192
aauacuaaggacuguuucc

SEQ ID NO: 912194 - RNA, 19 nt, Artificial Sequence
  Description of Artificial Sequence: Synthetic oligonucleotide
  Sense strand starting at position 480 of SEQ ID NO: 588881
gugcgugucaucguuggga

SEQ ID NO: 912195 - RNA, 19 nt, Artificial Sequence
  Description of Artificial Sequence: Synthetic oligonucleotide
  Antisense strand to SEQ ID NO: 912194
ucccaacgaugacacgcac

SEQ ID NO: 912196 - RNA, 19 nt, Artificial Sequence
  Description of Artificial Sequence: Synthetic oligonucleotide
  Sense strand starting at position 608 of SEQ ID NO: 588881
gcgcggguccuguuuguga

SEQ ID NO: 912197 - RNA, 19 nt, Artificial Sequence
  Description of Artificial Sequence: Synthetic oligonucleotide
  Antisense strand to SEQ ID NO: 912196
ucacaaacaggacccgcgc

SEQ ID NO: 912198 - RNA, 19 nt, Artificial Sequence
  Description of Artificial Sequence: Synthetic oligonucleotide
  Sense strand starting at position 887 of SEQ ID NO: 588881
gccggacaucccgaacuuu

SEQ ID NO: 912199 - RNA, 19 nt, Artificial Sequence
  Description of Artificial Sequence: Synthetic oligonucleotide
  Antisense strand to SEQ ID NO: 912198
aaaguucgggauguccggc

SEQ ID NO: 912200 - RNA, 19 nt, Artificial Sequence
  Description of Artificial Sequence: Synthetic oligonucleotide
  Sense strand starting at position 1271 of SEQ ID NO: 588881
ggaggguugcccgggauga

SEQ ID NO: 912201 - RNA, 19 nt, Artificial Sequence
  Description of Artificial Sequence: Synthetic oligonucleotide
  Antisense strand to SEQ ID NO: 912200
ucaucccgggcaacccucc

SEQ ID NO: 912202 - RNA, 19 nt, Artificial Sequence
  Description of Artificial Sequence: Synthetic oligonucleotide
  Sense strand starting at position 1272 of SEQ ID NO: 588881
gaggguugcccgggaugaa

SEQ ID NO: 912203 - RNA, 19 nt, Artificial Sequence
  Description of Artificial Sequence: Synthetic oligonucleotide
  Antisense strand to SEQ ID NO: 912202
uucaucccgggcaacccuc

SEQ ID NO: 912204 - RNA, 19 nt, Artificial Sequence
  Description of Artificial Sequence: Synthetic oligonucleotide
  Sense strand starting at position 1521 of SEQ ID NO: 588881
uuauuagaacagcaagguu

SEQ ID NO: 912205 - RNA, 19 nt, Artificial Sequence
  Description of Artificial Sequence: Synthetic oligonucleotide
  Antisense strand to SEQ ID NO: 912204
aaccuugcuguucuaauaa

SEQ ID NO: 912206 - RNA, 19 nt, Artificial Sequence
  Description of Artificial Sequence: Synthetic oligonucleotide
  Sense strand starting at position 1530 of SEQ ID NO: 588881
cagcaagguucgguugaaa

SEQ ID NO: 912207 - RNA, 19 nt, Artificial Sequence
  Description of Artificial Sequence: Synthetic oligonucleotide
  Antisense strand to SEQ ID NO: 912206
uuucaaccgaaccuugcug

SEQ ID NO: 912208 - RNA, 19 nt, Artificial Sequence
  Description of Artificial Sequence: Synthetic oligonucleotide
  Sense strand starting at position 1533 of SEQ ID NO: 588881
caagguucgguugaaacuu

SEQ ID NO: 912209 - RNA, 19 nt, Artificial Sequence
  Description of Artificial Sequence: Synthetic oligonucleotide
  Antisense strand to SEQ ID NO: 912208
aaguuucaaccgaaccuug

SEQ ID NO: 912210 - RNA, 19 nt, Artificial Sequence
  Description of Artificial Sequence: Synthetic oligonucleotide
  Sense strand starting at position 1576 of SEQ ID NO: 588881
ggagcugucguuagagcau

SEQ ID NO: 912211 - RNA, 19 nt, Artificial Sequence
  Description of Artificial Sequence: Synthetic oligonucleotide
  Antisense strand to SEQ ID NO: 912210
augcucuaacgacagcucc

SEQ ID NO: 912212 - RNA, 19 nt, Artificial Sequence
  Description of Artificial Sequence: Synthetic oligonucleotide
  Sense strand starting at position 1704 of SEQ ID NO: 588881
auggauaaucccgggcgaa

SEQ ID NO: 912213 - RNA, 19 nt, Artificial Sequence
  Description of Artificial Sequence: Synthetic oligonucleotide
  Antisense strand to SEQ ID NO: 912212
uucgcccgggauuauccau

SEQ ID NO: 912214 - RNA, 19 nt, Artificial Sequence
  Description of Artificial Sequence: Synthetic oligonucleotide
  Sense strand starting at position 1705 of SEQ ID NO: 588881
uggauaaucccgggcgaag

SEQ ID NO: 912215 - RNA, 19 nt, Artificial Sequence
  Description of Artificial Sequence: Synthetic oligonucleotide
  Antisense strand to SEQ ID NO: 912214
cuucgcccgggauuaucca

SEQ ID NO: 912216 - RNA, 19 nt, Artificial Sequence
  Description of Artificial Sequence: Synthetic oligonucleotide
  Sense strand starting at position 2134 of SEQ ID NO: 588881
ucuagacagcucuacugua

SEQ ID NO: 912217 - RNA, 19 nt, Artificial Sequence
  Description of Artificial Sequence: Synthetic oligonucleotide
  Antisense strand to SEQ ID NO: 912216
uacaguagagcugucuaga

SEQ ID NO: 912218 - RNA, 19 nt, Artificial Sequence
  Description of Artificial Sequence: Synthetic oligonucleotide
  Sense strand starting at position 2354 of SEQ ID NO: 588881
ggagggcagccguaguaau

SEQ ID NO: 912219 - RNA, 19 nt, Artificial Sequence
  Description of Artificial Sequence: Synthetic oligonucleotide
  Antisense strand to SEQ ID NO: 912218
auuacuacggcugcccucc

SEQ ID NO: 912220 - RNA, 19 nt, Artificial Sequence
  Description of Artificial Sequence: Synthetic oligonucleotide
  Sense strand starting at position 2534 of SEQ ID NO: 588881
auugucgugccggcugaaa

SEQ ID NO: 912221 - RNA, 19 nt, Artificial Sequence
  Description of Artificial Sequence: Synthetic oligonucleotide
  Antisense strand to SEQ ID NO: 912220
uuucagccggcacgacaau

SEQ ID NO: 912222 - RNA, 19 nt, Artificial Sequence
  Description of Artificial Sequence: Synthetic oligonucleotide
  Sense strand starting at position 2722 of SEQ ID NO: 588881
ggcugaacgccuuauaaau

SEQ ID NO: 912223 - RNA, 19 nt, Artificial Sequence
  Description of Artificial Sequence: Synthetic oligonucleotide
  Antisense strand to SEQ ID NO: 912222
auuuauaaggcguucagcc

SEQ ID NO: 912224 - RNA, 19 nt, Artificial Sequence
  Description of Artificial Sequence: Synthetic oligonucleotide
  Sense strand starting at position 2978 of SEQ ID NO: 588881
accaauuaaggcugcaaau

SEQ ID NO: 912225 - RNA, 19 nt, Artificial Sequence
  Description of Artificial Sequence: Synthetic oligonucleotide
  Antisense strand to SEQ ID NO: 912224
auuugcagccuuaauuggu

SEQ ID NO: 912226 - RNA, 19 nt, Artificial Sequence
  Description of Artificial Sequence: Synthetic oligonucleotide
  Sense strand starting at position 2996 of SEQ ID NO: 588881
uuguaauuugcuggcaagu

SEQ ID NO: 912227 - RNA, 19 nt, Artificial Sequence
  Description of Artificial Sequence: Synthetic oligonucleotide
  Antisense strand to SEQ ID NO: 912226
acuugccagcaaauuacaa

SEQ ID NO: 912228 - RNA, 19 nt, Artificial Sequence
  Description of Artificial Sequence: Synthetic oligonucleotide
  Sense strand starting at position 3057 of SEQ ID NO: 588881
aguacuuuggccggaccaa

SEQ ID NO: 912229 - RNA, 19 nt, Artificial Sequence
  Description of Artificial Sequence: Synthetic oligonucleotide
  Antisense strand to SEQ ID NO: 912228
uugguccggccaaaguacu

SEQ ID NO: 912230 - RNA, 19 nt, Artificial Sequence
  Description of Artificial Sequence: Synthetic oligonucleotide
  Sense strand starting at position 3058 of SEQ ID NO: 588881
guacuuuggccggaccaau

SEQ ID NO: 912231 - RNA, 19 nt, Artificial Sequence
  Description of Artificial Sequence: Synthetic oligonucleotide
  Antisense strand to SEQ ID NO: 912230
auugguccggccaaaguac

SEQ ID NO: 912232 - RNA, 19 nt, Artificial Sequence
  Description of Artificial Sequence: Synthetic oligonucleotide
  Sense strand starting at position 3116 of SEQ ID NO: 588881
ugaagugugaaagaauguu

SEQ ID NO: 912233 - RNA, 19 nt, Artificial Sequence
  Description of Artificial Sequence: Synthetic oligonucleotide
  Antisense strand to SEQ ID NO: 912232
aacauucuuucacacuuca

SEQ ID NO: 912234 - RNA, 19 nt, Artificial Sequence
  Description of Artificial Sequence: Synthetic oligonucleotide
  Sense strand starting at position 3171 of SEQ ID NO: 588881
cagauuaauguagaugcuu

SEQ ID NO: 912235 - RNA, 19 nt, Artificial Sequence
  Description of Artificial Sequence: Synthetic oligonucleotide
  Antisense strand to SEQ ID NO: 912234
aagcaucuacauuaaucug

SEQ ID NO: 912236 - RNA, 19 nt, Artificial Sequence
  Description of Artificial Sequence: Synthetic oligonucleotide
  Sense strand starting at position 3180 of SEQ ID NO: 588881
guagaugcuugacucuuaa

SEQ ID NO: 912237 - RNA, 19 nt, Artificial Sequence
  Description of Artificial Sequence: Synthetic oligonucleotide
  Antisense strand to SEQ ID NO: 912236
uuaagagucaagcaucuac

SEQ ID NO: 912238 - RNA, 19 nt, Artificial Sequence
  Description of Artificial Sequence: Synthetic oligonucleotide
  Sense strand starting at position 3238 of SEQ ID NO: 588881
aucccuuauuucguaaugu

SEQ ID NO: 912239 - RNA, 19 nt, Artificial Sequence
  Description of Artificial Sequence: Synthetic oligonucleotide
  Antisense strand to SEQ ID NO: 912238
acauuacgaaauaagggau

SEQ ID NO: 912240 - RNA, 19 nt, Artificial Sequence
  Description of Artificial Sequence: Synthetic oligonucleotide
  Sense strand starting at position 3277 of SEQ ID NO: 588881
caaagugcacugugacuau

SEQ ID NO: 912241 - RNA, 19 nt, Artificial Sequence
  Description of Artificial Sequence: Synthetic oligonucleotide
  Antisense strand to SEQ ID NO: 912240
auagucacagugcacuuug

SEQ ID NO: 912242 - RNA, 19 nt, Artificial Sequence
  Description of Artificial Sequence: Synthetic oligonucleotide
  Sense strand starting at position 3288 of SEQ ID NO: 588881
gugacuaucugguugagga

SEQ ID NO: 912243 - RNA, 19 nt, Artificial Sequence
  Description of Artificial Sequence: Synthetic oligonucleotide
  Antisense strand to SEQ ID NO: 912242
uccucaaccagauagucac

SEQ ID NO: 912244 - RNA, 19 nt, Artificial Sequence
  Description of Artificial Sequence: Synthetic oligonucleotide
  Sense strand starting at position 3289 of SEQ ID NO: 588881
ugacuaucugguugaggau

SEQ ID NO: 912245 - RNA, 19 nt, Artificial Sequence
  Description of Artificial Sequence: Synthetic oligonucleotide
  Antisense strand to SEQ ID NO: 912244
auccucaaccagauaguca

SEQ ID NO: 912246 - RNA, 19 nt, Artificial Sequence
  Description of Artificial Sequence: Synthetic oligonucleotide
  Sense strand starting at position 3461 of SEQ ID NO: 588881
acugccauguagucauuaa

SEQ ID NO: 912247 - RNA, 19 nt, Artificial Sequence
  Description of Artificial Sequence: Synthetic oligonucleotide
  Antisense strand to SEQ ID NO: 912246
uuaaugacuacauggcagu

SEQ ID NO: 912248 - RNA, 19 nt, Artificial Sequence
  Description of Artificial Sequence: Synthetic oligonucleotide
  Sense strand starting at position 3491 of SEQ ID NO: 588881
ucuuuauaucacuggucca

SEQ ID NO: 912249 - RNA, 19 nt, Artificial Sequence
  Description of Artificial Sequence: Synthetic oligonucleotide
  Antisense strand to SEQ ID NO: 912248
uggaccagugauauaaaga

SEQ ID NO: 912250 - RNA, 19 nt, Artificial Sequence
  Description of Artificial Sequence: Synthetic oligonucleotide
  Sense strand starting at position 3546 of SEQ ID NO: 588881
ucaugauggcugggagugu

SEQ ID NO: 912251 - RNA, 19 nt, Artificial Sequence
  Description of Artificial Sequence: Synthetic oligonucleotide
  Antisense strand to SEQ ID NO: 912250
acacucccagccaucauga

SEQ ID NO: 912252 - RNA, 19 nt, Artificial Sequence
  Description of Artificial Sequence: Synthetic oligonucleotide
  Sense strand starting at position 3555 of SEQ ID NO: 588881
cugggaguguuggugauca

SEQ ID NO: 912253 - RNA, 19 nt, Artificial Sequence
  Description of Artificial Sequence: Synthetic oligonucleotide
  Antisense strand to SEQ ID NO: 912252
ugaucaccaacacucccag

SEQ ID NO: 912254 - RNA, 19 nt, Artificial Sequence
  Description of Artificial Sequence: Synthetic oligonucleotide
  Sense strand starting at position 3559 of SEQ ID NO: 588881
gaguguuggugaucaccca

SEQ ID NO: 912255 - RNA, 19 nt, Artificial Sequence
  Description of Artificial Sequence: Synthetic oligonucleotide
  Antisense strand to SEQ ID NO: 912254
ugggugaucaccaacacuc

SEQ ID NO: 912256 - RNA, 19 nt, Artificial Sequence
  Description of Artificial Sequence: Synthetic oligonucleotide
  Sense strand starting at position 3578 of SEQ ID NO: 588881
cccuauagcuuucuaaggu

SEQ ID NO: 912257 - RNA, 19 nt, Artificial Sequence
  Description of Artificial Sequence: Synthetic oligonucleotide
  Antisense strand to SEQ ID NO: 912256
accuuagaaagcuauaggg

SEQ ID NO: 912258 - RNA, 19 nt, Artificial Sequence
  Description of Artificial Sequence: Synthetic oligonucleotide
  Sense strand starting at position 3633 of SEQ ID NO: 588881
ucugucuaucuugaaguga

SEQ ID NO: 912259 - RNA, 19 nt, Artificial Sequence
  Description of Artificial Sequence: Synthetic oligonucleotide
  Antisense strand to SEQ ID NO: 912258
ucacuucaagauagacaga

SEQ ID NO: 912260 - RNA, 19 nt, Artificial Sequence
  Description of Artificial Sequence: Synthetic oligonucleotide
  Sense strand starting at position 3692 of SEQ ID NO: 588881
aauauagugugcccugaag

SEQ ID NO: 912261 - RNA, 19 nt, Artificial Sequence
  Description of Artificial Sequence: Synthetic oligonucleotide
  Antisense strand to SEQ ID NO: 912260
cuucagggcacacuauauu

SEQ ID NO: 912262 - RNA, 19 nt, Artificial Sequence
  Description of Artificial Sequence: Synthetic oligonucleotide
  Sense strand starting at position 3694 of SEQ ID NO: 588881
uauagugugcccugaagga

SEQ ID NO: 912263 - RNA, 19 nt, Artificial Sequence
  Description of Artificial Sequence: Synthetic oligonucleotide
  Antisense strand to SEQ ID NO: 912262
uccuucagggcacacuaua

SEQ ID NO: 912264 - RNA, 19 nt, Artificial Sequence
  Description of Artificial Sequence: Synthetic oligonucleotide
  Sense strand starting at position 3740 of SEQ ID NO: 588881
ugaggauaugccgguauaa

SEQ ID NO: 912265 - RNA, 19 nt, Artificial Sequence
  Description of Artificial Sequence: Synthetic oligonucleotide
  Antisense strand to SEQ ID NO: 912264
uuauaccggcauauccuca

SEQ ID NO: 912266 - RNA, 19 nt, Artificial Sequence
  Description of Artificial Sequence: Synthetic oligonucleotide
  Sense strand starting at position 3742 of SEQ ID NO: 588881
aggauaugccgguauaacu

SEQ ID NO: 912267 - RNA, 19 nt, Artificial Sequence
  Description of Artificial Sequence: Synthetic oligonucleotide
  Antisense strand to SEQ ID NO: 912266
aguuauaccggcauauccu

SEQ ID NO: 912268 - RNA, 19 nt, Artificial Sequence
  Description of Artificial Sequence: Synthetic oligonucleotide
  Sense strand starting at position 3919 of SEQ ID NO: 588881
ugcuuauuacauugagagu

SEQ ID NO: 912269 - RNA, 19 nt, Artificial Sequence
  Description of Artificial Sequence: Synthetic oligonucleotide
  Antisense strand to SEQ ID NO: 912268
acucucaauguaauaagca

SEQ ID NO: 912270 - RNA, 19 nt, Artificial Sequence
  Description of Artificial Sequence: Synthetic oligonucleotide
  Sense strand starting at position 3958 of SEQ ID NO: 588881
gggucuaauuuguuucucu

SEQ ID NO: 912271 - RNA, 19 nt, Artificial Sequence
  Description of Artificial Sequence: Synthetic oligonucleotide
  Antisense strand to SEQ ID NO: 912270
agagaaacaaauuagaccc

SEQ ID NO: 912272 - RNA, 19 nt, Artificial Sequence
  Description of Artificial Sequence: Synthetic oligonucleotide
  Sense strand starting at position 3962 of SEQ ID NO: 588881
cuaauuuguuucucuggca

SEQ ID NO: 912273 - RNA, 19 nt, Artificial Sequence
  Description of Artificial Sequence: Synthetic oligonucleotide
  Antisense strand to SEQ ID NO: 912272
ugccagagaaacaaauuag

SEQ ID NO: 912274 - RNA, 19 nt, Artificial Sequence
  Description of Artificial Sequence: Synthetic oligonucleotide
  Sense strand starting at position 55 of SEQ ID NO: 588947
gaguguccuggugggcaaa

SEQ ID NO: 912275 - RNA, 19 nt, Artificial Sequence
  Description of Artificial Sequence: Synthetic oligonucleotide
  Antisense strand to SEQ ID NO: 912274
uuugcccaccaggacacuc

SEQ ID NO: 912276 - RNA, 19 nt, Artificial Sequence
  Description of Artificial Sequence: Synthetic oligonucleotide
  Sense strand starting at position 184 of SEQ ID NO: 588947
aacggaucccuugggugau

SEQ ID NO: 912277 - RNA, 19 nt, Artificial Sequence
  Description of Artificial Sequence: Synthetic oligonucleotide
  Antisense strand to SEQ ID NO: 912276
aucacccaagggauccguu

SEQ ID NO: 912278 - RNA, 19 nt, Artificial Sequence
  Description of Artificial Sequence: Synthetic oligonucleotide
  Sense strand starting at position 194 of SEQ ID NO: 588947
uugggugauccugauucag

SEQ ID NO: 912279 - RNA, 19 nt, Artificial Sequence
  Description of Artificial Sequence: Synthetic oligonucleotide
  Antisense strand to SEQ ID NO: 912278
cugaaucaggaucacccaa

SEQ ID NO: 912280 - RNA, 19 nt, Artificial Sequence
  Description of Artificial Sequence: Synthetic oligonucleotide
  Sense strand starting at position 196 of SEQ ID NO: 588947
gggugauccugauucagca

SEQ ID NO: 912281 - RNA, 19 nt, Artificial Sequence
  Description of Artificial Sequence: Synthetic oligonucleotide
  Antisense strand to SEQ ID NO: 912280
ugcugaaucaggaucaccc

SEQ ID NO: 912282 - RNA, 19 nt, Artificial Sequence
  Description of Artificial Sequence: Synthetic oligonucleotide
  Sense strand starting at position 291 of SEQ ID NO: 588947
acgugaacacuugaaagua

SEQ ID NO: 912283 - RNA, 19 nt, Artificial Sequence
  Description of Artificial Sequence: Synthetic oligonucleotide
  Antisense strand to SEQ ID NO: 912282
uacuuucaaguguucacgu

SEQ ID NO: 912284 - RNA, 19 nt, Artificial Sequence
  Description of Artificial Sequence: Synthetic oligonucleotide
  Sense strand starting at position 342 of SEQ ID NO: 588947
acagguuccucaccaggaa

SEQ ID NO: 912285 - RNA, 19 nt, Artificial Sequence
  Description of Artificial Sequence: Synthetic oligonucleotide
  Antisense strand to SEQ ID NO: 912284
uuccuggugaggaaccugu

SEQ ID NO: 912286 - RNA, 19 nt, Artificial Sequence
  Description of Artificial Sequence: Synthetic oligonucleotide
  Sense strand starting at position 371 of SEQ ID NO: 588947
uagguaguaucucucaagu

SEQ ID NO: 912287 - RNA, 19 nt, Artificial Sequence
  Description of Artificial Sequence: Synthetic oligonucleotide
  Antisense strand to SEQ ID NO: 912286
acuugagagauacuaccua

SEQ ID NO: 912288 - RNA, 19 nt, Artificial Sequence
  Description of Artificial Sequence: Synthetic oligonucleotide
  Sense strand starting at position 382 of SEQ ID NO: 588947
ucucaaguggauugguuaa

SEQ ID NO: 912289 - RNA, 19 nt, Artificial Sequence
  Description of Artificial Sequence: Synthetic oligonucleotide
  Antisense strand to SEQ ID NO: 912288
uuaaccaauccacuugaga

SEQ ID NO: 912290 - RNA, 19 nt, Artificial Sequence
  Description of Artificial Sequence: Synthetic oligonucleotide
  Sense strand starting at position 394 of SEQ ID NO: 588947
ugguuaagggcuuaacuua

SEQ ID NO: 912291 - RNA, 19 nt, Artificial Sequence
  Description of Artificial Sequence: Synthetic oligonucleotide
  Antisense strand to SEQ ID NO: 912290
uaaguuaagcccuuaacca

SEQ ID NO: 912292 - RNA, 19 nt, Artificial Sequence
  Description of Artificial Sequence: Synthetic oligonucleotide
  Sense strand starting at position 605 of SEQ ID NO: 588947
cucgaagaaugccuggaau

SEQ ID NO: 912293 - RNA, 19 nt, Artificial Sequence
  Description of Artificial Sequence: Synthetic oligonucleotide
  Antisense strand to SEQ ID NO: 912292
auuccaggcauucuucgag

SEQ ID NO: 912294 - RNA, 19 nt, Artificial Sequence
  Description of Artificial Sequence: Synthetic oligonucleotide
  Sense strand starting at position 607 of SEQ ID NO: 588947
cgaagaaugccuggaauuc

SEQ ID NO: 912295 - RNA, 19 nt, Artificial Sequence
  Description of Artificial Sequence: Synthetic oligonucleotide
  Antisense strand to SEQ ID NO: 912294
gaauuccaggcauucuucg

SEQ ID NO: 912296 - RNA, 19 nt, Artificial Sequence
  Description of Artificial Sequence: Synthetic oligonucleotide
  Sense strand starting at position 681 of SEQ ID NO: 588947
auagaagaaccuugcaaug

SEQ ID NO: 912297 - RNA, 19 nt, Artificial Sequence
  Description of Artificial Sequence: Synthetic oligonucleotide
  Antisense strand to SEQ ID NO: 912296
cauugcaagguucuucuau

SEQ ID NO: 912298 - RNA, 19 nt, Artificial Sequence
  Description of Artificial Sequence: Synthetic oligonucleotide
  Sense strand starting at position 713 of SEQ ID NO: 588947
cuuacaacgcccuguauau

SEQ ID NO: 912299 - RNA, 19 nt, Artificial Sequence
  Description of Artificial Sequence: Synthetic oligonucleotide
  Antisense strand to SEQ ID NO: 912298
auauacagggcguuguaag

SEQ ID NO: 912300 - RNA, 19 nt, Artificial Sequence
  Description of Artificial Sequence: Synthetic oligonucleotide
  Sense strand starting at position 814 of SEQ ID NO: 588947
cgcguuaggcggaggagau

SEQ ID NO: 912301 - RNA, 19 nt, Artificial Sequence
  Description of Artificial Sequence: Synthetic oligonucleotide
  Antisense strand to SEQ ID NO: 912300
aucuccuccgccuaacgcg

SEQ ID NO: 912302 - RNA, 19 nt, Artificial Sequence
  Description of Artificial Sequence: Synthetic oligonucleotide
  Sense strand starting at position 1099 of SEQ ID NO: 588947
guuuccaucccuugaguga

SEQ ID NO: 912303 - RNA, 19 nt, Artificial Sequence
  Description of Artificial Sequence: Synthetic oligonucleotide
  Antisense strand to SEQ ID NO: 912302
ucacucaagggauggaaac

SEQ ID NO: 912304 - RNA, 19 nt, Artificial Sequence
  Description of Artificial Sequence: Synthetic oligonucleotide
  Sense strand starting at position 1100 of SEQ ID NO: 588947
uuuccaucccuugagugaa

SEQ ID NO: 912305 - RNA, 19 nt, Artificial Sequence
  Description of Artificial Sequence: Synthetic oligonucleotide
  Antisense strand to SEQ ID NO: 912304
uucacucaagggauggaaa

SEQ ID NO: 912306 - RNA, 19 nt, Artificial Sequence
  Description of Artificial Sequence: Synthetic oligonucleotide
  Sense strand starting at position 1189 of SEQ ID NO: 588947
ggcacaccuguugaugauu

SEQ ID NO: 912307 - RNA, 19 nt, Artificial Sequence
  Description of Artificial Sequence: Synthetic oligonucleotide
  Antisense strand to SEQ ID NO: 912306
aaucaucaacaggugugcc

SEQ ID NO: 912308 - RNA, 19 nt, Artificial Sequence
  Description of Artificial Sequence: Synthetic oligonucleotide
  Sense strand starting at position 1265 of SEQ ID NO: 588947
aaaguaaaugcccgaugaa

SEQ ID NO: 912309 - RNA, 19 nt, Artificial Sequence
  Description of Artificial Sequence: Synthetic oligonucleotide
  Antisense strand to SEQ ID NO: 912308
uucaucgggcauuuacuuu

SEQ ID NO: 912310 - RNA, 19 nt, Artificial Sequence
  Description of Artificial Sequence: Synthetic oligonucleotide
  Sense strand starting at position 1266 of SEQ ID NO: 588947
aaguaaaugcccgaugaag

SEQ ID NO: 912311 - RNA, 19 nt, Artificial Sequence
  Description of Artificial Sequence: Synthetic oligonucleotide
  Antisense strand to SEQ ID NO: 912310
cuucaucgggcauuuacuu

SEQ ID NO: 912312 - RNA, 19 nt, Artificial Sequence
  Description of Artificial Sequence: Synthetic oligonucleotide
  Sense strand starting at position 1268 of SEQ ID NO: 588947
guaaaugcccgaugaagua

SEQ ID NO: 912313 - RNA, 19 nt, Artificial Sequence
  Description of Artificial Sequence: Synthetic oligonucleotide
  Antisense strand to SEQ ID NO: 912312
uacuucaucgggcauuuac

SEQ ID NO: 912314 - RNA, 19 nt, Artificial Sequence
  Description of Artificial Sequence: Synthetic oligonucleotide
  Sense strand starting at position 1380 of SEQ ID NO: 588947
gcgaauucgcgcccaccaa

SEQ ID NO: 912315 - RNA, 19 nt, Artificial Sequence
  Description of Artificial Sequence: Synthetic oligonucleotide
  Antisense strand to SEQ ID NO: 912314
uuggugggcgcgaauucgc

SEQ ID NO: 912316 - RNA, 19 nt, Artificial Sequence
  Description of Artificial Sequence: Synthetic oligonucleotide
  Sense strand starting at position 1743 of SEQ ID NO: 588947
gcggcugcucccguauauu

SEQ ID NO: 912317 - RNA, 19 nt, Artificial Sequence
  Description of Artificial Sequence: Synthetic oligonucleotide
  Antisense strand to SEQ ID NO: 912316
aauauacgggagcagccgc

SEQ ID NO: 912318 - RNA, 19 nt, Artificial Sequence
  Description of Artificial Sequence: Synthetic oligonucleotide
  Sense strand starting at position 1751 of SEQ ID NO: 588947
ucccguauauuauugugau

SEQ ID NO: 912319 - RNA, 19 nt, Artificial Sequence
  Description of Artificial Sequence: Synthetic oligonucleotide
  Antisense strand to SEQ ID NO: 912318
aucacaauaauauacggga

SEQ ID NO: 912320 - RNA, 19 nt, Artificial Sequence
  Description of Artificial Sequence: Synthetic oligonucleotide
  Sense strand starting at position 1759 of SEQ ID NO: 588947
auuauugugauucgggcua

SEQ ID NO: 912321 - RNA, 19 nt, Artificial Sequence
  Description of Artificial Sequence: Synthetic oligonucleotide
  Antisense strand to SEQ ID NO: 912320
uagcccgaaucacaauaau

SEQ ID NO: 912322 - RNA, 19 nt, Artificial Sequence
  Description of Artificial Sequence: Synthetic oligonucleotide
  Sense strand starting at position 1783 of SEQ ID NO: 588947
uguuuagagguuugagaga

SEQ ID NO: 912323 - RNA, 19 nt, Artificial Sequence
  Description of Artificial Sequence: Synthetic oligonucleotide
  Antisense strand to SEQ ID NO: 912322
ucucucaaaccucuaaaca

SEQ ID NO: 912324 - RNA, 19 nt, Artificial Sequence
  Description of Artificial Sequence: Synthetic oligonucleotide
  Sense strand starting at position 1895 of SEQ ID NO: 588947
gucaccugcuuccuugaga

SEQ ID NO: 912325 - RNA, 19 nt, Artificial Sequence
  Description of Artificial Sequence: Synthetic oligonucleotide
  Antisense strand to SEQ ID NO: 912324
ucucaaggaagcaggugac

SEQ ID NO: 912326 - RNA, 19 nt, Artificial Sequence
  Description of Artificial Sequence: Synthetic oligonucleotide
  Sense strand starting at position 2048 of SEQ ID NO: 588947
cugggagaccuuugucacu

SEQ ID NO: 912327 - RNA, 19 nt, Artificial Sequence
  Description of Artificial Sequence: Synthetic oligonucleotide
  Antisense strand to SEQ ID NO: 912326
agugacaaaggucucccag

SEQ ID NO: 912328 - RNA, 19 nt, Artificial Sequence
  Description of Artificial Sequence: Synthetic oligonucleotide
  Sense strand starting at position 2116 of SEQ ID NO: 588947
agcugagcuuccucccaga

SEQ ID NO: 912329 - RNA, 19 nt, Artificial Sequence
  Description of Artificial Sequence: Synthetic oligonucleotide
  Antisense strand to SEQ ID NO: 912328
ucugggaggaagcucagcu

SEQ ID NO: 912330 - RNA, 19 nt, Artificial Sequence
  Description of Artificial Sequence: Synthetic oligonucleotide
  Sense strand starting at position 2411 of SEQ ID NO: 588947
ccgggaucacugggucuga

SEQ ID NO: 912331 - RNA, 19 nt, Artificial Sequence
  Description of Artificial Sequence: Synthetic oligonucleotide
  Antisense strand to SEQ ID NO: 912330
ucagacccagugaucccgg

SEQ ID NO: 912332 - RNA, 19 nt, Artificial Sequence
  Description of Artificial Sequence: Synthetic oligonucleotide
  Sense strand starting at position 2492 of SEQ ID NO: 588947
cagagagccugcuuaguca

SEQ ID NO: 912333 - RNA, 19 nt, Artificial Sequence
  Description of Artificial Sequence: Synthetic oligonucleotide
  Antisense strand to SEQ ID NO: 912332
ugacuaagcaggcucucug

SEQ ID NO: 912334 - RNA, 19 nt, Artificial Sequence
  Description of Artificial Sequence: Synthetic oligonucleotide
  Sense strand starting at position 2591 of SEQ ID NO: 588947
guuuaacguggccuuguua

SEQ ID NO: 912335 - RNA, 19 nt, Artificial Sequence
  Description of Artificial Sequence: Synthetic oligonucleotide
  Antisense strand to SEQ ID NO: 912334
uaacaaggccacguuaaac

SEQ ID NO: 912336 - RNA, 19 nt, Artificial Sequence
  Description of Artificial Sequence: Synthetic oligonucleotide
  Sense strand starting at position 2638 of SEQ ID NO: 588947
gugcuuaaucgguagaguu

SEQ ID NO: 912337 - RNA, 19 nt, Artificial Sequence
  Description of Artificial Sequence: Synthetic oligonucleotide
  Antisense strand to SEQ ID NO: 912336
aacucuaccgauuaagcac

SEQ ID NO: 912338 - RNA, 19 nt, Artificial Sequence
  Description of Artificial Sequence: Synthetic oligonucleotide
  Sense strand starting at position 2640 of SEQ ID NO: 588947
gcuuaaucgguagaguuuc

SEQ ID NO: 912339 - RNA, 19 nt, Artificial Sequence
  Description of Artificial Sequence: Synthetic oligonucleotide
  Antisense strand to SEQ ID NO: 912338
gaaacucuaccgauuaagc

SEQ ID NO: 912340 - RNA, 19 nt, Artificial Sequence
  Description of Artificial Sequence: Synthetic oligonucleotide
  Sense strand starting at position 2702 of SEQ ID NO: 588947
uuugcacaacaguguuaau

SEQ ID NO: 912341 - RNA, 19 nt, Artificial Sequence
  Description of Artificial Sequence: Synthetic oligonucleotide
  Antisense strand to SEQ ID NO: 912340
auuaacacuguugugcaaa

SEQ ID NO: 912342 - RNA, 19 nt, Artificial Sequence
  Description of Artificial Sequence: Synthetic oligonucleotide
  Sense strand starting at position 2794 of SEQ ID NO: 588947
gggaauuccaauggcgaaa

SEQ ID NO: 912343 - RNA, 19 nt, Artificial Sequence
  Description of Artificial Sequence: Synthetic oligonucleotide
  Antisense strand to SEQ ID NO: 912342
uuucgccauuggaauuccc

SEQ ID NO: 912344 - RNA, 19 nt, Artificial Sequence
  Description of Artificial Sequence: Synthetic oligonucleotide
  Sense strand starting at position 2866 of SEQ ID NO: 588947
aaaucaguuucuucgagca

SEQ ID NO: 912345 - RNA, 19 nt, Artificial Sequence
  Description of Artificial Sequence: Synthetic oligonucleotide
  Antisense strand to SEQ ID NO: 912344
ugcucgaagaaacugauuu

SEQ ID NO: 912346 - RNA, 19 nt, Artificial Sequence
  Description of Artificial Sequence: Synthetic oligonucleotide
  Sense strand starting at position 3339 of SEQ ID NO: 588947
uccuaucugcgauggcaga

SEQ ID NO: 912347 - RNA, 19 nt, Artificial Sequence
  Description of Artificial Sequence: Synthetic oligonucleotide
  Antisense strand to SEQ ID NO: 912346
ucugccaucgcagauagga

SEQ ID NO: 912348 - RNA, 19 nt, Artificial Sequence
  Description of Artificial Sequence: Synthetic oligonucleotide
  Sense strand starting at position 3650 of SEQ ID NO: 588947
cggaauuccuucccaaagu

SEQ ID NO: 912349 - RNA, 19 nt, Artificial Sequence
  Description of Artificial Sequence: Synthetic oligonucleotide
  Antisense strand to SEQ ID NO: 912348
acuuugggaaggaauuccg

SEQ ID NO: 912350 - RNA, 19 nt, Artificial Sequence
  Description of Artificial Sequence: Synthetic oligonucleotide
  Sense strand starting at position 3664 of SEQ ID NO: 588947
aaaguuaguuccgccuaca

SEQ ID NO: 912351 - RNA, 19 nt, Artificial Sequence
  Description of Artificial Sequence: Synthetic oligonucleotide
  Antisense strand to SEQ ID NO: 912350
uguaggcggaacuaacuuu

SEQ ID NO: 912352 - RNA, 19 nt, Artificial Sequence
  Description of Artificial Sequence: Synthetic oligonucleotide
  Sense strand starting at position 3786 of SEQ ID NO: 588947
gcgguuucagugccuuaca

SEQ ID NO: 912353 - RNA, 19 nt, Artificial Sequence
  Description of Artificial Sequence: Synthetic oligonucleotide
  Antisense strand to SEQ ID NO: 912352
uguaaggcacugaaaccgc

SEQ ID NO: 912354 - RNA, 19 nt, Artificial Sequence
  Description of Artificial Sequence: Synthetic oligonucleotide
  Sense strand starting at position 10 of SEQ ID NO: 588948
uggugauggucugcagaua

SEQ ID NO: 912355 - RNA, 19 nt, Artificial Sequence
  Description of Artificial Sequence: Synthetic oligonucleotide
  Antisense strand to SEQ ID NO: 912354
uaucugcagaccaucacca

SEQ ID NO: 912356 - RNA, 19 nt, Artificial Sequence
  Description of Artificial Sequence: Synthetic oligonucleotide
  Sense strand starting at position 11 of SEQ ID NO: 588948
ggugauggucugcagauau

SEQ ID NO: 912357 - RNA, 19 nt, Artificial Sequence
  Description of Artificial Sequence: Synthetic oligonucleotide
  Antisense strand to SEQ ID NO: 912356
auaucugcagaccaucacc

SEQ ID NO: 912358 - RNA, 19 nt, Artificial Sequence
  Description of Artificial Sequence: Synthetic oligonucleotide
  Sense strand starting at position 18 of SEQ ID NO: 588948
gucugcagauauguguaau

SEQ ID NO: 912359 - RNA, 19 nt, Artificial Sequence
  Description of Artificial Sequence: Synthetic oligonucleotide
  Antisense strand to SEQ ID NO: 912358
auuacacauaucugcagac

SEQ ID NO: 912360 - RNA, 19 nt, Artificial Sequence
  Description of Artificial Sequence: Synthetic oligonucleotide
  Sense strand starting at position 19 of SEQ ID NO: 588948
ucugcagauauguguaaug

SEQ ID NO: 912361 - RNA, 19 nt, Artificial Sequence
  Description of Artificial Sequence: Synthetic oligonucleotide
  Antisense strand to SEQ ID NO: 912360
cauuacacauaucugcaga

SEQ ID NO: 912362 - RNA, 19 nt, Artificial Sequence
  Description of Artificial Sequence: Synthetic oligonucleotide
  Sense strand starting at position 26 of SEQ ID NO: 588948
auauguguaaugggcucau

SEQ ID NO: 912363 - RNA, 19 nt, Artificial Sequence
  Description of Artificial Sequence: Synthetic oligonucleotide
  Antisense strand to SEQ ID NO: 912362
augagcccauuacacauau

SEQ ID NO: 912364 - RNA, 19 nt, Artificial Sequence
  Description of Artificial Sequence: Synthetic oligonucleotide
  Sense strand starting at position 30 of SEQ ID NO: 588948
guguaaugggcucauggca

SEQ ID NO: 912365 - RNA, 19 nt, Artificial Sequence
  Description of Artificial Sequence: Synthetic oligonucleotide
  Antisense strand to SEQ ID NO: 912364
ugccaugagcccauuacac

SEQ ID NO: 912366 - RNA, 19 nt, Artificial Sequence
  Description of Artificial Sequence: Synthetic oligonucleotide
  Sense strand starting at position 838 of SEQ ID NO: 588948
guaaguaguguucaugaca

SEQ ID NO: 912367 - RNA, 19 nt, Artificial Sequence
  Description of Artificial Sequence: Synthetic oligonucleotide
  Antisense strand to SEQ ID NO: 912366
ugucaugaacacuacuuac

SEQ ID NO: 912368 - RNA, 19 nt, Artificial Sequence
  Description of Artificial Sequence: Synthetic oligonucleotide
  Sense strand starting at position 884 of SEQ ID NO: 588948
uuaagaccucauggaaagu

SEQ ID NO: 912369 - RNA, 19 nt, Artificial Sequence
  Description of Artificial Sequence: Synthetic oligonucleotide
  Antisense strand to SEQ ID NO: 912368
acuuuccaugaggucuuaa

SEQ ID NO: 912370 - RNA, 19 nt, Artificial Sequence
  Description of Artificial Sequence: Synthetic oligonucleotide
  Sense strand starting at position 943 of SEQ ID NO: 588948
augcauuaacaguaagguu

SEQ ID NO: 912371 - RNA, 19 nt, Artificial Sequence
  Description of Artificial Sequence: Synthetic oligonucleotide
  Antisense strand to SEQ ID NO: 912370
aaccuuacuguuaaugcau

SEQ ID NO: 912372 - RNA, 19 nt, Artificial Sequence
  Description of Artificial Sequence: Synthetic oligonucleotide
  Sense strand starting at position 994 of SEQ ID NO: 588948
gcaaauaguuacuuauugu

SEQ ID NO: 912373 - RNA, 19 nt, Artificial Sequence
  Description of Artificial Sequence: Synthetic oligonucleotide
  Antisense strand to SEQ ID NO: 912372
acaauaaguaacuauuugc

SEQ ID NO: 912374 - RNA, 19 nt, Artificial Sequence
  Description of Artificial Sequence: Synthetic oligonucleotide
  Sense strand starting at position 1053 of SEQ ID NO: 588948
aaaucuuggccagauaggu

SEQ ID NO: 912375 - RNA, 19 nt, Artificial Sequence
  Description of Artificial Sequence: Synthetic oligonucleotide
  Antisense strand to SEQ ID NO: 912374
accuaucuggccaagauuu

SEQ ID NO: 912376 - RNA, 19 nt, Artificial Sequence
  Description of Artificial Sequence: Synthetic oligonucleotide
  Sense strand starting at position 1208 of SEQ ID NO: 588948
cccagugauggaggucaaa

SEQ ID NO: 912377 - RNA, 19 nt, Artificial Sequence
  Description of Artificial Sequence: Synthetic oligonucleotide
  Antisense strand to SEQ ID NO: 912376
uuugaccuccaucacuggg

SEQ ID NO: 912378 - RNA, 19 nt, Artificial Sequence
  Description of Artificial Sequence: Synthetic oligonucleotide
  Sense strand starting at position 1282 of SEQ ID NO: 588948
gucucaagccaucaaagua

SEQ ID NO: 912379 - RNA, 19 nt, Artificial Sequence
  Description of Artificial Sequence: Synthetic oligonucleotide
  Antisense strand to SEQ ID NO: 912378
uacuuugauggcuugagac

SEQ ID NO: 912380 - RNA, 19 nt, Artificial Sequence
  Description of Artificial Sequence: Synthetic oligonucleotide
  Sense strand starting at position 1551 of SEQ ID NO: 588948
ccaguaagaggcuaucagu

SEQ ID NO: 912381 - RNA, 19 nt, Artificial Sequence
  Description of Artificial Sequence: Synthetic oligonucleotide
  Antisense strand to SEQ ID NO: 912380
acugauagccucuuacugg

SEQ ID NO: 912382 - RNA, 19 nt, Artificial Sequence
  Description of Artificial Sequence: Synthetic oligonucleotide
  Sense strand starting at position 1640 of SEQ ID NO: 588948
acaauuuguugcugaaaga

SEQ ID NO: 912383 - RNA, 19 nt, Artificial Sequence
  Description of Artificial Sequence: Synthetic oligonucleotide
  Antisense strand to SEQ ID NO: 912382
ucuuucagcaacaaauugu

SEQ ID NO: 912384 - RNA, 19 nt, Artificial Sequence
  Description of Artificial Sequence: Synthetic oligonucleotide
  Sense strand starting at position 1669 of SEQ ID NO: 588948
acaaaucaaucugaggaua

SEQ ID NO: 912385 - RNA, 19 nt, Artificial Sequence
  Description of Artificial Sequence: Synthetic oligonucleotide
  Antisense strand to SEQ ID NO: 912384
uauccucagauugauuugu

SEQ ID NO: 912386 - RNA, 19 nt, Artificial Sequence
  Description of Artificial Sequence: Synthetic oligonucleotide
  Sense strand starting at position 1987 of SEQ ID NO: 588948
gugacacauccauauggca

SEQ ID NO: 912387 - RNA, 19 nt, Artificial Sequence
  Description of Artificial Sequence: Synthetic oligonucleotide
  Antisense strand to SEQ ID NO: 912386
ugccauauggaugugucac

SEQ ID NO: 912388 - RNA, 19 nt, Artificial Sequence
  Description of Artificial Sequence: Synthetic oligonucleotide
  Sense strand starting at position 2119 of SEQ ID NO: 588948
agagcauccgaguagauau

SEQ ID NO: 912389 - RNA, 19 nt, Artificial Sequence
  Description of Artificial Sequence: Synthetic oligonucleotide
  Antisense strand to SEQ ID NO: 912388
auaucuacucggaugcucu

SEQ ID NO: 912390 - RNA, 19 nt, Artificial Sequence
  Description of Artificial Sequence: Synthetic oligonucleotide
  Sense strand starting at position 2171 of SEQ ID NO: 588948
aguugacagaauugaguaa

SEQ ID NO: 912391 - RNA, 19 nt, Artificial Sequence
  Description of Artificial Sequence: Synthetic oligonucleotide
  Antisense strand to SEQ ID NO: 912390
uuacucaauucugucaacu

SEQ ID NO: 912392 - RNA, 19 nt, Artificial Sequence
  Description of Artificial Sequence: Synthetic oligonucleotide
  Sense strand starting at position 2306 of SEQ ID NO: 588948
ggucaacugaauggcuaau

SEQ ID NO: 912393 - RNA, 19 nt, Artificial Sequence
  Description of Artificial Sequence: Synthetic oligonucleotide
  Antisense strand to SEQ ID NO: 912392
auuagccauucaguugacc

SEQ ID NO: 912394 - RNA, 19 nt, Artificial Sequence
  Description of Artificial Sequence: Synthetic oligonucleotide
  Sense strand starting at position 2433 of SEQ ID NO: 588948
augcuugcucagcaaaguu

SEQ ID NO: 912395 - RNA, 19 nt, Artificial Sequence
  Description of Artificial Sequence: Synthetic oligonucleotide
  Antisense strand to SEQ ID NO: 912394
aacuuugcugagcaagcau

SEQ ID NO: 912396 - RNA, 19 nt, Artificial Sequence
  Description of Artificial Sequence: Synthetic oligonucleotide
  Sense strand starting at position 2467 of SEQ ID NO: 588948
uuuguaaacuuagcagaua

SEQ ID NO: 912397 - RNA, 19 nt, Artificial Sequence
  Description of Artificial Sequence: Synthetic oligonucleotide
  Antisense strand to SEQ ID NO: 912396
uaucugcuaaguuuacaaa

SEQ ID NO: 912398 - RNA, 19 nt, Artificial Sequence
  Description of Artificial Sequence: Synthetic oligonucleotide
  Sense strand starting at position 2513 of SEQ ID NO: 588948
guucuuugucuuuaccacu

SEQ ID NO: 912399 - RNA, 19 nt, Artificial Sequence
  Description of Artificial Sequence: Synthetic oligonucleotide
  Antisense strand to SEQ ID NO: 912398
agugguaaagacaaagaac

SEQ ID NO: 912400 - RNA, 19 nt, Artificial Sequence
  Description of Artificial Sequence: Synthetic oligonucleotide
  Sense strand starting at position 2657 of SEQ ID NO: 588948
ggccaauucuugcuaccau

SEQ ID NO: 912401 - RNA, 19 nt, Artificial Sequence
  Description of Artificial Sequence: Synthetic oligonucleotide
  Antisense strand to SEQ ID NO: 912400
augguagcaagaauuggcc

SEQ ID NO: 912402 - RNA, 19 nt, Artificial Sequence
  Description of Artificial Sequence: Synthetic oligonucleotide
  Sense strand starting at position 2668 of SEQ ID NO: 588948
gcuaccauaguguauguua

SEQ ID NO: 912403 - RNA, 19 nt, Artificial Sequence
  Description of Artificial Sequence: Synthetic oligonucleotide
  Antisense strand to SEQ ID NO: 912402
uaacauacacuaugguagc

SEQ ID NO: 912404 - RNA, 19 nt, Artificial Sequence
  Description of Artificial Sequence: Synthetic oligonucleotide
  Sense strand starting at position 2670 of SEQ ID NO: 588948
uaccauaguguauguuaua

SEQ ID NO: 912405 - RNA, 19 nt, Artificial Sequence
  Description of Artificial Sequence: Synthetic oligonucleotide
  Antisense strand to SEQ ID NO: 912404
uauaacauacacuauggua

SEQ ID NO: 912406 - RNA, 19 nt, Artificial Sequence
  Description of Artificial Sequence: Synthetic oligonucleotide
  Sense strand starting at position 2671 of SEQ ID NO: 588948
accauaguguauguuauau

SEQ ID NO: 912407 - RNA, 19 nt, Artificial Sequence
  Description of Artificial Sequence: Synthetic oligonucleotide
  Antisense strand to SEQ ID NO: 912406
auauaacauacacuauggu

SEQ ID NO: 912408 - RNA, 19 nt, Artificial Sequence
  Description of Artificial Sequence: Synthetic oligonucleotide
  Sense strand starting at position 2717 of SEQ ID NO: 588948
aaauguaaagugugccauu

SEQ ID NO: 912409 - RNA, 19 nt, Artificial Sequence
  Description of Artificial Sequence: Synthetic oligonucleotide
  Antisense strand to SEQ ID NO: 912408
aauggcacacuuuacauuu

SEQ ID NO: 912410 - RNA, 19 nt, Artificial Sequence
  Description of Artificial Sequence: Synthetic oligonucleotide
  Sense strand starting at position 2718 of SEQ ID NO: 588948
aauguaaagugugccauuu

SEQ ID NO: 912411 - RNA, 19 nt, Artificial Sequence
  Description of Artificial Sequence: Synthetic oligonucleotide
  Antisense strand to SEQ ID NO: 912410
aaauggcacacuuuacauu

SEQ ID NO: 912412 - RNA, 19 nt, Artificial Sequence
  Description of Artificial Sequence: Synthetic oligonucleotide
  Sense strand starting at position 2738 of SEQ ID NO: 588948
auuugaggcugagauguau

SEQ ID NO: 912413 - RNA, 19 nt, Artificial Sequence
  Description of Artificial Sequence: Synthetic oligonucleotide
  Antisense strand to SEQ ID NO: 912412
auacaucucagccucaaau

SEQ ID NO: 912414 - RNA, 19 nt, Artificial Sequence
  Description of Artificial Sequence: Synthetic oligonucleotide
  Sense strand starting at position 2874 of SEQ ID NO: 588948
gggcguuggauacacuaua

SEQ ID NO: 912415 - RNA, 19 nt, Artificial Sequence
  Description of Artificial Sequence: Synthetic oligonucleotide
  Antisense strand to SEQ ID NO: 912414
uauaguguauccaacgccc

SEQ ID NO: 912416 - RNA, 19 nt, Artificial Sequence
  Description of Artificial Sequence: Synthetic oligonucleotide
  Sense strand starting at position 2897 of SEQ ID NO: 588948
ucuuuauacaguggcgaua

SEQ ID NO: 912417 - RNA, 19 nt, Artificial Sequence
  Description of Artificial Sequence: Synthetic oligonucleotide
  Antisense strand to SEQ ID NO: 912416
uaucgccacuguauaaaga

SEQ ID NO: 912418 - RNA, 19 nt, Artificial Sequence
  Description of Artificial Sequence: Synthetic oligonucleotide
  Sense strand starting at position 2935 of SEQ ID NO: 588948
agggcaaugucggcaagaa

SEQ ID NO: 912419 - RNA, 19 nt, Artificial Sequence
  Description of Artificial Sequence: Synthetic oligonucleotide
  Antisense strand to SEQ ID NO: 912418
uucuugccgacauugcccu

SEQ ID NO: 912420 - RNA, 19 nt, Artificial Sequence
  Description of Artificial Sequence: Synthetic oligonucleotide
  Sense strand starting at position 2939 of SEQ ID NO: 588948
caaugucggcaagaaauga

SEQ ID NO: 912421 - RNA, 19 nt, Artificial Sequence
  Description of Artificial Sequence: Synthetic oligonucleotide
  Antisense strand to SEQ ID NO: 912420
ucauuucuugccgacauug

SEQ ID NO: 912422 - RNA, 19 nt, Artificial Sequence
  Description of Artificial Sequence: Synthetic oligonucleotide
  Sense strand starting at position 2957 of SEQ ID NO: 588948
aggcaaucucuacaaagca

SEQ ID NO: 912423 - RNA, 19 nt, Artificial Sequence
  Description of Artificial Sequence: Synthetic oligonucleotide
  Antisense strand to SEQ ID NO: 912422
ugcuuuguagagauugccu

SEQ ID NO: 912424 - RNA, 19 nt, Artificial Sequence
  Description of Artificial Sequence: Synthetic oligonucleotide
  Sense strand starting at position 2999 of SEQ ID NO: 588948
cugggaaauguguguccuu

SEQ ID NO: 912425 - RNA, 19 nt, Artificial Sequence
  Description of Artificial Sequence: Synthetic oligonucleotide
  Antisense strand to SEQ ID NO: 912424
aaggacacacauuucccag

SEQ ID NO: 912426 - RNA, 19 nt, Artificial Sequence
  Description of Artificial Sequence: Synthetic oligonucleotide
  Sense strand starting at position 3008 of SEQ ID NO: 588948
guguguccuucccuaagag

SEQ ID NO: 912427 - RNA, 19 nt, Artificial Sequence
  Description of Artificial Sequence: Synthetic oligonucleotide
  Antisense strand to SEQ ID NO: 912426
cucuuagggaaggacacac

SEQ ID NO: 912428 - RNA, 19 nt, Artificial Sequence
  Description of Artificial Sequence: Synthetic oligonucleotide
  Sense strand starting at position 3009 of SEQ ID NO: 588948
uguguccuucccuaagagu

SEQ ID NO: 912429 - RNA, 19 nt, Artificial Sequence
  Description of Artificial Sequence: Synthetic oligonucleotide
  Antisense strand to SEQ ID NO: 912428
acucuuagggaaggacaca

SEQ ID NO: 912430 - RNA, 19 nt, Artificial Sequence
  Description of Artificial Sequence: Synthetic oligonucleotide
  Sense strand starting at position 3046 of SEQ ID NO: 588948
acaguuaaaugagaucaaa

SEQ ID NO: 912431 - RNA, 19 nt, Artificial Sequence
  Description of Artificial Sequence: Synthetic oligonucleotide
  Antisense strand to SEQ ID NO: 912430
uuugaucucauuuaacugu

SEQ ID NO: 912432 - RNA, 19 nt, Artificial Sequence
  Description of Artificial Sequence: Synthetic oligonucleotide
  Sense strand starting at position 3973 of SEQ ID NO: 588948
gcauacuacccagaaguca

SEQ ID NO: 912433 - RNA, 19 nt, Artificial Sequence
  Description of Artificial Sequence: Synthetic oligonucleotide
  Antisense strand to SEQ ID NO: 912432
ugacuucuggguaguaugc

SEQ ID NO: 912434 - RNA, 19 nt, Artificial Sequence
  Description of Artificial Sequence: Synthetic oligonucleotide
  Sense strand starting at position 38 of SEQ ID NO: 588949
acgcaugcaguggaaauau

SEQ ID NO: 912435 - RNA, 19 nt, Artificial Sequence
  Description of Artificial Sequence: Synthetic oligonucleotide
  Antisense strand to SEQ ID NO: 912434
auauuuccacugcaugcgu

SEQ ID NO: 912436 - RNA, 19 nt, Artificial Sequence
  Description of Artificial Sequence: Synthetic oligonucleotide
  Sense strand starting at position 117 of SEQ ID NO: 588949
cagaguauggugggaggua

SEQ ID NO: 912437 - RNA, 19 nt, Artificial Sequence
  Description of Artificial Sequence: Synthetic oligonucleotide
  Antisense strand to SEQ ID NO: 912436
uaccucccaccauacucug

SEQ ID NO: 912438 - RNA, 19 nt, Artificial Sequence
  Description of Artificial Sequence: Synthetic oligonucleotide
  Sense strand starting at position 135 of SEQ ID NO: 588949
acacaaauuuccuucgugu

SEQ ID NO: 912439 - RNA, 19 nt, Artificial Sequence
  Description of Artificial Sequence: Synthetic oligonucleotide
  Antisense strand to SEQ ID NO: 912438
acacgaaggaaauuugugu

SEQ ID NO: 912440 - RNA, 19 nt, Artificial Sequence
  Description of Artificial Sequence: Synthetic oligonucleotide
  Sense strand starting at position 137 of SEQ ID NO: 588949
acaaauuuccuucguguuu

SEQ ID NO: 912441 - RNA, 19 nt, Artificial Sequence
  Description of Artificial Sequence: Synthetic oligonucleotide
  Antisense strand to SEQ ID NO: 912440
aaacacgaaggaaauuugu

SEQ ID NO: 912442 - RNA, 19 nt, Artificial Sequence
  Description of Artificial Sequence: Synthetic oligonucleotide
  Sense strand starting at position 161 of SEQ ID NO: 588949
uggugauggucugcagaua

SEQ ID NO: 912443 - RNA, 19 nt, Artificial Sequence
  Description of Artificial Sequence: Synthetic oligonucleotide
  Antisense strand to SEQ ID NO: 912442
uaucugcagaccaucacca

SEQ ID NO: 912444 - RNA, 19 nt, Artificial Sequence
  Description of Artificial Sequence: Synthetic oligonucleotide
  Sense strand starting at position 162 of SEQ ID NO: 588949
ggugauggucugcagauau

SEQ ID NO: 912445 - RNA, 19 nt, Artificial Sequence
  Description of Artificial Sequence: Synthetic oligonucleotide
  Antisense strand to SEQ ID NO: 912444
auaucugcagaccaucacc

SEQ ID NO: 912446 - RNA, 19 nt, Artificial Sequence
  Description of Artificial Sequence: Synthetic oligonucleotide
  Sense strand starting at position 170 of SEQ ID NO: 588949
ucugcagauauguguaaug

SEQ ID NO: 912447 - RNA, 19 nt, Artificial Sequence
  Description of Artificial Sequence: Synthetic oligonucleotide
  Antisense strand to SEQ ID NO: 912446
cauuacacauaucugcaga

SEQ ID NO: 912448 - RNA, 19 nt, Artificial Sequence
  Description of Artificial Sequence: Synthetic oligonucleotide
  Sense strand starting at position 177 of SEQ ID NO: 588949
auauguguaaugggcucau

SEQ ID NO: 912449 - RNA, 19 nt, Artificial Sequence
  Description of Artificial Sequence: Synthetic oligonucleotide
  Antisense strand to SEQ ID NO: 912448
augagcccauuacacauau

SEQ ID NO: 912450 - RNA, 19 nt, Artificial Sequence
  Description of Artificial Sequence: Synthetic oligonucleotide
  Sense strand starting at position 181 of SEQ ID NO: 588949
guguaaugggcucauggca

SEQ ID NO: 912451 - RNA, 19 nt, Artificial Sequence
  Description of Artificial Sequence: Synthetic oligonucleotide
  Antisense strand to SEQ ID NO: 912450
ugccaugagcccauuacac

SEQ ID NO: 912452 - RNA, 19 nt, Artificial Sequence
  Description of Artificial Sequence: Synthetic oligonucleotide
  Sense strand starting at position 989 of SEQ ID NO: 588949
guaaguaguguucaugaca

SEQ ID NO: 912453 - RNA, 19 nt, Artificial Sequence
  Description of Artificial Sequence: Synthetic oligonucleotide
  Antisense strand to SEQ ID NO: 912452
ugucaugaacacuacuuac

SEQ ID NO: 912454 - RNA, 19 nt, Artificial Sequence
  Description of Artificial Sequence: Synthetic oligonucleotide
  Sense strand starting at position 1035 of SEQ ID NO: 588949
uuaagaccucauggaaagu

SEQ ID NO: 912455 - RNA, 19 nt, Artificial Sequence
  Description of Artificial Sequence: Synthetic oligonucleotide
  Antisense strand to SEQ ID NO: 912454
acuuuccaugaggucuuaa

SEQ ID NO: 912456 - RNA, 19 nt, Artificial Sequence
  Description of Artificial Sequence: Synthetic oligonucleotide
  Sense strand starting at position 1094 of SEQ ID NO: 588949
augcauuaacaguaagguu

SEQ ID NO: 912457 - RNA, 19 nt, Artificial Sequence
  Description of Artificial Sequence: Synthetic oligonucleotide
  Antisense strand to SEQ ID NO: 912456
aaccuuacuguuaaugcau

SEQ ID NO: 912458 - RNA, 19 nt, Artificial Sequence
  Description of Artificial Sequence: Synthetic oligonucleotide
  Sense strand starting at position 1145 of SEQ ID NO: 588949
gcaaauaguuacuuauugu

SEQ ID NO: 912459 - RNA, 19 nt, Artificial Sequence
  Description of Artificial Sequence: Synthetic oligonucleotide
  Antisense strand to SEQ ID NO: 912458
acaauaaguaacuauuugc

SEQ ID NO: 912460 - RNA, 19 nt, Artificial Sequence
  Description of Artificial Sequence: Synthetic oligonucleotide
  Sense strand starting at position 1204 of SEQ ID NO: 588949
aaaucuuggccagauaggu

SEQ ID NO: 912461 - RNA, 19 nt, Artificial Sequence
  Description of Artificial Sequence: Synthetic oligonucleotide
  Antisense strand to SEQ ID NO: 912460
accuaucuggccaagauuu

SEQ ID NO: 912462 - RNA, 19 nt, Artificial Sequence
  Description of Artificial Sequence: Synthetic oligonucleotide
  Sense strand starting at position 1359 of SEQ ID NO: 588949
cccagugauggaggucaaa

SEQ ID NO: 912463 - RNA, 19 nt, Artificial Sequence
  Description of Artificial Sequence: Synthetic oligonucleotide
  Antisense strand to SEQ ID NO: 912462
uuugaccuccaucacuggg

SEQ ID NO: 912464 - RNA, 19 nt, Artificial Sequence
  Description of Artificial Sequence: Synthetic oligonucleotide
  Sense strand starting at position 1433 of SEQ ID NO: 588949
gucucaagccaucaaagua

SEQ ID NO: 912465 - RNA, 19 nt, Artificial Sequence
  Description of Artificial Sequence: Synthetic oligonucleotide
  Antisense strand to SEQ ID NO: 912464
uacuuugauggcuugagac

SEQ ID NO: 912466 - RNA, 19 nt, Artificial Sequence
  Description of Artificial Sequence: Synthetic oligonucleotide
  Sense strand starting at position 1702 of SEQ ID NO: 588949
ccaguaagaggcuaucagu

SEQ ID NO: 912467 - RNA, 19 nt, Artificial Sequence
  Description of Artificial Sequence: Synthetic oligonucleotide
  Antisense strand to SEQ ID NO: 912466
acugauagccucuuacugg

SEQ ID NO: 912468 - RNA, 19 nt, Artificial Sequence
  Description of Artificial Sequence: Synthetic oligonucleotide
  Sense strand starting at position 1820 of SEQ ID NO: 588949
acaaaucaaucugaggaua

SEQ ID NO: 912469 - RNA, 19 nt, Artificial Sequence
  Description of Artificial Sequence: Synthetic oligonucleotide
  Antisense strand to SEQ ID NO: 912468
uauccucagauugauuugu

SEQ ID NO: 912470 - RNA, 19 nt, Artificial Sequence
  Description of Artificial Sequence: Synthetic oligonucleotide
  Sense strand starting at position 2138 of SEQ ID NO: 588949
gugacacauccauauggca

SEQ ID NO: 912471 - RNA, 19 nt, Artificial Sequence
  Description of Artificial Sequence: Synthetic oligonucleotide
  Antisense strand to SEQ ID NO: 912470
ugccauauggaugugucac

SEQ ID NO: 912472 - RNA, 19 nt, Artificial Sequence
  Description of Artificial Sequence: Synthetic oligonucleotide
  Sense strand starting at position 2270 of SEQ ID NO: 588949
agagcauccgaguagauau

SEQ ID NO: 912473 - RNA, 19 nt, Artificial Sequence
  Description of Artificial Sequence: Synthetic oligonucleotide
  Antisense strand to SEQ ID NO: 912472
auaucuacucggaugcucu

SEQ ID NO: 912474 - RNA, 19 nt, Artificial Sequence
  Description of Artificial Sequence: Synthetic oligonucleotide
  Sense strand starting at position 2322 of SEQ ID NO: 588949
aguugacagaauugaguaa

SEQ ID NO: 912475 - RNA, 19 nt, Artificial Sequence
  Description of Artificial Sequence: Synthetic oligonucleotide
  Antisense strand to SEQ ID NO: 912474
uuacucaauucugucaacu

SEQ ID NO: 912476 - RNA, 19 nt, Artificial Sequence
  Description of Artificial Sequence: Synthetic oligonucleotide
  Sense strand starting at position 2457 of SEQ ID NO: 588949
ggucaacugaauggcuaau

SEQ ID NO: 912477 - RNA, 19 nt, Artificial Sequence
  Description of Artificial Sequence: Synthetic oligonucleotide
  Antisense strand to SEQ ID NO: 912476
auuagccauucaguugacc

SEQ ID NO: 912478 - RNA, 19 nt, Artificial Sequence
  Description of Artificial Sequence: Synthetic oligonucleotide
  Sense strand starting at position 2618 of SEQ ID NO: 588949
uuuguaaacuuagcagaua

SEQ ID NO: 912479 - RNA, 19 nt, Artificial Sequence
  Description of Artificial Sequence: Synthetic oligonucleotide
  Antisense strand to SEQ ID NO: 912478
uaucugcuaaguuuacaaa

SEQ ID NO: 912480 - RNA, 19 nt, Artificial Sequence
  Description of Artificial Sequence: Synthetic oligonucleotide
  Sense strand starting at position 2664 of SEQ ID NO: 588949
guucuuugucuuuaccacu

SEQ ID NO: 912481 - RNA, 19 nt, Artificial Sequence
  Description of Artificial Sequence: Synthetic oligonucleotide
  Antisense strand to SEQ ID NO: 912480
agugguaaagacaaagaac

SEQ ID NO: 912482 - RNA, 19 nt, Artificial Sequence
  Description of Artificial Sequence: Synthetic oligonucleotide
  Sense strand starting at position 2808 of SEQ ID NO: 588949
ggccaauucuugcuaccau

SEQ ID NO: 912483 - RNA, 19 nt, Artificial Sequence
  Description of Artificial Sequence: Synthetic oligonucleotide
  Antisense strand to SEQ ID NO: 912482
augguagcaagaauuggcc

SEQ ID NO: 912484 - RNA, 19 nt, Artificial Sequence
  Description of Artificial Sequence: Synthetic oligonucleotide
  Sense strand starting at position 2819 of SEQ ID NO: 588949
gcuaccauaguguauguua

SEQ ID NO: 912485 - RNA, 19 nt, Artificial Sequence
  Description of Artificial Sequence: Synthetic oligonucleotide
  Antisense strand to SEQ ID NO: 912484
uaacauacacuaugguagc

SEQ ID NO: 912486 - RNA, 19 nt, Artificial Sequence
  Description of Artificial Sequence: Synthetic oligonucleotide
  Sense strand starting at position 2821 of SEQ ID NO: 588949
uaccauaguguauguuaua

SEQ ID NO: 912487 - RNA, 19 nt, Artificial Sequence
  Description of Artificial Sequence: Synthetic oligonucleotide
  Antisense strand to SEQ ID NO: 912486
uauaacauacacuauggua

SEQ ID NO: 912488 - RNA, 19 nt, Artificial Sequence
  Description of Artificial Sequence: Synthetic oligonucleotide
  Sense strand starting at position 2822 of SEQ ID NO: 588949
accauaguguauguuauau

SEQ ID NO: 912489 - RNA, 19 nt, Artificial Sequence
  Description of Artificial Sequence: Synthetic oligonucleotide
  Antisense strand to SEQ ID NO: 912488
auauaacauacacuauggu

SEQ ID NO: 912490 - RNA, 19 nt, Artificial Sequence
  Description of Artificial Sequence: Synthetic oligonucleotide
  Sense strand starting at position 2868 of SEQ ID NO: 588949
aaauguaaagugugccauu

SEQ ID NO: 912491 - RNA, 19 nt, Artificial Sequence
  Description of Artificial Sequence: Synthetic oligonucleotide
  Antisense strand to SEQ ID NO: 912490
aauggcacacuuuacauuu

SEQ ID NO: 912492 - RNA, 19 nt, Artificial Sequence
  Description of Artificial Sequence: Synthetic oligonucleotide
  Sense strand starting at position 2869 of SEQ ID NO: 588949
aauguaaagugugccauuu

SEQ ID NO: 912493 - RNA, 19 nt, Artificial Sequence
  Description of Artificial Sequence: Synthetic oligonucleotide
  Antisense strand to SEQ ID NO: 912492
aaauggcacacuuuacauu

SEQ ID NO: 912494 - RNA, 19 nt, Artificial Sequence
  Description of Artificial Sequence: Synthetic oligonucleotide
  Sense strand starting at position 2889 of SEQ ID NO: 588949
auuugaggcugagauguau

SEQ ID NO: 912495 - RNA, 19 nt, Artificial Sequence
  Description of Artificial Sequence: Synthetic oligonucleotide
  Antisense strand to SEQ ID NO: 912494
auacaucucagccucaaau

SEQ ID NO: 912496 - RNA, 19 nt, Artificial Sequence
  Description of Artificial Sequence: Synthetic oligonucleotide
  Sense strand starting at position 3025 of SEQ ID NO: 588949
gggcguuggauacacuaua

SEQ ID NO: 912497 - RNA, 19 nt, Artificial Sequence
  Description of Artificial Sequence: Synthetic oligonucleotide
  Antisense strand to SEQ ID NO: 912496
uauaguguauccaacgccc

SEQ ID NO: 912498 - RNA, 19 nt, Artificial Sequence
  Description of Artificial Sequence: Synthetic oligonucleotide
  Sense strand starting at position 3048 of SEQ ID NO: 588949
ucuuuauacaguggcgaua

SEQ ID NO: 912499 - RNA, 19 nt, Artificial Sequence
  Description of Artificial Sequence: Synthetic oligonucleotide
  Antisense strand to SEQ ID NO: 912498
uaucgccacuguauaaaga

SEQ ID NO: 912500 - RNA, 19 nt, Artificial Sequence
  Description of Artificial Sequence: Synthetic oligonucleotide
  Sense strand starting at position 3086 of SEQ ID NO: 588949
agggcaaugucggcaagaa

SEQ ID NO: 912501 - RNA, 19 nt, Artificial Sequence
  Description of Artificial Sequence: Synthetic oligonucleotide
  Antisense strand to SEQ ID NO: 912500
uucuugccgacauugcccu

SEQ ID NO: 912502 - RNA, 19 nt, Artificial Sequence
  Description of Artificial Sequence: Synthetic oligonucleotide
  Sense strand starting at position 3090 of SEQ ID NO: 588949
caaugucggcaagaaauga

SEQ ID NO: 912503 - RNA, 19 nt, Artificial Sequence
  Description of Artificial Sequence: Synthetic oligonucleotide
  Antisense strand to SEQ ID NO: 912502
ucauuucuugccgacauug

SEQ ID NO: 912504 - RNA, 19 nt, Artificial Sequence
  Description of Artificial Sequence: Synthetic oligonucleotide
  Sense strand starting at position 3108 of SEQ ID NO: 588949
aggcaaucucuacaaagca

SEQ ID NO: 912505 - RNA, 19 nt, Artificial Sequence
  Description of Artificial Sequence: Synthetic oligonucleotide
  Antisense strand to SEQ ID NO: 912504
ugcuuuguagagauugccu

SEQ ID NO: 912506 - RNA, 19 nt, Artificial Sequence
  Description of Artificial Sequence: Synthetic oligonucleotide
  Sense strand starting at position 3150 of SEQ ID NO: 588949
cugggaaauguguguccuu

SEQ ID NO: 912507 - RNA, 19 nt, Artificial Sequence
  Description of Artificial Sequence: Synthetic oligonucleotide
  Antisense strand to SEQ ID NO: 912506
aaggacacacauuucccag

SEQ ID NO: 912508 - RNA, 19 nt, Artificial Sequence
  Description of Artificial Sequence: Synthetic oligonucleotide
  Sense strand starting at position 3159 of SEQ ID NO: 588949
guguguccuucccuaagag

SEQ ID NO: 912509 - RNA, 19 nt, Artificial Sequence
  Description of Artificial Sequence: Synthetic oligonucleotide
  Antisense strand to SEQ ID NO: 912508
cucuuagggaaggacacac

SEQ ID NO: 912510 - RNA, 19 nt, Artificial Sequence
  Description of Artificial Sequence: Synthetic oligonucleotide
  Sense strand starting at position 3160 of SEQ ID NO: 588949
uguguccuucccuaagagu

SEQ ID NO: 912511 - RNA, 19 nt, Artificial Sequence
  Description of Artificial Sequence: Synthetic oligonucleotide
  Antisense strand to SEQ ID NO: 912510
acucuuagggaaggacaca

SEQ ID NO: 912512 - RNA, 19 nt, Artificial Sequence
  Description of Artificial Sequence: Synthetic oligonucleotide
  Sense strand starting at position 3197 of SEQ ID NO: 588949
acaguuaaaugagaucaaa

SEQ ID NO: 912513 - RNA, 19 nt, Artificial Sequence
  Description of Artificial Sequence: Synthetic oligonucleotide
  Antisense strand to SEQ ID NO: 912512
uuugaucucauuuaacugu

SEQ ID NO: 912514 - RNA, 19 nt, Artificial Sequence
  Description of Artificial Sequence: Synthetic oligonucleotide
  Sense strand starting at position 9 of SEQ ID NO: 588950
cagaguaaagucuaacagu

SEQ ID NO: 912515 - RNA, 19 nt, Artificial Sequence
  Description of Artificial Sequence: Synthetic oligonucleotide
  Antisense strand to SEQ ID NO: 912514
acuguuagacuuuacucug

SEQ ID NO: 912516 - RNA, 19 nt, Artificial Sequence
  Description of Artificial Sequence: Synthetic oligonucleotide
  Sense strand starting at position 118 of SEQ ID NO: 588950
guauuauaauaucuggaug

SEQ ID NO: 912517 - RNA, 19 nt, Artificial Sequence
  Description of Artificial Sequence: Synthetic oligonucleotide
  Antisense strand to SEQ ID NO: 912516
cauccagauauuauaauac

SEQ ID NO: 912518 - RNA, 19 nt, Artificial Sequence
  Description of Artificial Sequence: Synthetic oligonucleotide
  Sense strand starting at position 123 of SEQ ID NO: 588950
auaauaucuggaugguacu

SEQ ID NO: 912519 - RNA, 19 nt, Artificial Sequence
  Description of Artificial Sequence: Synthetic oligonucleotide
  Antisense strand to SEQ ID NO: 912518
aguaccauccagauauuau

SEQ ID NO: 912520 - RNA, 19 nt, Artificial Sequence
  Description of Artificial Sequence: Synthetic oligonucleotide
  Sense strand starting at position 271 of SEQ ID NO: 588950
gccaccggugcuuuaguaa

SEQ ID NO: 912521 - RNA, 19 nt, Artificial Sequence
  Description of Artificial Sequence: Synthetic oligonucleotide
  Antisense strand to SEQ ID NO: 912520
uuacuaaagcaccgguggc

SEQ ID NO: 912522 - RNA, 19 nt, Artificial Sequence
  Description of Artificial Sequence: Synthetic oligonucleotide
  Sense strand starting at position 360 of SEQ ID NO: 588950
cucaucggauucuuaauga

SEQ ID NO: 912523 - RNA, 19 nt, Artificial Sequence
  Description of Artificial Sequence: Synthetic oligonucleotide
  Antisense strand to SEQ ID NO: 912522
ucauuaagaauccgaugag

SEQ ID NO: 912524 - RNA, 19 nt, Artificial Sequence
  Description of Artificial Sequence: Synthetic oligonucleotide
  Sense strand starting at position 450 of SEQ ID NO: 588950
aguggaguuguucaugaaa

SEQ ID NO: 912525 - RNA, 19 nt, Artificial Sequence
  Description of Artificial Sequence: Synthetic oligonucleotide
  Antisense strand to SEQ ID NO: 912524
uuucaugaacaacuccacu

SEQ ID NO: 912526 - RNA, 19 nt, Artificial Sequence
  Description of Artificial Sequence: Synthetic oligonucleotide
  Sense strand starting at position 503 of SEQ ID NO: 588950
aggauaugcagugguacuu

SEQ ID NO: 912527 - RNA, 19 nt, Artificial Sequence
  Description of Artificial Sequence: Synthetic oligonucleotide
  Antisense strand to SEQ ID NO: 912526
aaguaccacugcauauccu

SEQ ID NO: 912528 - RNA, 19 nt, Artificial Sequence
  Description of Artificial Sequence: Synthetic oligonucleotide
  Sense strand starting at position 759 of SEQ ID NO: 588950
aguuucuaucaugggauga

SEQ ID NO: 912529 - RNA, 19 nt, Artificial Sequence
  Description of Artificial Sequence: Synthetic oligonucleotide
  Antisense strand to SEQ ID NO: 912528
ucaucccaugauagaaacu

SEQ ID NO: 912530 - RNA, 19 nt, Artificial Sequence
  Description of Artificial Sequence: Synthetic oligonucleotide
  Sense strand starting at position 760 of SEQ ID NO: 588950
guuucuaucaugggaugac

SEQ ID NO: 912531 - RNA, 19 nt, Artificial Sequence
  Description of Artificial Sequence: Synthetic oligonucleotide
  Antisense strand to SEQ ID NO: 912530
gucaucccaugauagaaac

SEQ ID NO: 912532 - RNA, 19 nt, Artificial Sequence
  Description of Artificial Sequence: Synthetic oligonucleotide
  Sense strand starting at position 772 of SEQ ID NO: 588950
ggaugacucuccgcuggga

SEQ ID NO: 912533 - RNA, 19 nt, Artificial Sequence
  Description of Artificial Sequence: Synthetic oligonucleotide
  Antisense strand to SEQ ID NO: 912532
ucccagcggagagucaucc

SEQ ID NO: 912534 - RNA, 19 nt, Artificial Sequence
  Description of Artificial Sequence: Synthetic oligonucleotide
  Sense strand starting at position 884 of SEQ ID NO: 588950
gcuguauuccauuacuaag

SEQ ID NO: 912535 - RNA, 19 nt, Artificial Sequence
  Description of Artificial Sequence: Synthetic oligonucleotide
  Antisense strand to SEQ ID NO: 912534
cuuaguaauggaauacagc

SEQ ID NO: 912536 - RNA, 19 nt, Artificial Sequence
  Description of Artificial Sequence: Synthetic oligonucleotide
  Sense strand starting at position 958 of SEQ ID NO: 588950
gguagaaaucccugauuau

SEQ ID NO: 912537 - RNA, 19 nt, Artificial Sequence
  Description of Artificial Sequence: Synthetic oligonucleotide
  Antisense strand to SEQ ID NO: 912536
auaaucagggauuucuacc

SEQ ID NO: 912538 - RNA, 19 nt, Artificial Sequence
  Description of Artificial Sequence: Synthetic oligonucleotide
  Sense strand starting at position 1189 of SEQ ID NO: 588950
aagggauucugcucuguga

SEQ ID NO: 912539 - RNA, 19 nt, Artificial Sequence
  Description of Artificial Sequence: Synthetic oligonucleotide
  Antisense strand to SEQ ID NO: 912538
ucacagagcagaaucccuu

SEQ ID NO: 912540 - RNA, 19 nt, Artificial Sequence
  Description of Artificial Sequence: Synthetic oligonucleotide
  Sense strand starting at position 1192 of SEQ ID NO: 588950
ggauucugcucugugauga

SEQ ID NO: 912541 - RNA, 19 nt, Artificial Sequence
  Description of Artificial Sequence: Synthetic oligonucleotide
  Antisense strand to SEQ ID NO: 912540
ucaucacagagcagaaucc

SEQ ID NO: 912542 - RNA, 19 nt, Artificial Sequence
  Description of Artificial Sequence: Synthetic oligonucleotide
  Sense strand starting at position 1317 of SEQ ID NO: 588950
acgagaugccuccaagcca

SEQ ID NO: 912543 - RNA, 19 nt, Artificial Sequence
  Description of Artificial Sequence: Synthetic oligonucleotide
  Antisense strand to SEQ ID NO: 912542
uggcuuggaggcaucucgu

SEQ ID NO: 912544 - RNA, 19 nt, Artificial Sequence
  Description of Artificial Sequence: Synthetic oligonucleotide
  Sense strand starting at position 1325 of SEQ ID NO: 588950
ccuccaagccagcagaaau

SEQ ID NO: 912545 - RNA, 19 nt, Artificial Sequence
  Description of Artificial Sequence: Synthetic oligonucleotide
  Antisense strand to SEQ ID NO: 912544
auuucugcuggcuuggagg

SEQ ID NO: 912546 - RNA, 19 nt, Artificial Sequence
  Description of Artificial Sequence: Synthetic oligonucleotide
  Sense strand starting at position 1400 of SEQ ID NO: 588950
gugacuucagaguaaaggu

SEQ ID NO: 912547 - RNA, 19 nt, Artificial Sequence
  Description of Artificial Sequence: Synthetic oligonucleotide
  Antisense strand to SEQ ID NO: 912546
accuuuacucugaagucac

SEQ ID NO: 912548 - RNA, 19 nt, Artificial Sequence
  Description of Artificial Sequence: Synthetic oligonucleotide
  Sense strand starting at position 2314 of SEQ ID NO: 588950
ucaguucuccuacgaagag

SEQ ID NO: 912549 - RNA, 19 nt, Artificial Sequence
  Description of Artificial Sequence: Synthetic oligonucleotide
  Antisense strand to SEQ ID NO: 912548
cucuucguaggagaacuga

SEQ ID NO: 912550 - RNA, 19 nt, Artificial Sequence
  Description of Artificial Sequence: Synthetic oligonucleotide
  Sense strand starting at position 2441 of SEQ ID NO: 588950
ccgaauuccgaggguuaua

SEQ ID NO: 912551 - RNA, 19 nt, Artificial Sequence
  Description of Artificial Sequence: Synthetic oligonucleotide
  Antisense strand to SEQ ID NO: 912550
uauaacccucggaauucgg

SEQ ID NO: 912552 - RNA, 19 nt, Artificial Sequence
  Description of Artificial Sequence: Synthetic oligonucleotide
  Sense strand starting at position 2598 of SEQ ID NO: 588950
gucacaagugcuuaucuga

SEQ ID NO: 912553 - RNA, 19 nt, Artificial Sequence
  Description of Artificial Sequence: Synthetic oligonucleotide
  Antisense strand to SEQ ID NO: 912552
ucagauaagcacuugugac

SEQ ID NO: 912554 - RNA, 19 nt, Artificial Sequence
  Description of Artificial Sequence: Synthetic oligonucleotide
  Sense strand starting at position 2757 of SEQ ID NO: 588950
auauaaccuuggguuugaa

SEQ ID NO: 912555 - RNA, 19 nt, Artificial Sequence
  Description of Artificial Sequence: Synthetic oligonucleotide
  Antisense strand to SEQ ID NO: 912554
uucaaacccaagguuauau

SEQ ID NO: 912556 - RNA, 19 nt, Artificial Sequence
  Description of Artificial Sequence: Synthetic oligonucleotide
  Sense strand starting at position 2760 of SEQ ID NO: 588950
uaaccuuggguuugaaauc

SEQ ID NO: 912557 - RNA, 19 nt, Artificial Sequence
  Description of Artificial Sequence: Synthetic oligonucleotide
  Antisense strand to SEQ ID NO: 912556
gauuucaaacccaagguua

SEQ ID NO: 912558 - RNA, 19 nt, Artificial Sequence
  Description of Artificial Sequence: Synthetic oligonucleotide
  Sense strand starting at position 2880 of SEQ ID NO: 588950
uggucugucccagaggaga

SEQ ID NO: 912559 - RNA, 19 nt, Artificial Sequence
  Description of Artificial Sequence: Synthetic oligonucleotide
  Antisense strand to SEQ ID NO: 912558
ucuccucugggacagacca

SEQ ID NO: 912560 - RNA, 19 nt, Artificial Sequence
  Description of Artificial Sequence: Synthetic oligonucleotide
  Sense strand starting at position 2958 of SEQ ID NO: 588950
ucuagaaguuucguggaaa

SEQ ID NO: 912561 - RNA, 19 nt, Artificial Sequence
  Description of Artificial Sequence: Synthetic oligonucleotide
  Antisense strand to SEQ ID NO: 912560
uuuccacgaaacuucuaga

SEQ ID NO: 912562 - RNA, 19 nt, Artificial Sequence
  Description of Artificial Sequence: Synthetic oligonucleotide
  Sense strand starting at position 2987 of SEQ ID NO: 588950
guagaugccucuccagaag

SEQ ID NO: 912563 - RNA, 19 nt, Artificial Sequence
  Description of Artificial Sequence: Synthetic oligonucleotide
  Antisense strand to SEQ ID NO: 912562
cuucuggagaggcaucuac

SEQ ID NO: 912564 - RNA, 19 nt, Artificial Sequence
  Description of Artificial Sequence: Synthetic oligonucleotide
  Sense strand starting at position 2990 of SEQ ID NO: 588950
gaugccucuccagaagugu

SEQ ID NO: 912565 - RNA, 19 nt, Artificial Sequence
  Description of Artificial Sequence: Synthetic oligonucleotide
  Antisense strand to SEQ ID NO: 912564
acacuucuggagaggcauc

SEQ ID NO: 912566 - RNA, 19 nt, Artificial Sequence
  Description of Artificial Sequence: Synthetic oligonucleotide
  Sense strand starting at position 3015 of SEQ ID NO: 588950
ucuggacuccuuuggagua

SEQ ID NO: 912567 - RNA, 19 nt, Artificial Sequence
  Description of Artificial Sequence: Synthetic oligonucleotide
  Antisense strand to SEQ ID NO: 912566
uacuccaaaggaguccaga

SEQ ID NO: 912568 - RNA, 19 nt, Artificial Sequence
  Description of Artificial Sequence: Synthetic oligonucleotide
  Sense strand starting at position 3114 of SEQ ID NO: 588950
gguuguauuccugauguaa

SEQ ID NO: 912569 - RNA, 19 nt, Artificial Sequence
  Description of Artificial Sequence: Synthetic oligonucleotide
  Antisense strand to SEQ ID NO: 912568
uuacaucaggaauacaacc

SEQ ID NO: 912570 - RNA, 19 nt, Artificial Sequence
  Description of Artificial Sequence: Synthetic oligonucleotide
  Sense strand starting at position 3118 of SEQ ID NO: 588950
guauuccugauguaaggca

SEQ ID NO: 912571 - RNA, 19 nt, Artificial Sequence
  Description of Artificial Sequence: Synthetic oligonucleotide
  Antisense strand to SEQ ID NO: 912570
ugccuuacaucaggaauac

SEQ ID NO: 912572 - RNA, 19 nt, Artificial Sequence
  Description of Artificial Sequence: Synthetic oligonucleotide
  Sense strand starting at position 3359 of SEQ ID NO: 588950
uuagguggugcugacuaau

SEQ ID NO: 912573 - RNA, 19 nt, Artificial Sequence
  Description of Artificial Sequence: Synthetic oligonucleotide
  Antisense strand to SEQ ID NO: 912572
auuagucagcaccaccuaa

SEQ ID NO: 912574 - RNA, 19 nt, Artificial Sequence
  Description of Artificial Sequence: Synthetic oligonucleotide
  Sense strand starting at position 3362 of SEQ ID NO: 588950
gguggugcugacuaauaaa

SEQ ID NO: 912575 - RNA, 19 nt, Artificial Sequence
  Description of Artificial Sequence: Synthetic oligonucleotide
  Antisense strand to SEQ ID NO: 912574
uuuauuagucagcaccacc

SEQ ID NO: 912576 - RNA, 19 nt, Artificial Sequence
  Description of Artificial Sequence: Synthetic oligonucleotide
  Sense strand starting at position 3399 of SEQ ID NO: 588950
guggccacaccuuaaugau

SEQ ID NO: 912577 - RNA, 19 nt, Artificial Sequence
  Description of Artificial Sequence: Synthetic oligonucleotide
  Antisense strand to SEQ ID NO: 912576
aucauuaagguguggccac

SEQ ID NO: 912578 - RNA, 19 nt, Artificial Sequence
  Description of Artificial Sequence: Synthetic oligonucleotide
  Sense strand starting at position 3407 of SEQ ID NO: 588950
accuuaaugaugugggcuu

SEQ ID NO: 912579 - RNA, 19 nt, Artificial Sequence
  Description of Artificial Sequence: Synthetic oligonucleotide
  Antisense strand to SEQ ID NO: 912578
aagcccacaucauuaaggu

SEQ ID NO: 912580 - RNA, 19 nt, Artificial Sequence
  Description of Artificial Sequence: Synthetic oligonucleotide
  Sense strand starting at position 3534 of SEQ ID NO: 588950
accaguaaguguuuacauu

SEQ ID NO: 912581 - RNA, 19 nt, Artificial Sequence
  Description of Artificial Sequence: Synthetic oligonucleotide
  Antisense strand to SEQ ID NO: 912580
aauguaaacacuuacuggu

SEQ ID NO: 912582 - RNA, 19 nt, Artificial Sequence
  Description of Artificial Sequence: Synthetic oligonucleotide
  Sense strand starting at position 3710 of SEQ ID NO: 588950
acugcacuacucgaaauga

SEQ ID NO: 912583 - RNA, 19 nt, Artificial Sequence
  Description of Artificial Sequence: Synthetic oligonucleotide
  Antisense strand to SEQ ID NO: 912582
ucauuucgaguagugcagu

SEQ ID NO: 912584 - RNA, 19 nt, Artificial Sequence
  Description of Artificial Sequence: Synthetic oligonucleotide
  Sense strand starting at position 3788 of SEQ ID NO: 588950
ucaguaaaugguuguuaga

SEQ ID NO: 912585 - RNA, 19 nt, Artificial Sequence
  Description of Artificial Sequence: Synthetic oligonucleotide
  Antisense strand to SEQ ID NO: 912584
ucuaacaaccauuuacuga

SEQ ID NO: 912586 - RNA, 19 nt, Artificial Sequence
  Description of Artificial Sequence: Synthetic oligonucleotide
  Sense strand starting at position 3790 of SEQ ID NO: 588950
aguaaaugguuguuagaaa

SEQ ID NO: 912587 - RNA, 19 nt, Artificial Sequence
  Description of Artificial Sequence: Synthetic oligonucleotide
  Antisense strand to SEQ ID NO: 912586
uuucuaacaaccauuuacu

SEQ ID NO: 912588 - RNA, 19 nt, Artificial Sequence
  Description of Artificial Sequence: Synthetic oligonucleotide
  Sense strand starting at position 3929 of SEQ ID NO: 588950
ccuagaauguguuuaucca

SEQ ID NO: 912589 - RNA, 19 nt, Artificial Sequence
  Description of Artificial Sequence: Synthetic oligonucleotide
  Antisense strand to SEQ ID NO: 912588
uggauaaacacauucuagg

SEQ ID NO: 912590 - RNA, 19 nt, Artificial Sequence
  Description of Artificial Sequence: Synthetic oligonucleotide
  Sense strand starting at position 3930 of SEQ ID NO: 588950
cuagaauguguuuauccaa

SEQ ID NO: 912591 - RNA, 19 nt, Artificial Sequence
  Description of Artificial Sequence: Synthetic oligonucleotide
  Antisense strand to SEQ ID NO: 912590
uuggauaaacacauucuag

SEQ ID NO: 912592 - RNA, 19 nt, Artificial Sequence
  Description of Artificial Sequence: Synthetic oligonucleotide
  Sense strand starting at position 3933 of SEQ ID NO: 588950
gaauguguuuauccaaaga

SEQ ID NO: 912593 - RNA, 19 nt, Artificial Sequence
  Description of Artificial Sequence: Synthetic oligonucleotide
  Antisense strand to SEQ ID NO: 912592
ucuuuggauaaacacauuc

SEQ ID NO: 912594 - RNA, 19 nt, Artificial Sequence
  Description of Artificial Sequence: Synthetic oligonucleotide
  Sense strand starting at position 75 of SEQ ID NO: 588952
ugaugcggugccugaagaa

SEQ ID NO: 912595 - RNA, 19 nt, Artificial Sequence
  Description of Artificial Sequence: Synthetic oligonucleotide
  Antisense strand to SEQ ID NO: 912594
uucuucaggcaccgcauca

SEQ ID NO: 912596 - RNA, 19 nt, Artificial Sequence
  Description of Artificial Sequence: Synthetic oligonucleotide
  Sense strand starting at position 2047 of SEQ ID NO: 588952
aucagagguggcugaacau

SEQ ID NO: 912597 - RNA, 19 nt, Artificial Sequence
  Description of Artificial Sequence: Synthetic oligonucleotide
  Antisense strand to SEQ ID NO: 912596
auguucagccaccucugau

SEQ ID NO: 912598 - RNA, 19 nt, Artificial Sequence
  Description of Artificial Sequence: Synthetic oligonucleotide
  Sense strand starting at position 2062 of SEQ ID NO: 588952
acauuaaucgccguucugu

SEQ ID NO: 912599 - RNA, 19 nt, Artificial Sequence
  Description of Artificial Sequence: Synthetic oligonucleotide
  Antisense strand to SEQ ID NO: 912598
acagaacggcgauuaaugu

SEQ ID NO: 912600 - RNA, 19 nt, Artificial Sequence
  Description of Artificial Sequence: Synthetic oligonucleotide
  Sense strand starting at position 2077 of SEQ ID NO: 588952
cuguguuagugcccaucau

SEQ ID NO: 912601 - RNA, 19 nt, Artificial Sequence
  Description of Artificial Sequence: Synthetic oligonucleotide
  Antisense strand to SEQ ID NO: 912600
augaugggcacuaacacag

SEQ ID NO: 912602 - RNA, 19 nt, Artificial Sequence
  Description of Artificial Sequence: Synthetic oligonucleotide
  Sense strand starting at position 2078 of SEQ ID NO: 588952
uguguuagugcccaucauu

SEQ ID NO: 912603 - RNA, 19 nt, Artificial Sequence
  Description of Artificial Sequence: Synthetic oligonucleotide
  Antisense strand to SEQ ID NO: 912602
aaugaugggcacuaacaca

SEQ ID NO: 912604 - RNA, 19 nt, Artificial Sequence
  Description of Artificial Sequence: Synthetic oligonucleotide
  Sense strand starting at position 2168 of SEQ ID NO: 588952
gccuguagcuccgaccaau

SEQ ID NO: 912605 - RNA, 19 nt, Artificial Sequence
  Description of Artificial Sequence: Synthetic oligonucleotide
  Antisense strand to SEQ ID NO: 912604
auuggucggagcuacaggc

SEQ ID NO: 912606 - RNA, 19 nt, Artificial Sequence
  Description of Artificial Sequence: Synthetic oligonucleotide
  Sense strand starting at position 2171 of SEQ ID NO: 588952
uguagcuccgaccaauuaa

SEQ ID NO: 912607 - RNA, 19 nt, Artificial Sequence
  Description of Artificial Sequence: Synthetic oligonucleotide
  Antisense strand to SEQ ID NO: 912606
uuaauuggucggagcuaca

SEQ ID NO: 912608 - RNA, 19 nt, Artificial Sequence
  Description of Artificial Sequence: Synthetic oligonucleotide
  Sense strand starting at position 2273 of SEQ ID NO: 588952
gagcguucgaaccgggaaa

SEQ ID NO: 912609 - RNA, 19 nt, Artificial Sequence
  Description of Artificial Sequence: Synthetic oligonucleotide
  Antisense strand to SEQ ID NO: 912608
uuucccgguucgaacgcuc

SEQ ID NO: 912610 - RNA, 19 nt, Artificial Sequence
  Description of Artificial Sequence: Synthetic oligonucleotide
  Sense strand starting at position 2548 of SEQ ID NO: 588952
cggacuaauuaggguccaa

SEQ ID NO: 912611 - RNA, 19 nt, Artificial Sequence
  Description of Artificial Sequence: Synthetic oligonucleotide
  Antisense strand to SEQ ID NO: 912610
uuggacccuaauuaguccg

SEQ ID NO: 912612 - RNA, 19 nt, Artificial Sequence
  Description of Artificial Sequence: Synthetic oligonucleotide
  Sense strand starting at position 2560 of SEQ ID NO: 588952
gguccaaugucuccuuaaa

SEQ ID NO: 912613 - RNA, 19 nt, Artificial Sequence
  Description of Artificial Sequence: Synthetic oligonucleotide
  Antisense strand to SEQ ID NO: 912612
uuuaaggagacauuggacc

SEQ ID NO: 912614 - RNA, 19 nt, Artificial Sequence
  Description of Artificial Sequence: Synthetic oligonucleotide
  Sense strand starting at position 2583 of SEQ ID NO: 588952
caagcucggccuuguguaa

SEQ ID NO: 912615 - RNA, 19 nt, Artificial Sequence
  Description of Artificial Sequence: Synthetic oligonucleotide
  Antisense strand to SEQ ID NO: 912614
uuacacaaggccgagcuug

SEQ ID NO: 912616 - RNA, 19 nt, Artificial Sequence
  Description of Artificial Sequence: Synthetic oligonucleotide
  Sense strand starting at position 2632 of SEQ ID NO: 588952
ggaggaucacgcugaucuu

SEQ ID NO: 912617 - RNA, 19 nt, Artificial Sequence
  Description of Artificial Sequence: Synthetic oligonucleotide
  Antisense strand to SEQ ID NO: 912616
aagaucagcgugauccucc

SEQ ID NO: 912618 - RNA, 19 nt, Artificial Sequence
  Description of Artificial Sequence: Synthetic oligonucleotide
  Sense strand starting at position 2633 of SEQ ID NO: 588952
gaggaucacgcugaucuua

SEQ ID NO: 912619 - RNA, 19 nt, Artificial Sequence
  Description of Artificial Sequence: Synthetic oligonucleotide
  Antisense strand to SEQ ID NO: 912618
uaagaucagcgugauccuc

SEQ ID NO: 912620 - RNA, 19 nt, Artificial Sequence
  Description of Artificial Sequence: Synthetic oligonucleotide
  Sense strand starting at position 2635 of SEQ ID NO: 588952
ggaucacgcugaucuuacu

SEQ ID NO: 912621 - RNA, 19 nt, Artificial Sequence
  Description of Artificial Sequence: Synthetic oligonucleotide
  Antisense strand to SEQ ID NO: 912620
aguaagaucagcgugaucc

SEQ ID NO: 912622 - RNA, 19 nt, Artificial Sequence
  Description of Artificial Sequence: Synthetic oligonucleotide
  Sense strand starting at position 2645 of SEQ ID NO: 588952
gaucuuacuucguucgguu

SEQ ID NO: 912623 - RNA, 19 nt, Artificial Sequence
  Description of Artificial Sequence: Synthetic oligonucleotide
  Antisense strand to SEQ ID NO: 912622
aaccgaacgaaguaagauc

SEQ ID NO: 912624 - RNA, 19 nt, Artificial Sequence
  Description of Artificial Sequence: Synthetic oligonucleotide
  Sense strand starting at position 2742 of SEQ ID NO: 588952
cagaaauggagucgcgaga

SEQ ID NO: 912625 - RNA, 19 nt, Artificial Sequence
  Description of Artificial Sequence: Synthetic oligonucleotide
  Antisense strand to SEQ ID NO: 912624
ucucgcgacuccauuucug

SEQ ID NO: 912626 - RNA, 19 nt, Artificial Sequence
  Description of Artificial Sequence: Synthetic oligonucleotide
  Sense strand starting at position 2821 of SEQ ID NO: 588952
ggcugugauugccauuuag

SEQ ID NO: 912627 - RNA, 19 nt, Artificial Sequence
  Description of Artificial Sequence: Synthetic oligonucleotide
  Antisense strand to SEQ ID NO: 912626
cuaaauggcaaucacagcc

SEQ ID NO: 912628 - RNA, 19 nt, Artificial Sequence
  Description of Artificial Sequence: Synthetic oligonucleotide
  Sense strand starting at position 2831 of SEQ ID NO: 588952
gccauuuaguuccgaaaca

SEQ ID NO: 912629 - RNA, 19 nt, Artificial Sequence
  Description of Artificial Sequence: Synthetic oligonucleotide
  Antisense strand to SEQ ID NO: 912628
uguuucggaacuaaauggc

SEQ ID NO: 912630 - RNA, 19 nt, Artificial Sequence
  Description of Artificial Sequence: Synthetic oligonucleotide
  Sense strand starting at position 2832 of SEQ ID NO: 588952
ccauuuaguuccgaaacag

SEQ ID NO: 912631 - RNA, 19 nt, Artificial Sequence
  Description of Artificial Sequence: Synthetic oligonucleotide
  Antisense strand to SEQ ID NO: 912630
cuguuucggaacuaaaugg

SEQ ID NO: 912632 - RNA, 19 nt, Artificial Sequence
  Description of Artificial Sequence: Synthetic oligonucleotide
  Sense strand starting at position 2951 of SEQ ID NO: 588952
gcugaagauccgggaauca

SEQ ID NO: 912633 - RNA, 19 nt, Artificial Sequence
  Description of Artificial Sequence: Synthetic oligonucleotide
  Antisense strand to SEQ ID NO: 912632
ugauucccggaucuucagc

SEQ ID NO: 912634 - RNA, 19 nt, Artificial Sequence
  Description of Artificial Sequence: Synthetic oligonucleotide
  Sense strand starting at position 3133 of SEQ ID NO: 588952
ccgcucuuuggagaagcaa

SEQ ID NO: 912635 - RNA, 19 nt, Artificial Sequence
  Description of Artificial Sequence: Synthetic oligonucleotide
  Antisense strand to SEQ ID NO: 912634
uugcuucuccaaagagcgg

SEQ ID NO: 912636 - RNA, 19 nt, Artificial Sequence
  Description of Artificial Sequence: Synthetic oligonucleotide
  Sense strand starting at position 3142 of SEQ ID NO: 588952
ggagaagcaagucaaguuu

SEQ ID NO: 912637 - RNA, 19 nt, Artificial Sequence
  Description of Artificial Sequence: Synthetic oligonucleotide
  Antisense strand to SEQ ID NO: 912636
aaacuugacuugcuucucc

SEQ ID NO: 912638 - RNA, 19 nt, Artificial Sequence
  Description of Artificial Sequence: Synthetic oligonucleotide
  Sense strand starting at position 3326 of SEQ ID NO: 588952
gcgccuuuccauccuuagu

SEQ ID NO: 912639 - RNA, 19 nt, Artificial Sequence
  Description of Artificial Sequence: Synthetic oligonucleotide
  Antisense strand to SEQ ID NO: 912638
acuaaggauggaaaggcgc

SEQ ID NO: 912640 - RNA, 19 nt, Artificial Sequence
  Description of Artificial Sequence: Synthetic oligonucleotide
  Sense strand starting at position 3454 of SEQ ID NO: 588952
caagaagaguguuggcuaa

SEQ ID NO: 912641 - RNA, 19 nt, Artificial Sequence
  Description of Artificial Sequence: Synthetic oligonucleotide
  Antisense strand to SEQ ID NO: 912640
uuagccaacacucuucuug

SEQ ID NO: 912642 - RNA, 19 nt, Artificial Sequence
  Description of Artificial Sequence: Synthetic oligonucleotide
  Sense strand starting at position 3456 of SEQ ID NO: 588952
agaagaguguuggcuaaug

SEQ ID NO: 912643 - RNA, 19 nt, Artificial Sequence
  Description of Artificial Sequence: Synthetic oligonucleotide
  Antisense strand to SEQ ID NO: 912642
cauuagccaacacucuucu

SEQ ID NO: 912644 - RNA, 19 nt, Artificial Sequence
  Description of Artificial Sequence: Synthetic oligonucleotide
  Sense strand starting at position 3458 of SEQ ID NO: 588952
aagaguguuggcuaaugua

SEQ ID NO: 912645 - RNA, 19 nt, Artificial Sequence
  Description of Artificial Sequence: Synthetic oligonucleotide
  Antisense strand to SEQ ID NO: 912644
uacauuagccaacacucuu

SEQ ID NO: 912646 - RNA, 19 nt, Artificial Sequence
  Description of Artificial Sequence: Synthetic oligonucleotide
  Sense strand starting at position 3461 of SEQ ID NO: 588952
aguguuggcuaauguaaca

SEQ ID NO: 912647 - RNA, 19 nt, Artificial Sequence
  Description of Artificial Sequence: Synthetic oligonucleotide
  Antisense strand to SEQ ID NO: 912646
uguuacauuagccaacacu

SEQ ID NO: 912648 - RNA, 19 nt, Artificial Sequence
  Description of Artificial Sequence: Synthetic oligonucleotide
  Sense strand starting at position 3492 of SEQ ID NO: 588952
gacguuuauuucuaugcgu

SEQ ID NO: 912649 - RNA, 19 nt, Artificial Sequence
  Description of Artificial Sequence: Synthetic oligonucleotide
  Antisense strand to SEQ ID NO: 912648
acgcauagaaauaaacguc

SEQ ID NO: 912650 - RNA, 19 nt, Artificial Sequence
  Description of Artificial Sequence: Synthetic oligonucleotide
  Sense strand starting at position 3509 of SEQ ID NO: 588952
gugcuugccuacuguaacu

SEQ ID NO: 912651 - RNA, 19 nt, Artificial Sequence
  Description of Artificial Sequence: Synthetic oligonucleotide
  Antisense strand to SEQ ID NO: 912650
aguuacaguaggcaagcac

SEQ ID NO: 912652 - RNA, 19 nt, Artificial Sequence
  Description of Artificial Sequence: Synthetic oligonucleotide
  Sense strand starting at position 3527 of SEQ ID NO: 588952
uugaccuguugguugagau

SEQ ID NO: 912653 - RNA, 19 nt, Artificial Sequence
  Description of Artificial Sequence: Synthetic oligonucleotide
  Antisense strand to SEQ ID NO: 912652
aucucaaccaacaggucaa

SEQ ID NO: 912654 - RNA, 19 nt, Artificial Sequence
  Description of Artificial Sequence: Synthetic oligonucleotide
  Sense strand starting at position 3528 of SEQ ID NO: 588952
ugaccuguugguugagaug

SEQ ID NO: 912655 - RNA, 19 nt, Artificial Sequence
  Description of Artificial Sequence: Synthetic oligonucleotide
  Antisense strand to SEQ ID NO: 912654
caucucaaccaacagguca

SEQ ID NO: 912656 - RNA, 19 nt, Artificial Sequence
  Description of Artificial Sequence: Synthetic oligonucleotide
  Sense strand starting at position 3594 of SEQ ID NO: 588952
cccuuuccucaguggauga

SEQ ID NO: 912657 - RNA, 19 nt, Artificial Sequence
  Description of Artificial Sequence: Synthetic oligonucleotide
  Antisense strand to SEQ ID NO: 912656
ucauccacugaggaaaggg

SEQ ID NO: 912658 - RNA, 19 nt, Artificial Sequence
  Description of Artificial Sequence: Synthetic oligonucleotide
  Sense strand starting at position 3604 of SEQ ID NO: 588952
aguggaugacucggugacu

SEQ ID NO: 912659 - RNA, 19 nt, Artificial Sequence
  Description of Artificial Sequence: Synthetic oligonucleotide
  Antisense strand to SEQ ID NO: 912658
agucaccgagucauccacu

SEQ ID NO: 912660 - RNA, 19 nt, Artificial Sequence
  Description of Artificial Sequence: Synthetic oligonucleotide
  Sense strand starting at position 3605 of SEQ ID NO: 588952
guggaugacucggugacuu

SEQ ID NO: 912661 - RNA, 19 nt, Artificial Sequence
  Description of Artificial Sequence: Synthetic oligonucleotide
  Antisense strand to SEQ ID NO: 912660
aagucaccgagucauccac

SEQ ID NO: 912662 - RNA, 19 nt, Artificial Sequence
  Description of Artificial Sequence: Synthetic oligonucleotide
  Sense strand starting at position 3607 of SEQ ID NO: 588952
ggaugacucggugacuuaa

SEQ ID NO: 912663 - RNA, 19 nt, Artificial Sequence
  Description of Artificial Sequence: Synthetic oligonucleotide
  Antisense strand to SEQ ID NO: 912662
uuaagucaccgagucaucc

SEQ ID NO: 912664 - RNA, 19 nt, Artificial Sequence
  Description of Artificial Sequence: Synthetic oligonucleotide
  Sense strand starting at position 3854 of SEQ ID NO: 588952
agccacaugugacuguuaa

SEQ ID NO: 912665 - RNA, 19 nt, Artificial Sequence
  Description of Artificial Sequence: Synthetic oligonucleotide
  Antisense strand to SEQ ID NO: 912664
uuaacagucacauguggcu

SEQ ID NO: 912666 - RNA, 19 nt, Artificial Sequence
  Description of Artificial Sequence: Synthetic oligonucleotide
  Sense strand starting at position 3855 of SEQ ID NO: 588952
gccacaugugacuguuaag

SEQ ID NO: 912667 - RNA, 19 nt, Artificial Sequence
  Description of Artificial Sequence: Synthetic oligonucleotide
  Antisense strand to SEQ ID NO: 912666
cuuaacagucacauguggc

SEQ ID NO: 912668 - RNA, 19 nt, Artificial Sequence
  Description of Artificial Sequence: Synthetic oligonucleotide
  Sense strand starting at position 3876 of SEQ ID NO: 588952
cuugaaauguguccaauuc

SEQ ID NO: 912669 - RNA, 19 nt, Artificial Sequence
  Description of Artificial Sequence: Synthetic oligonucleotide
  Antisense strand to SEQ ID NO: 912668
gaauuggacacauuucaag

SEQ ID NO: 912670 - RNA, 19 nt, Artificial Sequence
  Description of Artificial Sequence: Synthetic oligonucleotide
  Sense strand starting at position 129 of SEQ ID NO: 588962
gucugucaucuccauuaga

SEQ ID NO: 912671 - RNA, 19 nt, Artificial Sequence
  Description of Artificial Sequence: Synthetic oligonucleotide
  Antisense strand to SEQ ID NO: 912670
ucuaauggagaugacagac

SEQ ID NO: 912672 - RNA, 19 nt, Artificial Sequence
  Description of Artificial Sequence: Synthetic oligonucleotide
  Sense strand starting at position 164 of SEQ ID NO: 588962
uuauauguaccgugaagac

SEQ ID NO: 912673 - RNA, 19 nt, Artificial Sequence
  Description of Artificial Sequence: Synthetic oligonucleotide
  Antisense strand to SEQ ID NO: 912672
gucuucacgguacauauaa

SEQ ID NO: 912674 - RNA, 19 nt, Artificial Sequence
  Description of Artificial Sequence: Synthetic oligonucleotide
  Sense strand starting at position 231 of SEQ ID NO: 588962
cuaacauaugcucgaucaa

SEQ ID NO: 912675 - RNA, 19 nt, Artificial Sequence
  Description of Artificial Sequence: Synthetic oligonucleotide
  Antisense strand to SEQ ID NO: 912674
uugaucgagcauauguuag

SEQ ID NO: 912676 - RNA, 19 nt, Artificial Sequence
  Description of Artificial Sequence: Synthetic oligonucleotide
  Sense strand starting at position 269 of SEQ ID NO: 588962
ggugguauugagggaacaa

SEQ ID NO: 912677 - RNA, 19 nt, Artificial Sequence
  Description of Artificial Sequence: Synthetic oligonucleotide
  Antisense strand to SEQ ID NO: 912676
uuguucccucaauaccacc

SEQ ID NO: 912678 - RNA, 19 nt, Artificial Sequence
  Description of Artificial Sequence: Synthetic oligonucleotide
  Sense strand starting at position 383 of SEQ ID NO: 588962
acuuaaugacgucaaggua

SEQ ID NO: 912679 - RNA, 19 nt, Artificial Sequence
  Description of Artificial Sequence: Synthetic oligonucleotide
  Antisense strand to SEQ ID NO: 912678
uaccuugacgucauuaagu

SEQ ID NO: 912680 - RNA, 19 nt, Artificial Sequence
  Description of Artificial Sequence: Synthetic oligonucleotide
  Sense strand starting at position 446 of SEQ ID NO: 588962
aaugguacuguuuaugaau

SEQ ID NO: 912681 - RNA, 19 nt, Artificial Sequence
  Description of Artificial Sequence: Synthetic oligonucleotide
  Antisense strand to SEQ ID NO: 912680
auucauaaacaguaccauu

SEQ ID NO: 912682 - RNA, 19 nt, Artificial Sequence
  Description of Artificial Sequence: Synthetic oligonucleotide
  Sense strand starting at position 501 of SEQ ID NO: 588962
uuuaacagucuccaguuaa

SEQ ID NO: 912683 - RNA, 19 nt, Artificial Sequence
  Description of Artificial Sequence: Synthetic oligonucleotide
  Antisense strand to SEQ ID NO: 912682
uuaacuggagacuguuaaa

SEQ ID NO: 912684 - RNA, 19 nt, Artificial Sequence
  Description of Artificial Sequence: Synthetic oligonucleotide
  Sense strand starting at position 512 of SEQ ID NO: 588962
ccaguuaaauauguggaua

SEQ ID NO: 912685 - RNA, 19 nt, Artificial Sequence
  Description of Artificial Sequence: Synthetic oligonucleotide
  Antisense strand to SEQ ID NO: 912684
uauccacauauuuaacugg

SEQ ID NO: 912686 - RNA, 19 nt, Artificial Sequence
  Description of Artificial Sequence: Synthetic oligonucleotide
  Sense strand starting at position 540 of SEQ ID NO: 588962
uccacaauauagucugagu

SEQ ID NO: 912687 - RNA, 19 nt, Artificial Sequence
  Description of Artificial Sequence: Synthetic oligonucleotide
  Antisense strand to SEQ ID NO: 912686
acucagacuauauugugga

SEQ ID NO: 912688 - RNA, 19 nt, Artificial Sequence
  Description of Artificial Sequence: Synthetic oligonucleotide
  Sense strand starting at position 545 of SEQ ID NO: 588962
aauauagucugaguuagga

SEQ ID NO: 912689 - RNA, 19 nt, Artificial Sequence
  Description of Artificial Sequence: Synthetic oligonucleotide
  Antisense strand to SEQ ID NO: 912688
uccuaacucagacuauauu

SEQ ID NO: 912690 - RNA, 19 nt, Artificial Sequence
  Description of Artificial Sequence: Synthetic oligonucleotide
  Sense strand starting at position 554 of SEQ ID NO: 588962
ugaguuaggaauuguguca

SEQ ID NO: 912691 - RNA, 19 nt, Artificial Sequence
  Description of Artificial Sequence: Synthetic oligonucleotide
  Antisense strand to SEQ ID NO: 912690
ugacacaauuccuaacuca

SEQ ID NO: 912692 - RNA, 19 nt, Artificial Sequence
  Description of Artificial Sequence: Synthetic oligonucleotide
  Sense strand starting at position 561 of SEQ ID NO: 588962
ggaauugugucacuagauu

SEQ ID NO: 912693 - RNA, 19 nt, Artificial Sequence
  Description of Artificial Sequence: Synthetic oligonucleotide
  Antisense strand to SEQ ID NO: 912692
aaucuagugacacaauucc

SEQ ID NO: 912694 - RNA, 19 nt, Artificial Sequence
  Description of Artificial Sequence: Synthetic oligonucleotide
  Sense strand starting at position 970 of SEQ ID NO: 588962
ggccuagaaucucuaaggu

SEQ ID NO: 912695 - RNA, 19 nt, Artificial Sequence
  Description of Artificial Sequence: Synthetic oligonucleotide
  Antisense strand to SEQ ID NO: 912694
accuuagagauucuaggcc

SEQ ID NO: 912696 - RNA, 19 nt, Artificial Sequence
  Description of Artificial Sequence: Synthetic oligonucleotide
  Sense strand starting at position 1151 of SEQ ID NO: 588962
gccuauuaggauugaaaca

SEQ ID NO: 912697 - RNA, 19 nt, Artificial Sequence
  Description of Artificial Sequence: Synthetic oligonucleotide
  Antisense strand to SEQ ID NO: 912696
uguuucaauccuaauaggc

SEQ ID NO: 912698 - RNA, 19 nt, Artificial Sequence
  Description of Artificial Sequence: Synthetic oligonucleotide
  Sense strand starting at position 1217 of SEQ ID NO: 588962
ggaagaauguccgccaaau

SEQ ID NO: 912699 - RNA, 19 nt, Artificial Sequence
  Description of Artificial Sequence: Synthetic oligonucleotide
  Antisense strand to SEQ ID NO: 912698
auuuggcggacauucuucc

SEQ ID NO: 912700 - RNA, 19 nt, Artificial Sequence
  Description of Artificial Sequence: Synthetic oligonucleotide
  Sense strand starting at position 1228 of SEQ ID NO: 588962
cgccaaauuccugaggugu

SEQ ID NO: 912701 - RNA, 19 nt, Artificial Sequence
  Description of Artificial Sequence: Synthetic oligonucleotide
  Antisense strand to SEQ ID NO: 912700
acaccucaggaauuuggcg

SEQ ID NO: 912702 - RNA, 19 nt, Artificial Sequence
  Description of Artificial Sequence: Synthetic oligonucleotide
  Sense strand starting at position 1232 of SEQ ID NO: 588962
aaauuccugaggugugaga

SEQ ID NO: 912703 - RNA, 19 nt, Artificial Sequence
  Description of Artificial Sequence: Synthetic oligonucleotide
  Antisense strand to SEQ ID NO: 912702
ucucacaccucaggaauuu

SEQ ID NO: 912704 - RNA, 19 nt, Artificial Sequence
  Description of Artificial Sequence: Synthetic oligonucleotide
  Sense strand starting at position 1662 of SEQ ID NO: 588962
gcgucagcgagcucuugaa

SEQ ID NO: 912705 - RNA, 19 nt, Artificial Sequence
  Description of Artificial Sequence: Synthetic oligonucleotide
  Antisense strand to SEQ ID NO: 912704
uucaagagcucgcugacgc

SEQ ID NO: 912706 - RNA, 19 nt, Artificial Sequence
  Description of Artificial Sequence: Synthetic oligonucleotide
  Sense strand starting at position 2179 of SEQ ID NO: 588962
acaaguuugcagggucuau

SEQ ID NO: 912707 - RNA, 19 nt, Artificial Sequence
  Description of Artificial Sequence: Synthetic oligonucleotide
  Antisense strand to SEQ ID NO: 912706
auagacccugcaaacuugu

SEQ ID NO: 912708 - RNA, 19 nt, Artificial Sequence
  Description of Artificial Sequence: Synthetic oligonucleotide
  Sense strand starting at position 2190 of SEQ ID NO: 588962
gggucuauaucuuccugga

SEQ ID NO: 912709 - RNA, 19 nt, Artificial Sequence
  Description of Artificial Sequence: Synthetic oligonucleotide
  Antisense strand to SEQ ID NO: 912708
uccaggaagauauagaccc

SEQ ID NO: 912710 - RNA, 19 nt, Artificial Sequence
  Description of Artificial Sequence: Synthetic oligonucleotide
  Sense strand starting at position 2250 of SEQ ID NO: 588962
ucaauuucucgcgaggcga

SEQ ID NO: 912711 - RNA, 19 nt, Artificial Sequence
  Description of Artificial Sequence: Synthetic oligonucleotide
  Antisense strand to SEQ ID NO: 912710
ucgccucgcgagaaauuga

SEQ ID NO: 912712 - RNA, 19 nt, Artificial Sequence
  Description of Artificial Sequence: Synthetic oligonucleotide
  Sense strand starting at position 2616 of SEQ ID NO: 588962
cagggauucuggcuccaaa

SEQ ID NO: 912713 - RNA, 19 nt, Artificial Sequence
  Description of Artificial Sequence: Synthetic oligonucleotide
  Antisense strand to SEQ ID NO: 912712
uuuggagccagaaucccug

SEQ ID NO: 912714 - RNA, 19 nt, Artificial Sequence
  Description of Artificial Sequence: Synthetic oligonucleotide
  Sense strand starting at position 2829 of SEQ ID NO: 588962
gauguaaugucaguuaagc

SEQ ID NO: 912715 - RNA, 19 nt, Artificial Sequence
  Description of Artificial Sequence: Synthetic oligonucleotide
  Antisense strand to SEQ ID NO: 912714
gcuuaacugacauuacauc

SEQ ID NO: 912716 - RNA, 19 nt, Artificial Sequence
  Description of Artificial Sequence: Synthetic oligonucleotide
  Sense strand starting at position 2868 of SEQ ID NO: 588962
cugucacauggcgaugaua

SEQ ID NO: 912717 - RNA, 19 nt, Artificial Sequence
  Description of Artificial Sequence: Synthetic oligonucleotide
  Antisense strand to SEQ ID NO: 912716
uaucaucgccaugugacag

SEQ ID NO: 912718 - RNA, 19 nt, Artificial Sequence
  Description of Artificial Sequence: Synthetic oligonucleotide
  Sense strand starting at position 2870 of SEQ ID NO: 588962
gucacauggcgaugauaau

SEQ ID NO: 912719 - RNA, 19 nt, Artificial Sequence
  Description of Artificial Sequence: Synthetic oligonucleotide
  Antisense strand to SEQ ID NO: 912718
auuaucaucgccaugugac

SEQ ID NO: 912720 - RNA, 19 nt, Artificial Sequence
  Description of Artificial Sequence: Synthetic oligonucleotide
  Sense strand starting at position 2871 of SEQ ID NO: 588962
ucacauggcgaugauaaua

SEQ ID NO: 912721 - RNA, 19 nt, Artificial Sequence
  Description of Artificial Sequence: Synthetic oligonucleotide
  Antisense strand to SEQ ID NO: 912720
uauuaucaucgccauguga

SEQ ID NO: 912722 - RNA, 19 nt, Artificial Sequence
  Description of Artificial Sequence: Synthetic oligonucleotide
  Sense strand starting at position 3043 of SEQ ID NO: 588962
agccuugacugaguacuca

SEQ ID NO: 912723 - RNA, 19 nt, Artificial Sequence
  Description of Artificial Sequence: Synthetic oligonucleotide
  Antisense strand to SEQ ID NO: 912722
ugaguacucagucaaggcu

SEQ ID NO: 912724 - RNA, 19 nt, Artificial Sequence
  Description of Artificial Sequence: Synthetic oligonucleotide
  Sense strand starting at position 3047 of SEQ ID NO: 588962
uugacugaguacucaacau

SEQ ID NO: 912725 - RNA, 19 nt, Artificial Sequence
  Description of Artificial Sequence: Synthetic oligonucleotide
  Antisense strand to SEQ ID NO: 912724
auguugaguacucagucaa

SEQ ID NO: 912726 - RNA, 19 nt, Artificial Sequence
  Description of Artificial Sequence: Synthetic oligonucleotide
  Sense strand starting at position 3051 of SEQ ID NO: 588962
cugaguacucaacauguga

SEQ ID NO: 912727 - RNA, 19 nt, Artificial Sequence
  Description of Artificial Sequence: Synthetic oligonucleotide
  Antisense strand to SEQ ID NO: 912726
ucacauguugaguacucag

SEQ ID NO: 912728 - RNA, 19 nt, Artificial Sequence
  Description of Artificial Sequence: Synthetic oligonucleotide
  Sense strand starting at position 3194 of SEQ ID NO: 588962
agaaacuauugcuugauag

SEQ ID NO: 912729 - RNA, 19 nt, Artificial Sequence
  Description of Artificial Sequence: Synthetic oligonucleotide
  Antisense strand to SEQ ID NO: 912728
cuaucaagcaauaguuucu

SEQ ID NO: 912730 - RNA, 19 nt, Artificial Sequence
  Description of Artificial Sequence: Synthetic oligonucleotide
  Sense strand starting at position 3198 of SEQ ID NO: 588962
acuauugcuugauagauuu

SEQ ID NO: 912731 - RNA, 19 nt, Artificial Sequence
  Description of Artificial Sequence: Synthetic oligonucleotide
  Antisense strand to SEQ ID NO: 912730
aaaucuaucaagcaauagu

SEQ ID NO: 912732 - RNA, 19 nt, Artificial Sequence
  Description of Artificial Sequence: Synthetic oligonucleotide
  Sense strand starting at position 3205 of SEQ ID NO: 588962
cuugauagauuuggagaca

SEQ ID NO: 912733 - RNA, 19 nt, Artificial Sequence
  Description of Artificial Sequence: Synthetic oligonucleotide
  Antisense strand to SEQ ID NO: 912732
ugucuccaaaucuaucaag

SEQ ID NO: 912734 - RNA, 19 nt, Artificial Sequence
  Description of Artificial Sequence: Synthetic oligonucleotide
  Sense strand starting at position 3262 of SEQ ID NO: 588962
ccuauccaucucgauugua

SEQ ID NO: 912735 - RNA, 19 nt, Artificial Sequence
  Description of Artificial Sequence: Synthetic oligonucleotide
  Antisense strand to SEQ ID NO: 912734
uacaaucgagauggauagg

SEQ ID NO: 912736 - RNA, 19 nt, Artificial Sequence
  Description of Artificial Sequence: Synthetic oligonucleotide
  Sense strand starting at position 3265 of SEQ ID NO: 588962
auccaucucgauuguaagu

SEQ ID NO: 912737 - RNA, 19 nt, Artificial Sequence
  Description of Artificial Sequence: Synthetic oligonucleotide
  Antisense strand to SEQ ID NO: 912736
acuuacaaucgagauggau

SEQ ID NO: 912738 - RNA, 19 nt, Artificial Sequence
  Description of Artificial Sequence: Synthetic oligonucleotide
  Sense strand starting at position 3300 of SEQ ID NO: 588962
ucagauggccuuuggaguu

SEQ ID NO: 912739 - RNA, 19 nt, Artificial Sequence
  Description of Artificial Sequence: Synthetic oligonucleotide
  Antisense strand to SEQ ID NO: 912738
aacuccaaaggccaucuga

SEQ ID NO: 912740 - RNA, 19 nt, Artificial Sequence
  Description of Artificial Sequence: Synthetic oligonucleotide
  Sense strand starting at position 3385 of SEQ ID NO: 588962
guauaaagaaagugaugua

SEQ ID NO: 912741 - RNA, 19 nt, Artificial Sequence
  Description of Artificial Sequence: Synthetic oligonucleotide
  Antisense strand to SEQ ID NO: 912740
uacaucacuuucuuuauac

SEQ ID NO: 912742 - RNA, 19 nt, Artificial Sequence
  Description of Artificial Sequence: Synthetic oligonucleotide
  Sense strand starting at position 3455 of SEQ ID NO: 588962
gcuucaauuguggagcaga

SEQ ID NO: 912743 - RNA, 19 nt, Artificial Sequence
  Description of Artificial Sequence: Synthetic oligonucleotide
  Antisense strand to SEQ ID NO: 912742
ucugcuccacaauugaagc

SEQ ID NO: 912744 - RNA, 19 nt, Artificial Sequence
  Description of Artificial Sequence: Synthetic oligonucleotide
  Sense strand starting at position 3533 of SEQ ID NO: 588962
uuaucuacuggguggucaa

SEQ ID NO: 912745 - RNA, 19 nt, Artificial Sequence
  Description of Artificial Sequence: Synthetic oligonucleotide
  Antisense strand to SEQ ID NO: 912744
uugaccacccaguagauaa

SEQ ID NO: 912746 - RNA, 19 nt, Artificial Sequence
  Description of Artificial Sequence: Synthetic oligonucleotide
  Sense strand starting at position 3657 of SEQ ID NO: 588962
guagaaauuggauguuauc

SEQ ID NO: 912747 - RNA, 19 nt, Artificial Sequence
  Description of Artificial Sequence: Synthetic oligonucleotide
  Antisense strand to SEQ ID NO: 912746
gauaacauccaauuucuac

SEQ ID NO: 912748 - RNA, 19 nt, Artificial Sequence
  Description of Artificial Sequence: Synthetic oligonucleotide
  Sense strand starting at position 3663 of SEQ ID NO: 588962
auuggauguuaucucuuga

SEQ ID NO: 912749 - RNA, 19 nt, Artificial Sequence
  Description of Artificial Sequence: Synthetic oligonucleotide
  Antisense strand to SEQ ID NO: 912748
ucaagagauaacauccaau

SEQ ID NO: 912750 - RNA, 19 nt, Artificial Sequence
  Description of Artificial Sequence: Synthetic oligonucleotide
  Sense strand starting at position 43 of SEQ ID NO: 588970
ggcagucaccucuggaaga

SEQ ID NO: 912751 - RNA, 19 nt, Artificial Sequence
  Description of Artificial Sequence: Synthetic oligonucleotide
  Antisense strand to SEQ ID NO: 912750
ucuuccagaggugacugcc

SEQ ID NO: 912752 - RNA, 19 nt, Artificial Sequence
  Description of Artificial Sequence: Synthetic oligonucleotide
  Sense strand starting at position 160 of SEQ ID NO: 588970
gucgucuccgagagucuga

SEQ ID NO: 912753 - RNA, 19 nt, Artificial Sequence
  Description of Artificial Sequence: Synthetic oligonucleotide
  Antisense strand to SEQ ID NO: 912752
ucagacucucggagacgac

SEQ ID NO: 912754 - RNA, 19 nt, Artificial Sequence
  Description of Artificial Sequence: Synthetic oligonucleotide
  Sense strand starting at position 197 of SEQ ID NO: 588970
ggagacagggucuguaaua

SEQ ID NO: 912755 - RNA, 19 nt, Artificial Sequence
  Description of Artificial Sequence: Synthetic oligonucleotide
  Antisense strand to SEQ ID NO: 912754
uauuacagacccugucucc

SEQ ID NO: 912756 - RNA, 19 nt, Artificial Sequence
  Description of Artificial Sequence: Synthetic oligonucleotide
  Sense strand starting at position 198 of SEQ ID NO: 588970
gagacagggucuguaauag

SEQ ID NO: 912757 - RNA, 19 nt, Artificial Sequence
  Description of Artificial Sequence: Synthetic oligonucleotide
  Antisense strand to SEQ ID NO: 912756
cuauuacagacccugucuc

SEQ ID NO: 912758 - RNA, 19 nt, Artificial Sequence
  Description of Artificial Sequence: Synthetic oligonucleotide
  Sense strand starting at position 279 of SEQ ID NO: 588970
cccgauauagaccgggaaa

SEQ ID NO: 912759 - RNA, 19 nt, Artificial Sequence
  Description of Artificial Sequence: Synthetic oligonucleotide
  Antisense strand to SEQ ID NO: 912758
uuucccggucuauaucggg

SEQ ID NO: 912760 - RNA, 19 nt, Artificial Sequence
  Description of Artificial Sequence: Synthetic oligonucleotide
  Sense strand starting at position 281 of SEQ ID NO: 588970
cgauauagaccgggaaacu

SEQ ID NO: 912761 - RNA, 19 nt, Artificial Sequence
  Description of Artificial Sequence: Synthetic oligonucleotide
  Antisense strand to SEQ ID NO: 912760
aguuucccggucuauaucg

SEQ ID NO: 912762 - RNA, 19 nt, Artificial Sequence
  Description of Artificial Sequence: Synthetic oligonucleotide
  Sense strand starting at position 436 of SEQ ID NO: 588970
gguuguacggcuuaggaua

SEQ ID NO: 912763 - RNA, 19 nt, Artificial Sequence
  Description of Artificial Sequence: Synthetic oligonucleotide
  Antisense strand to SEQ ID NO: 912762
uauccuaagccguacaacc

SEQ ID NO: 912764 - RNA, 19 nt, Artificial Sequence
  Description of Artificial Sequence: Synthetic oligonucleotide
  Sense strand starting at position 475 of SEQ ID NO: 588970
ccaggauacgaucgagucu

SEQ ID NO: 912765 - RNA, 19 nt, Artificial Sequence
  Description of Artificial Sequence: Synthetic oligonucleotide
  Antisense strand to SEQ ID NO: 912764
agacucgaucguauccugg

SEQ ID NO: 912766 - RNA, 19 nt, Artificial Sequence
  Description of Artificial Sequence: Synthetic oligonucleotide
  Sense strand starting at position 496 of SEQ ID NO: 588970
ggcagucagucuccgauuu

SEQ ID NO: 912767 - RNA, 19 nt, Artificial Sequence
  Description of Artificial Sequence: Synthetic oligonucleotide
  Antisense strand to SEQ ID NO: 912766
aaaucggagacugacugcc

SEQ ID NO: 912768 - RNA, 19 nt, Artificial Sequence
  Description of Artificial Sequence: Synthetic oligonucleotide
  Sense strand starting at position 787 of SEQ ID NO: 588970
cgugucguggugcuuuaaa

SEQ ID NO: 912769 - RNA, 19 nt, Artificial Sequence
  Description of Artificial Sequence: Synthetic oligonucleotide
  Antisense strand to SEQ ID NO: 912768
uuuaaagcaccacgacacg

SEQ ID NO: 912770 - RNA, 19 nt, Artificial Sequence
  Description of Artificial Sequence: Synthetic oligonucleotide
  Sense strand starting at position 910 of SEQ ID NO: 588970
gacucuugcaggcggagaa

SEQ ID NO: 912771 - RNA, 19 nt, Artificial Sequence
  Description of Artificial Sequence: Synthetic oligonucleotide
  Antisense strand to SEQ ID NO: 912770
uucuccgccugcaagaguc

SEQ ID NO: 912772 - RNA, 19 nt, Artificial Sequence
  Description of Artificial Sequence: Synthetic oligonucleotide
  Sense strand starting at position 1082 of SEQ ID NO: 588970
gguccuucucgcguucaca

SEQ ID NO: 912773 - RNA, 19 nt, Artificial Sequence
  Description of Artificial Sequence: Synthetic oligonucleotide
  Antisense strand to SEQ ID NO: 912772
ugugaacgcgagaaggacc

SEQ ID NO: 912774 - RNA, 19 nt, Artificial Sequence
  Description of Artificial Sequence: Synthetic oligonucleotide
  Sense strand starting at position 1226 of SEQ ID NO: 588970
ggcggcagcuauuuauaga

SEQ ID NO: 912775 - RNA, 19 nt, Artificial Sequence
  Description of Artificial Sequence: Synthetic oligonucleotide
  Antisense strand to SEQ ID NO: 912774
ucuauaaauagcugccgcc

SEQ ID NO: 912776 - RNA, 19 nt, Artificial Sequence
  Description of Artificial Sequence: Synthetic oligonucleotide
  Sense strand starting at position 1767 of SEQ ID NO: 588970
ccaggaagaguuugagcga

SEQ ID NO: 912777 - RNA, 19 nt, Artificial Sequence
  Description of Artificial Sequence: Synthetic oligonucleotide
  Antisense strand to SEQ ID NO: 912776
ucgcucaaacucuuccugg

SEQ ID NO: 912778 - RNA, 19 nt, Artificial Sequence
  Description of Artificial Sequence: Synthetic oligonucleotide
  Sense strand starting at position 1772 of SEQ ID NO: 588970
aagaguuugagcgacggua

SEQ ID NO: 912779 - RNA, 19 nt, Artificial Sequence
  Description of Artificial Sequence: Synthetic oligonucleotide
  Antisense strand to SEQ ID NO: 912778
uaccgucgcucaaacucuu

SEQ ID NO: 912780 - RNA, 19 nt, Artificial Sequence
  Description of Artificial Sequence: Synthetic oligonucleotide
  Sense strand starting at position 1786 of SEQ ID NO: 588970
cgguagaguuaugugggaa

SEQ ID NO: 912781 - RNA, 19 nt, Artificial Sequence
  Description of Artificial Sequence: Synthetic oligonucleotide
  Antisense strand to SEQ ID NO: 912780
uucccacauaacucuaccg

SEQ ID NO: 912782 - RNA, 19 nt, Artificial Sequence
  Description of Artificial Sequence: Synthetic oligonucleotide
  Sense strand starting at position 1787 of SEQ ID NO: 588970
gguagaguuaugugggaaa

SEQ ID NO: 912783 - RNA, 19 nt, Artificial Sequence
  Description of Artificial Sequence: Synthetic oligonucleotide
  Antisense strand to SEQ ID NO: 912782
uuucccacauaacucuacc

SEQ ID NO: 912784 - RNA, 19 nt, Artificial Sequence
  Description of Artificial Sequence: Synthetic oligonucleotide
  Sense strand starting at position 2152 of SEQ ID NO: 588970
uuaggugguuuauuccaaa

SEQ ID NO: 912785 - RNA, 19 nt, Artificial Sequence
  Description of Artificial Sequence: Synthetic oligonucleotide
  Antisense strand to SEQ ID NO: 912784
uuuggaauaaaccaccuaa

SEQ ID NO: 912786 - RNA, 19 nt, Artificial Sequence
  Description of Artificial Sequence: Synthetic oligonucleotide
  Sense strand starting at position 2294 of SEQ ID NO: 588970
gcucuuaauccugauguau

SEQ ID NO: 912787 - RNA, 19 nt, Artificial Sequence
  Description of Artificial Sequence: Synthetic oligonucleotide
  Antisense strand to SEQ ID NO: 912786
auacaucaggauuaagagc

SEQ ID NO: 912788 - RNA, 19 nt, Artificial Sequence
  Description of Artificial Sequence: Synthetic oligonucleotide
  Sense strand starting at position 2469 of SEQ ID NO: 588970
uuuguugugaaucgaacau

SEQ ID NO: 912789 - RNA, 19 nt, Artificial Sequence
  Description of Artificial Sequence: Synthetic oligonucleotide
  Antisense strand to SEQ ID NO: 912788
auguucgauucacaacaaa

SEQ ID NO: 912790 - RNA, 19 nt, Artificial Sequence
  Description of Artificial Sequence: Synthetic oligonucleotide
  Sense strand starting at position 2664 of SEQ ID NO: 588970
ugacccuuacggugaucau

SEQ ID NO: 912791 - RNA, 19 nt, Artificial Sequence
  Description of Artificial Sequence: Synthetic oligonucleotide
  Antisense strand to SEQ ID NO: 912790
augaucaccguaaggguca

SEQ ID NO: 912792 - RNA, 19 nt, Artificial Sequence
  Description of Artificial Sequence: Synthetic oligonucleotide
  Sense strand starting at position 2726 of SEQ ID NO: 588970
ucaaaucuguuguuaaucu

SEQ ID NO: 912793 - RNA, 19 nt, Artificial Sequence
  Description of Artificial Sequence: Synthetic oligonucleotide
  Antisense strand to SEQ ID NO: 912792
agauuaacaacagauuuga

SEQ ID NO: 912794 - RNA, 19 nt, Artificial Sequence
  Description of Artificial Sequence: Synthetic oligonucleotide
  Sense strand starting at position 2916 of SEQ ID NO: 588970
uuggaagugcugggugaua

SEQ ID NO: 912795 - RNA, 19 nt, Artificial Sequence
  Description of Artificial Sequence: Synthetic oligonucleotide
  Antisense strand to SEQ ID NO: 912794
uaucacccagcacuuccaa

SEQ ID NO: 912796 - RNA, 19 nt, Artificial Sequence
  Description of Artificial Sequence: Synthetic oligonucleotide
  Sense strand starting at position 2918 of SEQ ID NO: 588970
ggaagugcugggugauaga

SEQ ID NO: 912797 - RNA, 19 nt, Artificial Sequence
  Description of Artificial Sequence: Synthetic oligonucleotide
  Antisense strand to SEQ ID NO: 912796
ucuaucacccagcacuucc

SEQ ID NO: 912798 - RNA, 19 nt, Artificial Sequence
  Description of Artificial Sequence: Synthetic oligonucleotide
  Sense strand starting at position 2947 of SEQ ID NO: 588970
ccucaacuucggcagagau

SEQ ID NO: 912799 - RNA, 19 nt, Artificial Sequence
  Description of Artificial Sequence: Synthetic oligonucleotide
  Antisense strand to SEQ ID NO: 912798
aucucugccgaaguugagg

SEQ ID NO: 912800 - RNA, 19 nt, Artificial Sequence
  Description of Artificial Sequence: Synthetic oligonucleotide
  Sense strand starting at position 3059 of SEQ ID NO: 588970
aaauucugauaugugagua

SEQ ID NO: 912801 - RNA, 19 nt, Artificial Sequence
  Description of Artificial Sequence: Synthetic oligonucleotide
  Antisense strand to SEQ ID NO: 912800
uacucacauaucagaauuu

SEQ ID NO: 912802 - RNA, 19 nt, Artificial Sequence
  Description of Artificial Sequence: Synthetic oligonucleotide
  Sense strand starting at position 3064 of SEQ ID NO: 588970
cugauaugugaguaauggu

SEQ ID NO: 912803 - RNA, 19 nt, Artificial Sequence
  Description of Artificial Sequence: Synthetic oligonucleotide
  Antisense strand to SEQ ID NO: 912802
accauuacucacauaucag

SEQ ID NO: 912804 - RNA, 19 nt, Artificial Sequence
  Description of Artificial Sequence: Synthetic oligonucleotide
  Sense strand starting at position 3073 of SEQ ID NO: 588970
gaguaaugguaucucauug

SEQ ID NO: 912805 - RNA, 19 nt, Artificial Sequence
  Description of Artificial Sequence: Synthetic oligonucleotide
  Antisense strand to SEQ ID NO: 912804
caaugagauaccauuacuc

SEQ ID NO: 912806 - RNA, 19 nt, Artificial Sequence
  Description of Artificial Sequence: Synthetic oligonucleotide
  Sense strand starting at position 3117 of SEQ ID NO: 588970
uccuaauguguugaguauc

SEQ ID NO: 912807 - RNA, 19 nt, Artificial Sequence
  Description of Artificial Sequence: Synthetic oligonucleotide
  Antisense strand to SEQ ID NO: 912806
gauacucaacacauuagga

SEQ ID NO: 912808 - RNA, 19 nt, Artificial Sequence
  Description of Artificial Sequence: Synthetic oligonucleotide
  Sense strand starting at position 3120 of SEQ ID NO: 588970
uaauguguugaguaucacu

SEQ ID NO: 912809 - RNA, 19 nt, Artificial Sequence
  Description of Artificial Sequence: Synthetic oligonucleotide
  Antisense strand to SEQ ID NO: 912808
agugauacucaacacauua

SEQ ID NO: 912810 - RNA, 19 nt, Artificial Sequence
  Description of Artificial Sequence: Synthetic oligonucleotide
  Sense strand starting at position 3139 of SEQ ID NO: 588970
ucauauuuauuggccaguu

SEQ ID NO: 912811 - RNA, 19 nt, Artificial Sequence
  Description of Artificial Sequence: Synthetic oligonucleotide
  Antisense strand to SEQ ID NO: 912810
aacuggccaauaaauauga

SEQ ID NO: 912812 - RNA, 19 nt, Artificial Sequence
  Description of Artificial Sequence: Synthetic oligonucleotide
  Sense strand starting at position 3205 of SEQ ID NO: 588970
gauaguccuguguauugaa

SEQ ID NO: 912813 - RNA, 19 nt, Artificial Sequence
  Description of Artificial Sequence: Synthetic oligonucleotide
  Antisense strand to SEQ ID NO: 912812
uucaauacacaggacuauc

SEQ ID NO: 912814 - RNA, 19 nt, Artificial Sequence
  Description of Artificial Sequence: Synthetic oligonucleotide
  Sense strand starting at position 3212 of SEQ ID NO: 588970
cuguguauugaauagauuc

SEQ ID NO: 912815 - RNA, 19 nt, Artificial Sequence
  Description of Artificial Sequence: Synthetic oligonucleotide
  Antisense strand to SEQ ID NO: 912814
gaaucuauucaauacacag

SEQ ID NO: 912816 - RNA, 19 nt, Artificial Sequence
  Description of Artificial Sequence: Synthetic oligonucleotide
  Sense strand starting at position 3295 of SEQ ID NO: 588970
auaaacagguguucuuaaa

SEQ ID NO: 912817 - RNA, 19 nt, Artificial Sequence
  Description of Artificial Sequence: Synthetic oligonucleotide
  Antisense strand to SEQ ID NO: 912816
uuuaagaacaccuguuuau

SEQ ID NO: 912818 - RNA, 19 nt, Artificial Sequence
  Description of Artificial Sequence: Synthetic oligonucleotide
  Sense strand starting at position 3309 of SEQ ID NO: 588970
uuaaauacagucuggcaau

SEQ ID NO: 912819 - RNA, 19 nt, Artificial Sequence
  Description of Artificial Sequence: Synthetic oligonucleotide
  Antisense strand to SEQ ID NO: 912818
auugccagacuguauuuaa

SEQ ID NO: 912820 - RNA, 19 nt, Artificial Sequence
  Description of Artificial Sequence: Synthetic oligonucleotide
  Sense strand starting at position 3345 of SEQ ID NO: 588970
gcacucuguguccuguuua

SEQ ID NO: 912821 - RNA, 19 nt, Artificial Sequence
  Description of Artificial Sequence: Synthetic oligonucleotide
  Antisense strand to SEQ ID NO: 912820
uaaacaggacacagagugc

SEQ ID NO: 912822 - RNA, 19 nt, Artificial Sequence
  Description of Artificial Sequence: Synthetic oligonucleotide
  Sense strand starting at position 3350 of SEQ ID NO: 588970
cuguguccuguuuaagaac

SEQ ID NO: 912823 - RNA, 19 nt, Artificial Sequence
  Description of Artificial Sequence: Synthetic oligonucleotide
  Antisense strand to SEQ ID NO: 912822
guucuuaaacaggacacag

SEQ ID NO: 912824 - RNA, 19 nt, Artificial Sequence
  Description of Artificial Sequence: Synthetic oligonucleotide
  Sense strand starting at position 3373 of SEQ ID NO: 588970
uccuguuccuggguuauaa

SEQ ID NO: 912825 - RNA, 19 nt, Artificial Sequence
  Description of Artificial Sequence: Synthetic oligonucleotide
  Antisense strand to SEQ ID NO: 912824
uuauaacccaggaacagga

SEQ ID NO: 912826 - RNA, 19 nt, Artificial Sequence
  Description of Artificial Sequence: Synthetic oligonucleotide
  Sense strand starting at position 3385 of SEQ ID NO: 588970
guuauaaaguuaucuuccu

SEQ ID NO: 912827 - RNA, 19 nt, Artificial Sequence
  Description of Artificial Sequence: Synthetic oligonucleotide
  Antisense strand to SEQ ID NO: 912826
aggaagauaacuuuauaac

SEQ ID NO: 912828 - RNA, 19 nt, Artificial Sequence
  Description of Artificial Sequence: Synthetic oligonucleotide
  Sense strand starting at position 3475 of SEQ ID NO: 588970
uagagucuugcgcuuuguu

SEQ ID NO: 912829 - RNA, 19 nt, Artificial Sequence
  Description of Artificial Sequence: Synthetic oligonucleotide
  Antisense strand to SEQ ID NO: 912828
aacaaagcgcaagacucua

SEQ ID NO: 912830 - RNA, 19 nt, Artificial Sequence
  Description of Artificial Sequence: Synthetic oligonucleotide
  Sense strand starting at position 24 of SEQ ID NO: 588971
ucaucuuaggcugggagaa

SEQ ID NO: 912831 - RNA, 19 nt, Artificial Sequence
  Description of Artificial Sequence: Synthetic oligonucleotide
  Antisense strand to SEQ ID NO: 912830
uucucccagccuaagauga

SEQ ID NO: 912832 - RNA, 19 nt, Artificial Sequence
  Description of Artificial Sequence: Synthetic oligonucleotide
  Sense strand starting at position 25 of SEQ ID NO: 588971
caucuuaggcugggagaaa

SEQ ID NO: 912833 - RNA, 19 nt, Artificial Sequence
  Description of Artificial Sequence: Synthetic oligonucleotide
  Antisense strand to SEQ ID NO: 912832
uuucucccagccuaagaug

SEQ ID NO: 912834 - RNA, 19 nt, Artificial Sequence
  Description of Artificial Sequence: Synthetic oligonucleotide
  Sense strand starting at position 76 of SEQ ID NO: 588971
uuguaagacuagcucauua

SEQ ID NO: 912835 - RNA, 19 nt, Artificial Sequence
  Description of Artificial Sequence: Synthetic oligonucleotide
  Antisense strand to SEQ ID NO: 912834
uaaugagcuagucuuacaa

SEQ ID NO: 912836 - RNA, 19 nt, Artificial Sequence
  Description of Artificial Sequence: Synthetic oligonucleotide
  Sense strand starting at position 78 of SEQ ID NO: 588971
guaagacuagcucauuaaa

SEQ ID NO: 912837 - RNA, 19 nt, Artificial Sequence
  Description of Artificial Sequence: Synthetic oligonucleotide
  Antisense strand to SEQ ID NO: 912836
uuuaaugagcuagucuuac

SEQ ID NO: 912838 - RNA, 19 nt, Artificial Sequence
  Description of Artificial Sequence: Synthetic oligonucleotide
  Sense strand starting at position 140 of SEQ ID NO: 588971
guugguuguguggcucuaa

SEQ ID NO: 912839 - RNA, 19 nt, Artificial Sequence
  Description of Artificial Sequence: Synthetic oligonucleotide
  Antisense strand to SEQ ID NO: 912838
uuagagccacacaaccaac

SEQ ID NO: 912840 - RNA, 19 nt, Artificial Sequence
  Description of Artificial Sequence: Synthetic oligonucleotide
  Sense strand starting at position 149 of SEQ ID NO: 588971
guggcucuaacugauggaa

SEQ ID NO: 912841 - RNA, 19 nt, Artificial Sequence
  Description of Artificial Sequence: Synthetic oligonucleotide
  Antisense strand to SEQ ID NO: 912840
uuccaucaguuagagccac

SEQ ID NO: 912842 - RNA, 19 nt, Artificial Sequence
  Description of Artificial Sequence: Synthetic oligonucleotide
  Sense strand starting at position 152 of SEQ ID NO: 588971
gcucuaacugauggaaacu

SEQ ID NO: 912843 - RNA, 19 nt, Artificial Sequence
  Description of Artificial Sequence: Synthetic oligonucleotide
  Antisense strand to SEQ ID NO: 912842
aguuuccaucaguuagagc

SEQ ID NO: 912844 - RNA, 19 nt, Artificial Sequence
  Description of Artificial Sequence: Synthetic oligonucleotide
  Sense strand starting at position 205 of SEQ ID NO: 588971
uucuguaagucuuugagau

SEQ ID NO: 912845 - RNA, 19 nt, Artificial Sequence
  Description of Artificial Sequence: Synthetic oligonucleotide
  Antisense strand to SEQ ID NO: 912844
aucucaaagacuuacagaa

SEQ ID NO: 912846 - RNA, 19 nt, Artificial Sequence
  Description of Artificial Sequence: Synthetic oligonucleotide
  Sense strand starting at position 206 of SEQ ID NO: 588971
ucuguaagucuuugagaug

SEQ ID NO: 912847 - RNA, 19 nt, Artificial Sequence
  Description of Artificial Sequence: Synthetic oligonucleotide
  Antisense strand to SEQ ID NO: 912846
caucucaaagacuuacaga

SEQ ID NO: 912848 - RNA, 19 nt, Artificial Sequence
  Description of Artificial Sequence: Synthetic oligonucleotide
  Sense strand starting at position 502 of SEQ ID NO: 588971
ggcagucaccucuggaaga

SEQ ID NO: 912849 - RNA, 19 nt, Artificial Sequence
  Description of Artificial Sequence: Synthetic oligonucleotide
  Antisense strand to SEQ ID NO: 912848
ucuuccagaggugacugcc

SEQ ID NO: 912850 - RNA, 19 nt, Artificial Sequence
  Description of Artificial Sequence: Synthetic oligonucleotide
  Sense strand starting at position 619 of SEQ ID NO: 588971
gucgucuccgagagucuga

SEQ ID NO: 912851 - RNA, 19 nt, Artificial Sequence
  Description of Artificial Sequence: Synthetic oligonucleotide
  Antisense strand to SEQ ID NO: 912850
ucagacucucggagacgac

SEQ ID NO: 912852 - RNA, 19 nt, Artificial Sequence
  Description of Artificial Sequence: Synthetic oligonucleotide
  Sense strand starting at position 656 of SEQ ID NO: 588971
ggagacagggucuguaaua

SEQ ID NO: 912853 - RNA, 19 nt, Artificial Sequence
  Description of Artificial Sequence: Synthetic oligonucleotide
  Antisense strand to SEQ ID NO: 912852
uauuacagacccugucucc

SEQ ID NO: 912854 - RNA, 19 nt, Artificial Sequence
  Description of Artificial Sequence: Synthetic oligonucleotide
  Sense strand starting at position 657 of SEQ ID NO: 588971
gagacagggucuguaauag

SEQ ID NO: 912855 - RNA, 19 nt, Artificial Sequence
  Description of Artificial Sequence: Synthetic oligonucleotide
  Antisense strand to SEQ ID NO: 912854
cuauuacagacccugucuc

SEQ ID NO: 912856 - RNA, 19 nt, Artificial Sequence
  Description of Artificial Sequence: Synthetic oligonucleotide
  Sense strand starting at position 738 of SEQ ID NO: 588971
cccgauauagaccgggaaa

SEQ ID NO: 912857 - RNA, 19 nt, Artificial Sequence
  Description of Artificial Sequence: Synthetic oligonucleotide
  Antisense strand to SEQ ID NO: 912856
uuucccggucuauaucggg

SEQ ID NO: 912858 - RNA, 19 nt, Artificial Sequence
  Description of Artificial Sequence: Synthetic oligonucleotide
  Sense strand starting at position 740 of SEQ ID NO: 588971
cgauauagaccgggaaacu

SEQ ID NO: 912859 - RNA, 19 nt, Artificial Sequence
  Description of Artificial Sequence: Synthetic oligonucleotide
  Antisense strand to SEQ ID NO: 912858
aguuucccggucuauaucg

SEQ ID NO: 912860 - RNA, 19 nt, Artificial Sequence
  Description of Artificial Sequence: Synthetic oligonucleotide
  Sense strand starting at position 955 of SEQ ID NO: 588971
ggcagucagucuccgauuu

SEQ ID NO: 912861 - RNA, 19 nt, Artificial Sequence
  Description of Artificial Sequence: Synthetic oligonucleotide
  Antisense strand to SEQ ID NO: 912860
aaaucggagacugacugcc

SEQ ID NO: 912862 - RNA, 19 nt, Artificial Sequence
  Description of Artificial Sequence: Synthetic oligonucleotide
  Sense strand starting at position 1246 of SEQ ID NO: 588971
cgugucguggugcuuuaaa

SEQ ID NO: 912863 - RNA, 19 nt, Artificial Sequence
  Description of Artificial Sequence: Synthetic oligonucleotide
  Antisense strand to SEQ ID NO: 912862
uuuaaagcaccacgacacg

SEQ ID NO: 912864 - RNA, 19 nt, Artificial Sequence
  Description of Artificial Sequence: Synthetic oligonucleotide
  Sense strand starting at position 1541 of SEQ ID NO: 588971
gguccuucucgcguucaca

SEQ ID NO: 912865 - RNA, 19 nt, Artificial Sequence
  Description of Artificial Sequence: Synthetic oligonucleotide
  Antisense strand to SEQ ID NO: 912864
ugugaacgcgagaaggacc

SEQ ID NO: 912866 - RNA, 19 nt, Artificial Sequence
  Description of Artificial Sequence: Synthetic oligonucleotide
  Sense strand starting at position 1685 of SEQ ID NO: 588971
ggcggcagcuauuuauaga

SEQ ID NO: 912867 - RNA, 19 nt, Artificial Sequence
  Description of Artificial Sequence: Synthetic oligonucleotide
  Antisense strand to SEQ ID NO: 912866
ucuauaaauagcugccgcc

SEQ ID NO: 912868 - RNA, 19 nt, Artificial Sequence
  Description of Artificial Sequence: Synthetic oligonucleotide
  Sense strand starting at position 2226 of SEQ ID NO: 588971
ccaggaagaguuugagcga

SEQ ID NO: 912869 - RNA, 19 nt, Artificial Sequence
  Description of Artificial Sequence: Synthetic oligonucleotide
  Antisense strand to SEQ ID NO: 912868
ucgcucaaacucuuccugg

SEQ ID NO: 912870 - RNA, 19 nt, Artificial Sequence
  Description of Artificial Sequence: Synthetic oligonucleotide
  Sense strand starting at position 2231 of SEQ ID NO: 588971
aagaguuugagcgacggua

SEQ ID NO: 912871 - RNA, 19 nt, Artificial Sequence
  Description of Artificial Sequence: Synthetic oligonucleotide
  Antisense strand to SEQ ID NO: 912870
uaccgucgcucaaacucuu

SEQ ID NO: 912872 - RNA, 19 nt, Artificial Sequence
  Description of Artificial Sequence: Synthetic oligonucleotide
  Sense strand starting at position 2245 of SEQ ID NO: 588971
cgguagaguuaugugggaa

SEQ ID NO: 912873 - RNA, 19 nt, Artificial Sequence
  Description of Artificial Sequence: Synthetic oligonucleotide
  Antisense strand to SEQ ID NO: 912872
uucccacauaacucuaccg

SEQ ID NO: 912874 - RNA, 19 nt, Artificial Sequence
  Description of Artificial Sequence: Synthetic oligonucleotide
  Sense strand starting at position 2246 of SEQ ID NO: 588971
gguagaguuaugugggaaa

SEQ ID NO: 912875 - RNA, 19 nt, Artificial Sequence
  Description of Artificial Sequence: Synthetic oligonucleotide
  Antisense strand to SEQ ID NO: 912874
uuucccacauaacucuacc

SEQ ID NO: 912876 - RNA, 19 nt, Artificial Sequence
  Description of Artificial Sequence: Synthetic oligonucleotide
  Sense strand starting at position 2611 of SEQ ID NO: 588971
uuaggugguuuauuccaaa

SEQ ID NO: 912877 - RNA, 19 nt, Artificial Sequence
  Description of Artificial Sequence: Synthetic oligonucleotide
  Antisense strand to SEQ ID NO: 912876
uuuggaauaaaccaccuaa

SEQ ID NO: 912878 - RNA, 19 nt, Artificial Sequence
  Description of Artificial Sequence: Synthetic oligonucleotide
  Sense strand starting at position 2753 of SEQ ID NO: 588971
gcucuuaauccugauguau

SEQ ID NO: 912879 - RNA, 19 nt, Artificial Sequence
  Description of Artificial Sequence: Synthetic oligonucleotide
  Antisense strand to SEQ ID NO: 912878
auacaucaggauuaagagc

SEQ ID NO: 912880 - RNA, 19 nt, Artificial Sequence
  Description of Artificial Sequence: Synthetic oligonucleotide
  Sense strand starting at position 3377 of SEQ ID NO: 588971
ggaagugcugggugauaga

SEQ ID NO: 912881 - RNA, 19 nt, Artificial Sequence
  Description of Artificial Sequence: Synthetic oligonucleotide
  Antisense strand to SEQ ID NO: 912880
ucuaucacccagcacuucc

SEQ ID NO: 912882 - RNA, 19 nt, Artificial Sequence
  Description of Artificial Sequence: Synthetic oligonucleotide
  Sense strand starting at position 3406 of SEQ ID NO: 588971
ccucaacuucggcagagau

SEQ ID NO: 912883 - RNA, 19 nt, Artificial Sequence
  Description of Artificial Sequence: Synthetic oligonucleotide
  Antisense strand to SEQ ID NO: 912882
aucucugccgaaguugagg

SEQ ID NO: 912884 - RNA, 19 nt, Artificial Sequence
  Description of Artificial Sequence: Synthetic oligonucleotide
  Sense strand starting at position 3518 of SEQ ID NO: 588971
aaauucugauaugugagua

SEQ ID NO: 912885 - RNA, 19 nt, Artificial Sequence
  Description of Artificial Sequence: Synthetic oligonucleotide
  Antisense strand to SEQ ID NO: 912884
uacucacauaucagaauuu

SEQ ID NO: 912886 - RNA, 19 nt, Artificial Sequence
  Description of Artificial Sequence: Synthetic oligonucleotide
  Sense strand starting at position 3523 of SEQ ID NO: 588971
cugauaugugaguaauggu

SEQ ID NO: 912887 - RNA, 19 nt, Artificial Sequence
  Description of Artificial Sequence: Synthetic oligonucleotide
  Antisense strand to SEQ ID NO: 912886
accauuacucacauaucag

SEQ ID NO: 912888 - RNA, 19 nt, Artificial Sequence
  Description of Artificial Sequence: Synthetic oligonucleotide
  Sense strand starting at position 3532 of SEQ ID NO: 588971
gaguaaugguaucucauug

SEQ ID NO: 912889 - RNA, 19 nt, Artificial Sequence
  Description of Artificial Sequence: Synthetic oligonucleotide
  Antisense strand to SEQ ID NO: 912888
caaugagauaccauuacuc

SEQ ID NO: 912890 - RNA, 19 nt, Artificial Sequence
  Description of Artificial Sequence: Synthetic oligonucleotide
  Sense strand starting at position 3576 of SEQ ID NO: 588971
uccuaauguguugaguauc

SEQ ID NO: 912891 - RNA, 19 nt, Artificial Sequence
  Description of Artificial Sequence: Synthetic oligonucleotide
  Antisense strand to SEQ ID NO: 912890
gauacucaacacauuagga

SEQ ID NO: 912892 - RNA, 19 nt, Artificial Sequence
  Description of Artificial Sequence: Synthetic oligonucleotide
  Sense strand starting at position 3579 of SEQ ID NO: 588971
uaauguguugaguaucacu

SEQ ID NO: 912893 - RNA, 19 nt, Artificial Sequence
  Description of Artificial Sequence: Synthetic oligonucleotide
  Antisense strand to SEQ ID NO: 912892
agugauacucaacacauua

SEQ ID NO: 912894 - RNA, 19 nt, Artificial Sequence
  Description of Artificial Sequence: Synthetic oligonucleotide
  Sense strand starting at position 3598 of SEQ ID NO: 588971
ucauauuuauuggccaguu

SEQ ID NO: 912895 - RNA, 19 nt, Artificial Sequence
  Description of Artificial Sequence: Synthetic oligonucleotide
  Antisense strand to SEQ ID NO: 912894
aacuggccaauaaauauga

SEQ ID NO: 912896 - RNA, 19 nt, Artificial Sequence
  Description of Artificial Sequence: Synthetic oligonucleotide
  Sense strand starting at position 3664 of SEQ ID NO: 588971
gauaguccuguguauugaa

SEQ ID NO: 912897 - RNA, 19 nt, Artificial Sequence
  Description of Artificial Sequence: Synthetic oligonucleotide
  Antisense strand to SEQ ID NO: 912896
uucaauacacaggacuauc

SEQ ID NO: 912898 - RNA, 19 nt, Artificial Sequence
  Description of Artificial Sequence: Synthetic oligonucleotide
  Sense strand starting at position 3671 of SEQ ID NO: 588971
cuguguauugaauagauuc

SEQ ID NO: 912899 - RNA, 19 nt, Artificial Sequence
  Description of Artificial Sequence: Synthetic oligonucleotide
  Antisense strand to SEQ ID NO: 912898
gaaucuauucaauacacag

SEQ ID NO: 912900 - RNA, 19 nt, Artificial Sequence
  Description of Artificial Sequence: Synthetic oligonucleotide
  Sense strand starting at position 3754 of SEQ ID NO: 588971
auaaacagguguucuuaaa

SEQ ID NO: 912901 - RNA, 19 nt, Artificial Sequence
  Description of Artificial Sequence: Synthetic oligonucleotide
  Antisense strand to SEQ ID NO: 912900
uuuaagaacaccuguuuau

SEQ ID NO: 912902 - RNA, 19 nt, Artificial Sequence
  Description of Artificial Sequence: Synthetic oligonucleotide
  Sense strand starting at position 3768 of SEQ ID NO: 588971
uuaaauacagucuggcaau

SEQ ID NO: 912903 - RNA, 19 nt, Artificial Sequence
  Description of Artificial Sequence: Synthetic oligonucleotide
  Antisense strand to SEQ ID NO: 912902
auugccagacuguauuuaa

SEQ ID NO: 912904 - RNA, 19 nt, Artificial Sequence
  Description of Artificial Sequence: Synthetic oligonucleotide
  Sense strand starting at position 3804 of SEQ ID NO: 588971
gcacucuguguccuguuua

SEQ ID NO: 912905 - RNA, 19 nt, Artificial Sequence
  Description of Artificial Sequence: Synthetic oligonucleotide
  Antisense strand to SEQ ID NO: 912904
uaaacaggacacagagugc

SEQ ID NO: 912906 - RNA, 19 nt, Artificial Sequence
  Description of Artificial Sequence: Synthetic oligonucleotide
  Sense strand starting at position 3809 of SEQ ID NO: 588971
cuguguccuguuuaagaac

SEQ ID NO: 912907 - RNA, 19 nt, Artificial Sequence
  Description of Artificial Sequence: Synthetic oligonucleotide
  Antisense strand to SEQ ID NO: 912906
guucuuaaacaggacacag

SEQ ID NO: 912908 - RNA, 19 nt, Artificial Sequence
  Description of Artificial Sequence: Synthetic oligonucleotide
  Sense strand starting at position 3934 of SEQ ID NO: 588971
uagagucuugcgcuuuguu

SEQ ID NO: 912909 - RNA, 19 nt, Artificial Sequence
  Description of Artificial Sequence: Synthetic oligonucleotide
  Antisense strand to SEQ ID NO: 912908
aacaaagcgcaagacucua

SEQ ID NO: 912910 - RNA, 19 nt, Artificial Sequence
  Description of Artificial Sequence: Synthetic oligonucleotide
  Sense strand starting at position 21 of SEQ ID NO: 589036
gcuugaaggaagugaaaug

SEQ ID NO: 912911 - RNA, 19 nt, Artificial Sequence
  Description of Artificial Sequence: Synthetic oligonucleotide
  Antisense strand to SEQ ID NO: 912910
cauuucacuuccuucaagc

SEQ ID NO: 912912 - RNA, 19 nt, Artificial Sequence
  Description of Artificial Sequence: Synthetic oligonucleotide
  Sense strand starting at position 262 of SEQ ID NO: 589036
agcuuugaacagugguaua

SEQ ID NO: 912913 - RNA, 19 nt, Artificial Sequence
  Description of Artificial Sequence: Synthetic oligonucleotide
  Antisense strand to SEQ ID NO: 912912
uauaccacuguucaaagcu

SEQ ID NO: 912914 - RNA, 19 nt, Artificial Sequence
  Description of Artificial Sequence: Synthetic oligonucleotide
  Sense strand starting at position 356 of SEQ ID NO: 589036
uaguguuugaguugaggaa

SEQ ID NO: 912915 - RNA, 19 nt, Artificial Sequence
  Description of Artificial Sequence: Synthetic oligonucleotide
  Antisense strand to SEQ ID NO: 912914
uuccucaacucaaacacua

SEQ ID NO: 912916 - RNA, 19 nt, Artificial Sequence
  Description of Artificial Sequence: Synthetic oligonucleotide
  Sense strand starting at position 428 of SEQ ID NO: 589036
ccaggagacuggucuauuc

SEQ ID NO: 912917 - RNA, 19 nt, Artificial Sequence
  Description of Artificial Sequence: Synthetic oligonucleotide
  Antisense strand to SEQ ID NO: 912916
gaauagaccagucuccugg

SEQ ID NO: 912918 - RNA, 19 nt, Artificial Sequence
  Description of Artificial Sequence: Synthetic oligonucleotide
  Sense strand starting at position 769 of SEQ ID NO: 589036
uaaguuuggcuuuagcaua

SEQ ID NO: 912919 - RNA, 19 nt, Artificial Sequence
  Description of Artificial Sequence: Synthetic oligonucleotide
  Antisense strand to SEQ ID NO: 912918
uaugcuaaagccaaacuua

SEQ ID NO: 912920 - RNA, 19 nt, Artificial Sequence
  Description of Artificial Sequence: Synthetic oligonucleotide
  Sense strand starting at position 774 of SEQ ID NO: 589036
uuggcuuuagcauaaagga

SEQ ID NO: 912921 - RNA, 19 nt, Artificial Sequence
  Description of Artificial Sequence: Synthetic oligonucleotide
  Antisense strand to SEQ ID NO: 912920
uccuuuaugcuaaagccaa

SEQ ID NO: 912922 - RNA, 19 nt, Artificial Sequence
  Description of Artificial Sequence: Synthetic oligonucleotide
  Sense strand starting at position 844 of SEQ ID NO: 589036
ugcaauaauccagauguga

SEQ ID NO: 912923 - RNA, 19 nt, Artificial Sequence
  Description of Artificial Sequence: Synthetic oligonucleotide
  Antisense strand to SEQ ID NO: 912922
ucacaucuggauuauugca

SEQ ID NO: 912924 - RNA, 19 nt, Artificial Sequence
  Description of Artificial Sequence: Synthetic oligonucleotide
  Sense strand starting at position 941 of SEQ ID NO: 589036
ggcggaaugugauuaacua

SEQ ID NO: 912925 - RNA, 19 nt, Artificial Sequence
  Description of Artificial Sequence: Synthetic oligonucleotide
  Antisense strand to SEQ ID NO: 912924
uaguuaaucacauuccgcc

SEQ ID NO: 912926 - RNA, 19 nt, Artificial Sequence
  Description of Artificial Sequence: Synthetic oligonucleotide
  Sense strand starting at position 942 of SEQ ID NO: 589036
gcggaaugugauuaacuac

SEQ ID NO: 912927 - RNA, 19 nt, Artificial Sequence
  Description of Artificial Sequence: Synthetic oligonucleotide
  Antisense strand to SEQ ID NO: 912926
guaguuaaucacauuccgc

SEQ ID NO: 912928 - RNA, 19 nt, Artificial Sequence
  Description of Artificial Sequence: Synthetic oligonucleotide
  Sense strand starting at position 978 of SEQ ID NO: 589036
agggaugaaugaggauuaa

SEQ ID NO: 912929 - RNA, 19 nt, Artificial Sequence
  Description of Artificial Sequence: Synthetic oligonucleotide
  Antisense strand to SEQ ID NO: 912928
uuaauccucauucaucccu

SEQ ID NO: 912930 - RNA, 19 nt, Artificial Sequence
  Description of Artificial Sequence: Synthetic oligonucleotide
  Sense strand starting at position 987 of SEQ ID NO: 589036
ugaggauuaaggugagguu

SEQ ID NO: 912931 - RNA, 19 nt, Artificial Sequence
  Description of Artificial Sequence: Synthetic oligonucleotide
  Antisense strand to SEQ ID NO: 912930
aaccucaccuuaauccuca

SEQ ID NO: 912932 - RNA, 19 nt, Artificial Sequence
  Description of Artificial Sequence: Synthetic oligonucleotide
  Sense strand starting at position 1029 of SEQ ID NO: 589036
uuuaaagccugucugaaac

SEQ ID NO: 912933 - RNA, 19 nt, Artificial Sequence
  Description of Artificial Sequence: Synthetic oligonucleotide
  Antisense strand to SEQ ID NO: 912932
guuucagacaggcuuuaaa

SEQ ID NO: 912934 - RNA, 19 nt, Artificial Sequence
  Description of Artificial Sequence: Synthetic oligonucleotide
  Sense strand starting at position 1420 of SEQ ID NO: 589036
gccuguuuaccuggaggaa

SEQ ID NO: 912935 - RNA, 19 nt, Artificial Sequence
  Description of Artificial Sequence: Synthetic oligonucleotide
  Antisense strand to SEQ ID NO: 912934
uuccuccagguaaacaggc

SEQ ID NO: 912936 - RNA, 19 nt, Artificial Sequence
  Description of Artificial Sequence: Synthetic oligonucleotide
  Sense strand starting at position 2995 of SEQ ID NO: 589036
ccagcauuagaccaaugua

SEQ ID NO: 912937 - RNA, 19 nt, Artificial Sequence
  Description of Artificial Sequence: Synthetic oligonucleotide
  Antisense strand to SEQ ID NO: 912936
uacauuggucuaaugcugg

SEQ ID NO: 912938 - RNA, 19 nt, Artificial Sequence
  Description of Artificial Sequence: Synthetic oligonucleotide
  Sense strand starting at position 2998 of SEQ ID NO: 589036
gcauuagaccaauguaaca

SEQ ID NO: 912939 - RNA, 19 nt, Artificial Sequence
  Description of Artificial Sequence: Synthetic oligonucleotide
  Antisense strand to SEQ ID NO: 912938
uguuacauuggucuaaugc

SEQ ID NO: 912940 - RNA, 19 nt, Artificial Sequence
  Description of Artificial Sequence: Synthetic oligonucleotide
  Sense strand starting at position 3009 of SEQ ID NO: 589036
auguaacacucuuugaaga

SEQ ID NO: 912941 - RNA, 19 nt, Artificial Sequence
  Description of Artificial Sequence: Synthetic oligonucleotide
  Antisense strand to SEQ ID NO: 912940
ucuucaaagaguguuacau

SEQ ID NO: 912942 - RNA, 19 nt, Artificial Sequence
  Description of Artificial Sequence: Synthetic oligonucleotide
  Sense strand starting at position 3022 of SEQ ID NO: 589036
ugaagagcuucccuuugca

SEQ ID NO: 912943 - RNA, 19 nt, Artificial Sequence
  Description of Artificial Sequence: Synthetic oligonucleotide
  Antisense strand to SEQ ID NO: 912942
ugcaaagggaagcucuuca

SEQ ID NO: 912944 - RNA, 19 nt, Artificial Sequence
  Description of Artificial Sequence: Synthetic oligonucleotide
  Sense strand starting at position 3025 of SEQ ID NO: 589036
agagcuucccuuugcauuu

SEQ ID NO: 912945 - RNA, 19 nt, Artificial Sequence
  Description of Artificial Sequence: Synthetic oligonucleotide
  Antisense strand to SEQ ID NO: 912944
aaaugcaaagggaagcucu

SEQ ID NO: 912946 - RNA, 19 nt, Artificial Sequence
  Description of Artificial Sequence: Synthetic oligonucleotide
  Sense strand starting at position 3042 of SEQ ID NO: 589036
uuugguggagucaguaguu

SEQ ID NO: 912947 - RNA, 19 nt, Artificial Sequence
  Description of Artificial Sequence: Synthetic oligonucleotide
  Antisense strand to SEQ ID NO: 912946
aacuacugacuccaccaaa

SEQ ID NO: 912948 - RNA, 19 nt, Artificial Sequence
  Description of Artificial Sequence: Synthetic oligonucleotide
  Sense strand starting at position 3045 of SEQ ID NO: 589036
gguggagucaguaguugug

SEQ ID NO: 912949 - RNA, 19 nt, Artificial Sequence
  Description of Artificial Sequence: Synthetic oligonucleotide
  Antisense strand to SEQ ID NO: 912948
cacaacuacugacuccacc

SEQ ID NO: 912950 - RNA, 19 nt, Artificial Sequence
  Description of Artificial Sequence: Synthetic oligonucleotide
  Sense strand starting at position 3054 of SEQ ID NO: 589036
aguaguuguggcagagguu

SEQ ID NO: 912951 - RNA, 19 nt, Artificial Sequence
  Description of Artificial Sequence: Synthetic oligonucleotide
  Antisense strand to SEQ ID NO: 912950
aaccucugccacaacuacu

SEQ ID NO: 912952 - RNA, 19 nt, Artificial Sequence
  Description of Artificial Sequence: Synthetic oligonucleotide
  Sense strand starting at position 3141 of SEQ ID NO: 589036
uagaaagcugcugagacuu

SEQ ID NO: 912953 - RNA, 19 nt, Artificial Sequence
  Description of Artificial Sequence: Synthetic oligonucleotide
  Antisense strand to SEQ ID NO: 912952
aagucucagcagcuuucua

SEQ ID NO: 912954 - RNA, 19 nt, Artificial Sequence
  Description of Artificial Sequence: Synthetic oligonucleotide
  Sense strand starting at position 3149 of SEQ ID NO: 589036
ugcugagacuuccugaugu

SEQ ID NO: 912955 - RNA, 19 nt, Artificial Sequence
  Description of Artificial Sequence: Synthetic oligonucleotide
  Antisense strand to SEQ ID NO: 912954
acaucaggaagucucagca

SEQ ID NO: 912956 - RNA, 19 nt, Artificial Sequence
  Description of Artificial Sequence: Synthetic oligonucleotide
  Sense strand starting at position 3151 of SEQ ID NO: 589036
cugagacuuccugauguua

SEQ ID NO: 912957 - RNA, 19 nt, Artificial Sequence
  Description of Artificial Sequence: Synthetic oligonucleotide
  Antisense strand to SEQ ID NO: 912956
uaacaucaggaagucucag

SEQ ID NO: 912958 - RNA, 19 nt, Artificial Sequence
  Description of Artificial Sequence: Synthetic oligonucleotide
  Sense strand starting at position 3188 of SEQ ID NO: 589036
ggaacugucucuccaggau

SEQ ID NO: 912959 - RNA, 19 nt, Artificial Sequence
  Description of Artificial Sequence: Synthetic oligonucleotide
  Antisense strand to SEQ ID NO: 912958
auccuggagagacaguucc

SEQ ID NO: 912960 - RNA, 19 nt, Artificial Sequence
  Description of Artificial Sequence: Synthetic oligonucleotide
  Sense strand starting at position 3203 of SEQ ID NO: 589036
ggaucuguccaguggucau

SEQ ID NO: 912961 - RNA, 19 nt, Artificial Sequence
  Description of Artificial Sequence: Synthetic oligonucleotide
  Antisense strand to SEQ ID NO: 912960
augaccacuggacagaucc

SEQ ID NO: 912962 - RNA, 19 nt, Artificial Sequence
  Description of Artificial Sequence: Synthetic oligonucleotide
  Sense strand starting at position 3311 of SEQ ID NO: 589036
uaaggagguggcgaucuau

SEQ ID NO: 912963 - RNA, 19 nt, Artificial Sequence
  Description of Artificial Sequence: Synthetic oligonucleotide
  Antisense strand to SEQ ID NO: 912962
auagaucgccaccuccuua

SEQ ID NO: 912964 - RNA, 19 nt, Artificial Sequence
  Description of Artificial Sequence: Synthetic oligonucleotide
  Sense strand starting at position 3369 of SEQ ID NO: 589036
uugagugacuuauccaaag

SEQ ID NO: 912965 - RNA, 19 nt, Artificial Sequence
  Description of Artificial Sequence: Synthetic oligonucleotide
  Antisense strand to SEQ ID NO: 912964
cuuuggauaagucacucaa

SEQ ID NO: 912966 - RNA, 19 nt, Artificial Sequence
  Description of Artificial Sequence: Synthetic oligonucleotide
  Sense strand starting at position 3427 of SEQ ID NO: 589036
uugucucucugacuucuua

SEQ ID NO: 912967 - RNA, 19 nt, Artificial Sequence
  Description of Artificial Sequence: Synthetic oligonucleotide
  Antisense strand to SEQ ID NO: 912966
uaagaagucagagagacaa

SEQ ID NO: 912968 - RNA, 19 nt, Artificial Sequence
  Description of Artificial Sequence: Synthetic oligonucleotide
  Sense strand starting at position 3476 of SEQ ID NO: 589036
aggcaaccugccuauaacu

SEQ ID NO: 912969 - RNA, 19 nt, Artificial Sequence
  Description of Artificial Sequence: Synthetic oligonucleotide
  Antisense strand to SEQ ID NO: 912968
aguuauaggcagguugccu

SEQ ID NO: 912970 - RNA, 19 nt, Artificial Sequence
  Description of Artificial Sequence: Synthetic oligonucleotide
  Sense strand starting at position 3642 of SEQ ID NO: 589036
gcugauucuuaugcccaga

SEQ ID NO: 912971 - RNA, 19 nt, Artificial Sequence
  Description of Artificial Sequence: Synthetic oligonucleotide
  Antisense strand to SEQ ID NO: 912970
ucugggcauaagaaucagc

SEQ ID NO: 912972 - RNA, 19 nt, Artificial Sequence
  Description of Artificial Sequence: Synthetic oligonucleotide
  Sense strand starting at position 3645 of SEQ ID NO: 589036
gauucuuaugcccagaggu

SEQ ID NO: 912973 - RNA, 19 nt, Artificial Sequence
  Description of Artificial Sequence: Synthetic oligonucleotide
  Antisense strand to SEQ ID NO: 912972
accucugggcauaagaauc

SEQ ID NO: 912974 - RNA, 19 nt, Artificial Sequence
  Description of Artificial Sequence: Synthetic oligonucleotide
  Sense strand starting at position 3647 of SEQ ID NO: 589036
uucuuaugcccagagguuu

SEQ ID NO: 912975 - RNA, 19 nt, Artificial Sequence
  Description of Artificial Sequence: Synthetic oligonucleotide
  Antisense strand to SEQ ID NO: 912974
aaaccucugggcauaagaa

SEQ ID NO: 912976 - RNA, 19 nt, Artificial Sequence
  Description of Artificial Sequence: Synthetic oligonucleotide
  Sense strand starting at position 3677 of SEQ ID NO: 589036
agccuugggccucaucauu

SEQ ID NO: 912977 - RNA, 19 nt, Artificial Sequence
  Description of Artificial Sequence: Synthetic oligonucleotide
  Antisense strand to SEQ ID NO: 912976
aaugaugaggcccaaggcu

SEQ ID NO: 912978 - RNA, 19 nt, Artificial Sequence
  Description of Artificial Sequence: Synthetic oligonucleotide
  Sense strand starting at position 3707 of SEQ ID NO: 589036
uugcuaaauucguugauaa

SEQ ID NO: 912979 - RNA, 19 nt, Artificial Sequence
  Description of Artificial Sequence: Synthetic oligonucleotide
  Antisense strand to SEQ ID NO: 912978
uuaucaacgaauuuagcaa

SEQ ID NO: 912980 - RNA, 19 nt, Artificial Sequence
  Description of Artificial Sequence: Synthetic oligonucleotide
  Sense strand starting at position 3708 of SEQ ID NO: 589036
ugcuaaauucguugauaag

SEQ ID NO: 912981 - RNA, 19 nt, Artificial Sequence
  Description of Artificial Sequence: Synthetic oligonucleotide
  Antisense strand to SEQ ID NO: 912980
cuuaucaacgaauuuagca

SEQ ID NO: 912982 - RNA, 19 nt, Artificial Sequence
  Description of Artificial Sequence: Synthetic oligonucleotide
  Sense strand starting at position 3709 of SEQ ID NO: 589036
gcuaaauucguugauaaga

SEQ ID NO: 912983 - RNA, 19 nt, Artificial Sequence
  Description of Artificial Sequence: Synthetic oligonucleotide
  Antisense strand to SEQ ID NO: 912982
ucuuaucaacgaauuuagc

SEQ ID NO: 912984 - RNA, 19 nt, Artificial Sequence
  Description of Artificial Sequence: Synthetic oligonucleotide
  Sense strand starting at position 3735 of SEQ ID NO: 589036
ucuucuuggcugugacaca

SEQ ID NO: 912985 - RNA, 19 nt, Artificial Sequence
  Description of Artificial Sequence: Synthetic oligonucleotide
  Antisense strand to SEQ ID NO: 912984
ugugucacagccaagaaga

SEQ ID NO: 912986 - RNA, 19 nt, Artificial Sequence
  Description of Artificial Sequence: Synthetic oligonucleotide
  Sense strand starting at position 3975 of SEQ ID NO: 589036
uugucauggucucuacuaa

SEQ ID NO: 912987 - RNA, 19 nt, Artificial Sequence
  Description of Artificial Sequence: Synthetic oligonucleotide
  Antisense strand to SEQ ID NO: 912986
uuaguagagaccaugacaa

SEQ ID NO: 912988 - RNA, 19 nt, Artificial Sequence
  Description of Artificial Sequence: Synthetic oligonucleotide
  Sense strand starting at position 3976 of SEQ ID NO: 589036
ugucauggucucuacuaau

SEQ ID NO: 912989 - RNA, 19 nt, Artificial Sequence
  Description of Artificial Sequence: Synthetic oligonucleotide
  Antisense strand to SEQ ID NO: 912988
auuaguagagaccaugaca

SEQ ID NO: 912990 - RNA, 19 nt, Artificial Sequence
  Description of Artificial Sequence: Synthetic oligonucleotide
  Sense strand starting at position 41 of SEQ ID NO: 589044
auugauucuugucucagaa

SEQ ID NO: 912991 - RNA, 19 nt, Artificial Sequence
  Description of Artificial Sequence: Synthetic oligonucleotide
  Antisense strand to SEQ ID NO: 912990
uucugagacaagaaucaau

SEQ ID NO: 912992 - RNA, 19 nt, Artificial Sequence
  Description of Artificial Sequence: Synthetic oligonucleotide
  Sense strand starting at position 62 of SEQ ID NO: 589044
uccuguuaagcugauuaua

SEQ ID NO: 912993 - RNA, 19 nt, Artificial Sequence
  Description of Artificial Sequence: Synthetic oligonucleotide
  Antisense strand to SEQ ID NO: 912992
uauaaucagcuuaacagga

SEQ ID NO: 912994 - RNA, 19 nt, Artificial Sequence
  Description of Artificial Sequence: Synthetic oligonucleotide
  Sense strand starting at position 64 of SEQ ID NO: 589044
cuguuaagcugauuauaug

SEQ ID NO: 912995 - RNA, 19 nt, Artificial Sequence
  Description of Artificial Sequence: Synthetic oligonucleotide
  Antisense strand to SEQ ID NO: 912994
cauauaaucagcuuaacag

SEQ ID NO: 912996 - RNA, 19 nt, Artificial Sequence
  Description of Artificial Sequence: Synthetic oligonucleotide
  Sense strand starting at position 73 of SEQ ID NO: 589044
ugauuauaugucugcauuu

SEQ ID NO: 912997 - RNA, 19 nt, Artificial Sequence
  Description of Artificial Sequence: Synthetic oligonucleotide
  Antisense strand to SEQ ID NO: 912996
aaaugcagacauauaauca

SEQ ID NO: 912998 - RNA, 19 nt, Artificial Sequence
  Description of Artificial Sequence: Synthetic oligonucleotide
  Sense strand starting at position 141 of SEQ ID NO: 589044
ugacacgguccucaucauu

SEQ ID NO: 912999 - RNA, 19 nt, Artificial Sequence
  Description of Artificial Sequence: Synthetic oligonucleotide
  Antisense strand to SEQ ID NO: 912998
aaugaugaggaccguguca

SEQ ID NO: 913000 - RNA, 19 nt, Artificial Sequence
  Description of Artificial Sequence: Synthetic oligonucleotide
  Sense strand starting at position 200 of SEQ ID NO: 589044
cuucucaaguauguuaaca

SEQ ID NO: 913001 - RNA, 19 nt, Artificial Sequence
  Description of Artificial Sequence: Synthetic oligonucleotide
  Antisense strand to SEQ ID NO: 913000
uguuaacauacuugagaag

SEQ ID NO: 913002 - RNA, 19 nt, Artificial Sequence
  Description of Artificial Sequence: Synthetic oligonucleotide
  Sense strand starting at position 216 of SEQ ID NO: 589044
acagaaaucucaguagugu

SEQ ID NO: 913003 - RNA, 19 nt, Artificial Sequence
  Description of Artificial Sequence: Synthetic oligonucleotide
  Antisense strand to SEQ ID NO: 913002
acacuacugagauuucugu

SEQ ID NO: 913004 - RNA, 19 nt, Artificial Sequence
  Description of Artificial Sequence: Synthetic oligonucleotide
  Sense strand starting at position 217 of SEQ ID NO: 589044
cagaaaucucaguaguguc

SEQ ID NO: 913005 - RNA, 19 nt, Artificial Sequence
  Description of Artificial Sequence: Synthetic oligonucleotide
  Antisense strand to SEQ ID NO: 913004
gacacuacugagauuucug

SEQ ID NO: 913006 - RNA, 19 nt, Artificial Sequence
  Description of Artificial Sequence: Synthetic oligonucleotide
  Sense strand starting at position 227 of SEQ ID NO: 589044
aguagugucaaaggaucua

SEQ ID NO: 913007 - RNA, 19 nt, Artificial Sequence
  Description of Artificial Sequence: Synthetic oligonucleotide
  Antisense strand to SEQ ID NO: 913006
uagauccuuugacacuacu

SEQ ID NO: 913008 - RNA, 19 nt, Artificial Sequence
  Description of Artificial Sequence: Synthetic oligonucleotide
  Sense strand starting at position 246 of SEQ ID NO: 589044
auagaauuguuuccaucga

SEQ ID NO: 913009 - RNA, 19 nt, Artificial Sequence
  Description of Artificial Sequence: Synthetic oligonucleotide
  Antisense strand to SEQ ID NO: 913008
ucgauggaaacaauucuau

SEQ ID NO: 913010 - RNA, 19 nt, Artificial Sequence
  Description of Artificial Sequence: Synthetic oligonucleotide
  Sense strand starting at position 748 of SEQ ID NO: 589044
ccaggaauggcgcauacua

SEQ ID NO: 913011 - RNA, 19 nt, Artificial Sequence
  Description of Artificial Sequence: Synthetic oligonucleotide
  Antisense strand to SEQ ID NO: 913010
uaguaugcgccauuccugg

SEQ ID NO: 913012 - RNA, 19 nt, Artificial Sequence
  Description of Artificial Sequence: Synthetic oligonucleotide
  Sense strand starting at position 774 of SEQ ID NO: 589044
aucaaauggugacuguuau

SEQ ID NO: 913013 - RNA, 19 nt, Artificial Sequence
  Description of Artificial Sequence: Synthetic oligonucleotide
  Antisense strand to SEQ ID NO: 913012
auaacagucaccauuugau

SEQ ID NO: 913014 - RNA, 19 nt, Artificial Sequence
  Description of Artificial Sequence: Synthetic oligonucleotide
  Sense strand starting at position 775 of SEQ ID NO: 589044
ucaaauggugacuguuauu

SEQ ID NO: 913015 - RNA, 19 nt, Artificial Sequence
  Description of Artificial Sequence: Synthetic oligonucleotide
  Antisense strand to SEQ ID NO: 913014
aauaacagucaccauuuga

SEQ ID NO: 913016 - RNA, 19 nt, Artificial Sequence
  Description of Artificial Sequence: Synthetic oligonucleotide
  Sense strand starting at position 780 of SEQ ID NO: 589044
uggugacuguuauuaauau

SEQ ID NO: 913017 - RNA, 19 nt, Artificial Sequence
  Description of Artificial Sequence: Synthetic oligonucleotide
  Antisense strand to SEQ ID NO: 913016
auauuaauaacagucacca

SEQ ID NO: 913018 - RNA, 19 nt, Artificial Sequence
  Description of Artificial Sequence: Synthetic oligonucleotide
  Sense strand starting at position 909 of SEQ ID NO: 589044
gccuuuggacuguaacuuu

SEQ ID NO: 913019 - RNA, 19 nt, Artificial Sequence
  Description of Artificial Sequence: Synthetic oligonucleotide
  Antisense strand to SEQ ID NO: 913018
aaaguuacaguccaaaggc

SEQ ID NO: 913020 - RNA, 19 nt, Artificial Sequence
  Description of Artificial Sequence: Synthetic oligonucleotide
  Sense strand starting at position 985 of SEQ ID NO: 589044
uagagacugcuauauugca

SEQ ID NO: 913021 - RNA, 19 nt, Artificial Sequence
  Description of Artificial Sequence: Synthetic oligonucleotide
  Antisense strand to SEQ ID NO: 913020
ugcaauauagcagucucua

SEQ ID NO: 913022 - RNA, 19 nt, Artificial Sequence
  Description of Artificial Sequence: Synthetic oligonucleotide
  Sense strand starting at position 1012 of SEQ ID NO: 589044
aaguaauaauuggucaugu

SEQ ID NO: 913023 - RNA, 19 nt, Artificial Sequence
  Description of Artificial Sequence: Synthetic oligonucleotide
  Antisense strand to SEQ ID NO: 913022
acaugaccaauuauuacuu

SEQ ID NO: 913024 - RNA, 19 nt, Artificial Sequence
  Description of Artificial Sequence: Synthetic oligonucleotide
  Sense strand starting at position 1013 of SEQ ID NO: 589044
aguaauaauuggucauguc

SEQ ID NO: 913025 - RNA, 19 nt, Artificial Sequence
  Description of Artificial Sequence: Synthetic oligonucleotide
  Antisense strand to SEQ ID NO: 913024
gacaugaccaauuauuacu

SEQ ID NO: 913026 - RNA, 19 nt, Artificial Sequence
  Description of Artificial Sequence: Synthetic oligonucleotide
  Sense strand starting at position 1149 of SEQ ID NO: 589044
accuguuacagugaacagu

SEQ ID NO: 913027 - RNA, 19 nt, Artificial Sequence
  Description of Artificial Sequence: Synthetic oligonucleotide
  Antisense strand to SEQ ID NO: 913026
acuguucacuguaacaggu

SEQ ID NO: 913028 - RNA, 19 nt, Artificial Sequence
  Description of Artificial Sequence: Synthetic oligonucleotide
  Sense strand starting at position 1373 of SEQ ID NO: 589044
gagaaacuguaguuuacaa

SEQ ID NO: 913029 - RNA, 19 nt, Artificial Sequence
  Description of Artificial Sequence: Synthetic oligonucleotide
  Antisense strand to SEQ ID NO: 913028
uuguaaacuacaguuucuc

SEQ ID NO: 913030 - RNA, 19 nt, Artificial Sequence
  Description of Artificial Sequence: Synthetic oligonucleotide
  Sense strand starting at position 1440 of SEQ ID NO: 589044
caacaucgucucgacuaga

SEQ ID NO: 913031 - RNA, 19 nt, Artificial Sequence
  Description of Artificial Sequence: Synthetic oligonucleotide
  Antisense strand to SEQ ID NO: 913030
ucuagucgagacgauguug

SEQ ID NO: 913032 - RNA, 19 nt, Artificial Sequence
  Description of Artificial Sequence: Synthetic oligonucleotide
  Sense strand starting at position 2377 of SEQ ID NO: 589044
gcaagaucaccaggugacu

SEQ ID NO: 913033 - RNA, 19 nt, Artificial Sequence
  Description of Artificial Sequence: Synthetic oligonucleotide
  Antisense strand to SEQ ID NO: 913032
agucaccuggugaucuugc

SEQ ID NO: 913034 - RNA, 19 nt, Artificial Sequence
  Description of Artificial Sequence: Synthetic oligonucleotide
  Sense strand starting at position 2477 of SEQ ID NO: 589044
ucagacaucccaggauauu

SEQ ID NO: 913035 - RNA, 19 nt, Artificial Sequence
  Description of Artificial Sequence: Synthetic oligonucleotide
  Antisense strand to SEQ ID NO: 913034
aauauccugggaugucuga

SEQ ID NO: 913036 - RNA, 19 nt, Artificial Sequence
  Description of Artificial Sequence: Synthetic oligonucleotide
  Sense strand starting at position 2603 of SEQ ID NO: 589044
uuuggacucagcgaugcaa

SEQ ID NO: 913037 - RNA, 19 nt, Artificial Sequence
  Description of Artificial Sequence: Synthetic oligonucleotide
  Antisense strand to SEQ ID NO: 913036
uugcaucgcugaguccaaa

SEQ ID NO: 913038 - RNA, 19 nt, Artificial Sequence
  Description of Artificial Sequence: Synthetic oligonucleotide
  Sense strand starting at position 2790 of SEQ ID NO: 589044
gaagaaauauuaccuguug

SEQ ID NO: 913039 - RNA, 19 nt, Artificial Sequence
  Description of Artificial Sequence: Synthetic oligonucleotide
  Antisense strand to SEQ ID NO: 913038
caacagguaauauuucuuc

SEQ ID NO: 913040 - RNA, 19 nt, Artificial Sequence
  Description of Artificial Sequence: Synthetic oligonucleotide
  Sense strand starting at position 2825 of SEQ ID NO: 589044
cuuauaagaugugcuuaaa

SEQ ID NO: 913041 - RNA, 19 nt, Artificial Sequence
  Description of Artificial Sequence: Synthetic oligonucleotide
  Antisense strand to SEQ ID NO: 913040
uuuaagcacaucuuauaag

SEQ ID NO: 913042 - RNA, 19 nt, Artificial Sequence
  Description of Artificial Sequence: Synthetic oligonucleotide
  Sense strand starting at position 2925 of SEQ ID NO: 589044
cugcucucugaugaucuua

SEQ ID NO: 913043 - RNA, 19 nt, Artificial Sequence
  Description of Artificial Sequence: Synthetic oligonucleotide
  Antisense strand to SEQ ID NO: 913042
uaagaucaucagagagcag

SEQ ID NO: 913044 - RNA, 19 nt, Artificial Sequence
  Description of Artificial Sequence: Synthetic oligonucleotide
  Sense strand starting at position 2963 of SEQ ID NO: 589044
guggaaaucuugccaaacc

SEQ ID NO: 913045 - RNA, 19 nt, Artificial Sequence
  Description of Artificial Sequence: Synthetic oligonucleotide
  Antisense strand to SEQ ID NO: 913044
gguuuggcaagauuuccac

SEQ ID NO: 913046 - RNA, 19 nt, Artificial Sequence
  Description of Artificial Sequence: Synthetic oligonucleotide
  Sense strand starting at position 3035 of SEQ ID NO: 589044
cucauauuaccuuguauug

SEQ ID NO: 913047 - RNA, 19 nt, Artificial Sequence
  Description of Artificial Sequence: Synthetic oligonucleotide
  Antisense strand to SEQ ID NO: 913046
caauacaagguaauaugag

SEQ ID NO: 913048 - RNA, 19 nt, Artificial Sequence
  Description of Artificial Sequence: Synthetic oligonucleotide
  Sense strand starting at position 3042 of SEQ ID NO: 589044
uaccuuguauugcuaagga

SEQ ID NO: 913049 - RNA, 19 nt, Artificial Sequence
  Description of Artificial Sequence: Synthetic oligonucleotide
  Antisense strand to SEQ ID NO: 913048
uccuuagcaauacaaggua

SEQ ID NO: 913050 - RNA, 19 nt, Artificial Sequence
  Description of Artificial Sequence: Synthetic oligonucleotide
  Sense strand starting at position 3132 of SEQ ID NO: 589044
ugguuaucaaagugggauc

SEQ ID NO: 913051 - RNA, 19 nt, Artificial Sequence
  Description of Artificial Sequence: Synthetic oligonucleotide
  Antisense strand to SEQ ID NO: 913050
gaucccacuuugauaacca

SEQ ID NO: 913052 - RNA, 19 nt, Artificial Sequence
  Description of Artificial Sequence: Synthetic oligonucleotide
  Sense strand starting at position 3215 of SEQ ID NO: 589044
ccagaucuacuguaguaga

SEQ ID NO: 913053 - RNA, 19 nt, Artificial Sequence
  Description of Artificial Sequence: Synthetic oligonucleotide
  Antisense strand to SEQ ID NO: 913052
ucuacuacaguagaucugg

SEQ ID NO: 913054 - RNA, 19 nt, Artificial Sequence
  Description of Artificial Sequence: Synthetic oligonucleotide
  Sense strand starting at position 3229 of SEQ ID NO: 589044
guagaaacuguuuaggugu

SEQ ID NO: 913055 - RNA, 19 nt, Artificial Sequence
  Description of Artificial Sequence: Synthetic oligonucleotide
  Antisense strand to SEQ ID NO: 913054
acaccuaaacaguuucuac

SEQ ID NO: 913056 - RNA, 19 nt, Artificial Sequence
  Description of Artificial Sequence: Synthetic oligonucleotide
  Sense strand starting at position 3434 of SEQ ID NO: 589044
uugaaagacuagucacgau

SEQ ID NO: 913057 - RNA, 19 nt, Artificial Sequence
  Description of Artificial Sequence: Synthetic oligonucleotide
  Antisense strand to SEQ ID NO: 913056
aucgugacuagucuuucaa

SEQ ID NO: 913058 - RNA, 19 nt, Artificial Sequence
  Description of Artificial Sequence: Synthetic oligonucleotide
  Sense strand starting at position 3842 of SEQ ID NO: 589044
gggaauaauuugugacaag

SEQ ID NO: 913059 - RNA, 19 nt, Artificial Sequence
  Description of Artificial Sequence: Synthetic oligonucleotide
  Antisense strand to SEQ ID NO: 913058
cuugucacaaauuauuccc

SEQ ID NO: 913060 - RNA, 19 nt, Artificial Sequence
  Description of Artificial Sequence: Synthetic oligonucleotide
  Sense strand starting at position 3843 of SEQ ID NO: 589044
ggaauaauuugugacaagu

SEQ ID NO: 913061 - RNA, 19 nt, Artificial Sequence
  Description of Artificial Sequence: Synthetic oligonucleotide
  Antisense strand to SEQ ID NO: 913060
acuugucacaaauuauucc

SEQ ID NO: 913062 - RNA, 19 nt, Artificial Sequence
  Description of Artificial Sequence: Synthetic oligonucleotide
  Sense strand starting at position 3845 of SEQ ID NO: 589044
aauaauuugugacaaguga

SEQ ID NO: 913063 - RNA, 19 nt, Artificial Sequence
  Description of Artificial Sequence: Synthetic oligonucleotide
  Antisense strand to SEQ ID NO: 913062
ucacuugucacaaauuauu

SEQ ID NO: 913064 - RNA, 19 nt, Artificial Sequence
  Description of Artificial Sequence: Synthetic oligonucleotide
  Sense strand starting at position 3852 of SEQ ID NO: 589044
ugugacaagugaucucaaa

SEQ ID NO: 913065 - RNA, 19 nt, Artificial Sequence
  Description of Artificial Sequence: Synthetic oligonucleotide
  Antisense strand to SEQ ID NO: 913064
uuugagaucacuugucaca

SEQ ID NO: 913066 - RNA, 19 nt, Artificial Sequence
  Description of Artificial Sequence: Synthetic oligonucleotide
  Sense strand starting at position 3889 of SEQ ID NO: 589044
aguugacagguccaugauu

SEQ ID NO: 913067 - RNA, 19 nt, Artificial Sequence
  Description of Artificial Sequence: Synthetic oligonucleotide
  Antisense strand to SEQ ID NO: 913066
aaucauggaccugucaacu

SEQ ID NO: 913068 - RNA, 19 nt, Artificial Sequence
  Description of Artificial Sequence: Synthetic oligonucleotide
  Sense strand starting at position 3908 of SEQ ID NO: 589044
gcacaugacaauuggaagu

SEQ ID NO: 913069 - RNA, 19 nt, Artificial Sequence
  Description of Artificial Sequence: Synthetic oligonucleotide
  Antisense strand to SEQ ID NO: 913068
acuuccaauugucaugugc

SEQ ID NO: 913070 - RNA, 19 nt, Artificial Sequence
  Description of Artificial Sequence: Synthetic oligonucleotide
  Sense strand starting at position 21 of SEQ ID NO: 589046
gcacgugucagcucuauca

SEQ ID NO: 913071 - RNA, 19 nt, Artificial Sequence
  Description of Artificial Sequence: Synthetic oligonucleotide
  Antisense strand to SEQ ID NO: 913070
ugauagagcugacacgugc

SEQ ID NO: 913072 - RNA, 19 nt, Artificial Sequence
  Description of Artificial Sequence: Synthetic oligonucleotide
  Sense strand starting at position 38 of SEQ ID NO: 589046
cagguauagcuagaaugca

SEQ ID NO: 913073 - RNA, 19 nt, Artificial Sequence
  Description of Artificial Sequence: Synthetic oligonucleotide
  Antisense strand to SEQ ID NO: 913072
ugcauucuagcuauaccug

SEQ ID NO: 913074 - RNA, 19 nt, Artificial Sequence
  Description of Artificial Sequence: Synthetic oligonucleotide
  Sense strand starting at position 68 of SEQ ID NO: 589046
guuuauggcuuccucuaac

SEQ ID NO: 913075 - RNA, 19 nt, Artificial Sequence
  Description of Artificial Sequence: Synthetic oligonucleotide
  Antisense strand to SEQ ID NO: 913074
guuagaggaagccauaaac

SEQ ID NO: 913076 - RNA, 19 nt, Artificial Sequence
  Description of Artificial Sequence: Synthetic oligonucleotide
  Sense strand starting at position 106 of SEQ ID NO: 589046
ccgaguguaacugaacaau

SEQ ID NO: 913077 - RNA, 19 nt, Artificial Sequence
  Description of Artificial Sequence: Synthetic oligonucleotide
  Antisense strand to SEQ ID NO: 913076
auuguucaguuacacucgg

SEQ ID NO: 913078 - RNA, 19 nt, Artificial Sequence
  Description of Artificial Sequence: Synthetic oligonucleotide
  Sense strand starting at position 251 of SEQ ID NO: 589046
cuagucugccacuaaguca

SEQ ID NO: 913079 - RNA, 19 nt, Artificial Sequence
  Description of Artificial Sequence: Synthetic oligonucleotide
  Antisense strand to SEQ ID NO: 913078
ugacuuaguggcagacuag

SEQ ID NO: 913080 - RNA, 19 nt, Artificial Sequence
  Description of Artificial Sequence: Synthetic oligonucleotide
  Sense strand starting at position 259 of SEQ ID NO: 589046
ccacuaagucagugaccuu

SEQ ID NO: 913081 - RNA, 19 nt, Artificial Sequence
  Description of Artificial Sequence: Synthetic oligonucleotide
  Antisense strand to SEQ ID NO: 913080
aaggucacugacuuagugg

SEQ ID NO: 913082 - RNA, 19 nt, Artificial Sequence
  Description of Artificial Sequence: Synthetic oligonucleotide
  Sense strand starting at position 276 of SEQ ID NO: 589046
uugggcaaguccuuacuuu

SEQ ID NO: 913083 - RNA, 19 nt, Artificial Sequence
  Description of Artificial Sequence: Synthetic oligonucleotide
  Antisense strand to SEQ ID NO: 913082
aaaguaaggacuugcccaa

SEQ ID NO: 913084 - RNA, 19 nt, Artificial Sequence
  Description of Artificial Sequence: Synthetic oligonucleotide
  Sense strand starting at position 283 of SEQ ID NO: 589046
aguccuuacuuuccagauu

SEQ ID NO: 913085 - RNA, 19 nt, Artificial Sequence
  Description of Artificial Sequence: Synthetic oligonucleotide
  Antisense strand to SEQ ID NO: 913084
aaucuggaaaguaaggacu

SEQ ID NO: 913086 - RNA, 19 nt, Artificial Sequence
  Description of Artificial Sequence: Synthetic oligonucleotide
  Sense strand starting at position 284 of SEQ ID NO: 589046
guccuuacuuuccagauuu

SEQ ID NO: 913087 - RNA, 19 nt, Artificial Sequence
  Description of Artificial Sequence: Synthetic oligonucleotide
  Antisense strand to SEQ ID NO: 913086
aaaucuggaaaguaaggac

SEQ ID NO: 913088 - RNA, 19 nt, Artificial Sequence
  Description of Artificial Sequence: Synthetic oligonucleotide
  Sense strand starting at position 579 of SEQ ID NO: 589046
ggaugugugaccuauaugu

SEQ ID NO: 913089 - RNA, 19 nt, Artificial Sequence
  Description of Artificial Sequence: Synthetic oligonucleotide
  Antisense strand to SEQ ID NO: 913088
acauauaggucacacaucc

SEQ ID NO: 913090 - RNA, 19 nt, Artificial Sequence
  Description of Artificial Sequence: Synthetic oligonucleotide
  Sense strand starting at position 581 of SEQ ID NO: 589046
augugugaccuauauguuc

SEQ ID NO: 913091 - RNA, 19 nt, Artificial Sequence
  Description of Artificial Sequence: Synthetic oligonucleotide
  Antisense strand to SEQ ID NO: 913090
gaacauauaggucacacau

SEQ ID NO: 913092 - RNA, 19 nt, Artificial Sequence
  Description of Artificial Sequence: Synthetic oligonucleotide
  Sense strand starting at position 583 of SEQ ID NO: 589046
gugugaccuauauguuccu

SEQ ID NO: 913093 - RNA, 19 nt, Artificial Sequence
  Description of Artificial Sequence: Synthetic oligonucleotide
  Antisense strand to SEQ ID NO: 913092
aggaacauauaggucacac

SEQ ID NO: 913094 - RNA, 19 nt, Artificial Sequence
  Description of Artificial Sequence: Synthetic oligonucleotide
  Sense strand starting at position 586 of SEQ ID NO: 589046
ugaccuauauguuccuuua

SEQ ID NO: 913095 - RNA, 19 nt, Artificial Sequence
  Description of Artificial Sequence: Synthetic oligonucleotide
  Antisense strand to SEQ ID NO: 913094
uaaaggaacauauagguca

SEQ ID NO: 913096 - RNA, 19 nt, Artificial Sequence
  Description of Artificial Sequence: Synthetic oligonucleotide
  Sense strand starting at position 597 of SEQ ID NO: 589046
uuccuuuaucuugguaucu

SEQ ID NO: 913097 - RNA, 19 nt, Artificial Sequence
  Description of Artificial Sequence: Synthetic oligonucleotide
  Antisense strand to SEQ ID NO: 913096
agauaccaagauaaaggaa

SEQ ID NO: 913098 - RNA, 19 nt, Artificial Sequence
  Description of Artificial Sequence: Synthetic oligonucleotide
  Sense strand starting at position 606 of SEQ ID NO: 589046
cuugguaucuccuuagaug

SEQ ID NO: 913099 - RNA, 19 nt, Artificial Sequence
  Description of Artificial Sequence: Synthetic oligonucleotide
  Antisense strand to SEQ ID NO: 913098
caucuaaggagauaccaag

SEQ ID NO: 913100 - RNA, 19 nt, Artificial Sequence
  Description of Artificial Sequence: Synthetic oligonucleotide
  Sense strand starting at position 2203 of SEQ ID NO: 589046
gagcgaguccuguggagga

SEQ ID NO: 913101 - RNA, 19 nt, Artificial Sequence
  Description of Artificial Sequence: Synthetic oligonucleotide
  Antisense strand to SEQ ID NO: 913100
uccuccacaggacucgcuc

SEQ ID NO: 913102 - RNA, 19 nt, Artificial Sequence
  Description of Artificial Sequence: Synthetic oligonucleotide
  Sense strand starting at position 2213 of SEQ ID NO: 589046
uguggaggaugcguuucua

SEQ ID NO: 913103 - RNA, 19 nt, Artificial Sequence
  Description of Artificial Sequence: Synthetic oligonucleotide
  Antisense strand to SEQ ID NO: 913102
uagaaacgcauccuccaca

SEQ ID NO: 913104 - RNA, 19 nt, Artificial Sequence
  Description of Artificial Sequence: Synthetic oligonucleotide
  Sense strand starting at position 2610 of SEQ ID NO: 589046
cugugaaaucccuggaaau

SEQ ID NO: 913105 - RNA, 19 nt, Artificial Sequence
  Description of Artificial Sequence: Synthetic oligonucleotide
  Antisense strand to SEQ ID NO: 913104
auuuccagggauuucacag

SEQ ID NO: 913106 - RNA, 19 nt, Artificial Sequence
  Description of Artificial Sequence: Synthetic oligonucleotide
  Sense strand starting at position 2611 of SEQ ID NO: 589046
ugugaaaucccuggaaauu

SEQ ID NO: 913107 - RNA, 19 nt, Artificial Sequence
  Description of Artificial Sequence: Synthetic oligonucleotide
  Antisense strand to SEQ ID NO: 913106
aauuuccagggauuucaca

SEQ ID NO: 913108 - RNA, 19 nt, Artificial Sequence
  Description of Artificial Sequence: Synthetic oligonucleotide
  Sense strand starting at position 2819 of SEQ ID NO: 589046
ggaugacuuuacccggaac

SEQ ID NO: 913109 - RNA, 19 nt, Artificial Sequence
  Description of Artificial Sequence: Synthetic oligonucleotide
  Antisense strand to SEQ ID NO: 913108
guuccggguaaagucaucc

SEQ ID NO: 913110 - RNA, 19 nt, Artificial Sequence
  Description of Artificial Sequence: Synthetic oligonucleotide
  Sense strand starting at position 2822 of SEQ ID NO: 589046
ugacuuuacccggaacacu

SEQ ID NO: 913111 - RNA, 19 nt, Artificial Sequence
  Description of Artificial Sequence: Synthetic oligonucleotide
  Antisense strand to SEQ ID NO: 913110
aguguuccggguaaaguca

SEQ ID NO: 913112 - RNA, 19 nt, Artificial Sequence
  Description of Artificial Sequence: Synthetic oligonucleotide
  Sense strand starting at position 2981 of SEQ ID NO: 589046
uagaaaugauguuuagggu

SEQ ID NO: 913113 - RNA, 19 nt, Artificial Sequence
  Description of Artificial Sequence: Synthetic oligonucleotide
  Antisense strand to SEQ ID NO: 913112
acccuaaacaucauuucua

SEQ ID NO: 913114 - RNA, 19 nt, Artificial Sequence
  Description of Artificial Sequence: Synthetic oligonucleotide
  Sense strand starting at position 2996 of SEQ ID NO: 589046
ggguuuauauuagccacau

SEQ ID NO: 913115 - RNA, 19 nt, Artificial Sequence
  Description of Artificial Sequence: Synthetic oligonucleotide
  Antisense strand to SEQ ID NO: 913114
auguggcuaauauaaaccc

SEQ ID NO: 913116 - RNA, 19 nt, Artificial Sequence
  Description of Artificial Sequence: Synthetic oligonucleotide
  Sense strand starting at position 2997 of SEQ ID NO: 589046
gguuuauauuagccacaua

SEQ ID NO: 913117 - RNA, 19 nt, Artificial Sequence
  Description of Artificial Sequence: Synthetic oligonucleotide
  Antisense strand to SEQ ID NO: 913116
uauguggcuaauauaaacc

SEQ ID NO: 913118 - RNA, 19 nt, Artificial Sequence
  Description of Artificial Sequence: Synthetic oligonucleotide
  Sense strand starting at position 3044 of SEQ ID NO: 589046
uucucaaaguugguaauca

SEQ ID NO: 913119 - RNA, 19 nt, Artificial Sequence
  Description of Artificial Sequence: Synthetic oligonucleotide
  Antisense strand to SEQ ID NO: 913118
ugauuaccaacuuugagaa

SEQ ID NO: 913120 - RNA, 19 nt, Artificial Sequence
  Description of Artificial Sequence: Synthetic oligonucleotide
  Sense strand starting at position 3245 of SEQ ID NO: 589046
acaguucuccgccacaguu

SEQ ID NO: 913121 - RNA, 19 nt, Artificial Sequence
  Description of Artificial Sequence: Synthetic oligonucleotide
  Antisense strand to SEQ ID NO: 913120
aacuguggcggagaacugu

SEQ ID NO: 913122 - RNA, 19 nt, Artificial Sequence
  Description of Artificial Sequence: Synthetic oligonucleotide
  Sense strand starting at position 3308 of SEQ ID NO: 589046
caaauucggguuuauuacu

SEQ ID NO: 913123 - RNA, 19 nt, Artificial Sequence
  Description of Artificial Sequence: Synthetic oligonucleotide
  Antisense strand to SEQ ID NO: 913122
aguaauaaacccgaauuug

SEQ ID NO: 913124 - RNA, 19 nt, Artificial Sequence
  Description of Artificial Sequence: Synthetic oligonucleotide
  Sense strand starting at position 3313 of SEQ ID NO: 589046
ucggguuuauuacugugau

SEQ ID NO: 913125 - RNA, 19 nt, Artificial Sequence
  Description of Artificial Sequence: Synthetic oligonucleotide
  Antisense strand to SEQ ID NO: 913124
aucacaguaauaaacccga

SEQ ID NO: 913126 - RNA, 19 nt, Artificial Sequence
  Description of Artificial Sequence: Synthetic oligonucleotide
  Sense strand starting at position 3316 of SEQ ID NO: 589046
gguuuauuacugugaucaa

SEQ ID NO: 913127 - RNA, 19 nt, Artificial Sequence
  Description of Artificial Sequence: Synthetic oligonucleotide
  Antisense strand to SEQ ID NO: 913126
uugaucacaguaauaaacc

SEQ ID NO: 913128 - RNA, 19 nt, Artificial Sequence
  Description of Artificial Sequence: Synthetic oligonucleotide
  Sense strand starting at position 3533 of SEQ ID NO: 589046
ucaugucccuuucuacaga

SEQ ID NO: 913129 - RNA, 19 nt, Artificial Sequence
  Description of Artificial Sequence: Synthetic oligonucleotide
  Antisense strand to SEQ ID NO: 913128
ucuguagaaagggacauga

SEQ ID NO: 913130 - RNA, 19 nt, Artificial Sequence
  Description of Artificial Sequence: Synthetic oligonucleotide
  Sense strand starting at position 3601 of SEQ ID NO: 589046
aggcaauggaggugauuau

SEQ ID NO: 913131 - RNA, 19 nt, Artificial Sequence
  Description of Artificial Sequence: Synthetic oligonucleotide
  Antisense strand to SEQ ID NO: 913130
auaaucaccuccauugccu

SEQ ID NO: 913132 - RNA, 19 nt, Artificial Sequence
  Description of Artificial Sequence: Synthetic oligonucleotide
  Sense strand starting at position 3602 of SEQ ID NO: 589046
ggcaauggaggugauuauu

SEQ ID NO: 913133 - RNA, 19 nt, Artificial Sequence
  Description of Artificial Sequence: Synthetic oligonucleotide
  Antisense strand to SEQ ID NO: 913132
aauaaucaccuccauugcc

SEQ ID NO: 913134 - RNA, 19 nt, Artificial Sequence
  Description of Artificial Sequence: Synthetic oligonucleotide
  Sense strand starting at position 3676 of SEQ ID NO: 589046
uggaguuauagugagugaa

SEQ ID NO: 913135 - RNA, 19 nt, Artificial Sequence
  Description of Artificial Sequence: Synthetic oligonucleotide
  Antisense strand to SEQ ID NO: 913134
uucacucacuauaacucca

SEQ ID NO: 913136 - RNA, 19 nt, Artificial Sequence
  Description of Artificial Sequence: Synthetic oligonucleotide
  Sense strand starting at position 3678 of SEQ ID NO: 589046
gaguuauagugagugaaac

SEQ ID NO: 913137 - RNA, 19 nt, Artificial Sequence
  Description of Artificial Sequence: Synthetic oligonucleotide
  Antisense strand to SEQ ID NO: 913136
guuucacucacuauaacuc

SEQ ID NO: 913138 - RNA, 19 nt, Artificial Sequence
  Description of Artificial Sequence: Synthetic oligonucleotide
  Sense strand starting at position 3679 of SEQ ID NO: 589046
aguuauagugagugaaaca

SEQ ID NO: 913139 - RNA, 19 nt, Artificial Sequence
  Description of Artificial Sequence: Synthetic oligonucleotide
  Antisense strand to SEQ ID NO: 913138
uguuucacucacuauaacu

SEQ ID NO: 913140 - RNA, 19 nt, Artificial Sequence
  Description of Artificial Sequence: Synthetic oligonucleotide
  Sense strand starting at position 3747 of SEQ ID NO: 589046
gcaagcucauuauugaaua

SEQ ID NO: 913141 - RNA, 19 nt, Artificial Sequence
  Description of Artificial Sequence: Synthetic oligonucleotide
  Antisense strand to SEQ ID NO: 913140
uauucaauaaugagcuugc

SEQ ID NO: 913142 - RNA, 19 nt, Artificial Sequence
  Description of Artificial Sequence: Synthetic oligonucleotide
  Sense strand starting at position 3752 of SEQ ID NO: 589046
cucauuauugaauagugua

SEQ ID NO: 913143 - RNA, 19 nt, Artificial Sequence
  Description of Artificial Sequence: Synthetic oligonucleotide
  Antisense strand to SEQ ID NO: 913142
uacacuauucaauaaugag

SEQ ID NO: 913144 - RNA, 19 nt, Artificial Sequence
  Description of Artificial Sequence: Synthetic oligonucleotide
  Sense strand starting at position 3760 of SEQ ID NO: 589046
ugaauaguguauuccauaa

SEQ ID NO: 913145 - RNA, 19 nt, Artificial Sequence
  Description of Artificial Sequence: Synthetic oligonucleotide
  Antisense strand to SEQ ID NO: 913144
uuauggaauacacuauuca

SEQ ID NO: 913146 - RNA, 19 nt, Artificial Sequence
  Description of Artificial Sequence: Synthetic oligonucleotide
  Sense strand starting at position 3852 of SEQ ID NO: 589046
gaauguugcagguauugga

SEQ ID NO: 913147 - RNA, 19 nt, Artificial Sequence
  Description of Artificial Sequence: Synthetic oligonucleotide
  Antisense strand to SEQ ID NO: 913146
uccaauaccugcaacauuc

SEQ ID NO: 913148 - RNA, 19 nt, Artificial Sequence
  Description of Artificial Sequence: Synthetic oligonucleotide
  Sense strand starting at position 3921 of SEQ ID NO: 589046
aaauguggucuccagacua

SEQ ID NO: 913149 - RNA, 19 nt, Artificial Sequence
  Description of Artificial Sequence: Synthetic oligonucleotide
  Antisense strand to SEQ ID NO: 913148
uagucuggagaccacauuu

SEQ ID NO: 913150 - RNA, 19 nt, Artificial Sequence
  Description of Artificial Sequence: Synthetic oligonucleotide
  Sense strand starting at position 96 of SEQ ID NO: 589047
ggacaugagucuucuacau

SEQ ID NO: 913151 - RNA, 19 nt, Artificial Sequence
  Description of Artificial Sequence: Synthetic oligonucleotide
  Antisense strand to SEQ ID NO: 913150
auguagaagacucaugucc

SEQ ID NO: 913152 - RNA, 19 nt, Artificial Sequence
  Description of Artificial Sequence: Synthetic oligonucleotide
  Sense strand starting at position 100 of SEQ ID NO: 589047
augagucuucuacaugggu

SEQ ID NO: 913153 - RNA, 19 nt, Artificial Sequence
  Description of Artificial Sequence: Synthetic oligonucleotide
  Antisense strand to SEQ ID NO: 913152
acccauguagaagacucau

SEQ ID NO: 913154 - RNA, 19 nt, Artificial Sequence
  Description of Artificial Sequence: Synthetic oligonucleotide
  Sense strand starting at position 174 of SEQ ID NO: 589047
gugcacagcuugcuuuaau

SEQ ID NO: 913155 - RNA, 19 nt, Artificial Sequence
  Description of Artificial Sequence: Synthetic oligonucleotide
  Antisense strand to SEQ ID NO: 913154
auuaaagcaagcugugcac

SEQ ID NO: 913156 - RNA, 19 nt, Artificial Sequence
  Description of Artificial Sequence: Synthetic oligonucleotide
  Sense strand starting at position 175 of SEQ ID NO: 589047
ugcacagcuugcuuuaaua

SEQ ID NO: 913157 - RNA, 19 nt, Artificial Sequence
  Description of Artificial Sequence: Synthetic oligonucleotide
  Antisense strand to SEQ ID NO: 913156
uauuaaagcaagcugugca

SEQ ID NO: 913158 - RNA, 19 nt, Artificial Sequence
  Description of Artificial Sequence: Synthetic oligonucleotide
  Sense strand starting at position 267 of SEQ ID NO: 589047
gauggaggcucucacauaa

SEQ ID NO: 913159 - RNA, 19 nt, Artificial Sequence
  Description of Artificial Sequence: Synthetic oligonucleotide
  Antisense strand to SEQ ID NO: 913158
uuaugugagagccuccauc

SEQ ID NO: 913160 - RNA, 19 nt, Artificial Sequence
  Description of Artificial Sequence: Synthetic oligonucleotide
  Sense strand starting at position 368 of SEQ ID NO: 589047
ggaugcagcguucauauau

SEQ ID NO: 913161 - RNA, 19 nt, Artificial Sequence
  Description of Artificial Sequence: Synthetic oligonucleotide
  Antisense strand to SEQ ID NO: 913160
auauaugaacgcugcaucc

SEQ ID NO: 913162 - RNA, 19 nt, Artificial Sequence
  Description of Artificial Sequence: Synthetic oligonucleotide
  Sense strand starting at position 490 of SEQ ID NO: 589047
uggucaagguuguugauaa

SEQ ID NO: 913163 - RNA, 19 nt, Artificial Sequence
  Description of Artificial Sequence: Synthetic oligonucleotide
  Antisense strand to SEQ ID NO: 913162
uuaucaacaaccuugacca

SEQ ID NO: 913164 - RNA, 19 nt, Artificial Sequence
  Description of Artificial Sequence: Synthetic oligonucleotide
  Sense strand starting at position 546 of SEQ ID NO: 589047
cucauuuagugaggauuua

SEQ ID NO: 913165 - RNA, 19 nt, Artificial Sequence
  Description of Artificial Sequence: Synthetic oligonucleotide
  Antisense strand to SEQ ID NO: 913164
uaaauccucacuaaaugag

SEQ ID NO: 913166 - RNA, 19 nt, Artificial Sequence
  Description of Artificial Sequence: Synthetic oligonucleotide
  Sense strand starting at position 579 of SEQ ID NO: 589047
ggauguguguucccauuag

SEQ ID NO: 913167 - RNA, 19 nt, Artificial Sequence
  Description of Artificial Sequence: Synthetic oligonucleotide
  Antisense strand to SEQ ID NO: 913166
cuaaugggaacacacaucc

SEQ ID NO: 913168 - RNA, 19 nt, Artificial Sequence
  Description of Artificial Sequence: Synthetic oligonucleotide
  Sense strand starting at position 583 of SEQ ID NO: 589047
guguguucccauuagguau

SEQ ID NO: 913169 - RNA, 19 nt, Artificial Sequence
  Description of Artificial Sequence: Synthetic oligonucleotide
  Antisense strand to SEQ ID NO: 913168
auaccuaaugggaacacac

SEQ ID NO: 913170 - RNA, 19 nt, Artificial Sequence
  Description of Artificial Sequence: Synthetic oligonucleotide
  Sense strand starting at position 676 of SEQ ID NO: 589047
gcacgugucagcucuauca

SEQ ID NO: 913171 - RNA, 19 nt, Artificial Sequence
  Description of Artificial Sequence: Synthetic oligonucleotide
  Antisense strand to SEQ ID NO: 913170
ugauagagcugacacgugc

SEQ ID NO: 913172 - RNA, 19 nt, Artificial Sequence
  Description of Artificial Sequence: Synthetic oligonucleotide
  Sense strand starting at position 693 of SEQ ID NO: 589047
cagguauagcuagaaugca

SEQ ID NO: 913173 - RNA, 19 nt, Artificial Sequence
  Description of Artificial Sequence: Synthetic oligonucleotide
  Antisense strand to SEQ ID NO: 913172
ugcauucuagcuauaccug

SEQ ID NO: 913174 - RNA, 19 nt, Artificial Sequence
  Description of Artificial Sequence: Synthetic oligonucleotide
  Sense strand starting at position 723 of SEQ ID NO: 589047
guuuauggcuuccucuaac

SEQ ID NO: 913175 - RNA, 19 nt, Artificial Sequence
  Description of Artificial Sequence: Synthetic oligonucleotide
  Antisense strand to SEQ ID NO: 913174
guuagaggaagccauaaac

SEQ ID NO: 913176 - RNA, 19 nt, Artificial Sequence
  Description of Artificial Sequence: Synthetic oligonucleotide
  Sense strand starting at position 761 of SEQ ID NO: 589047
ccgaguguaacugaacaau

SEQ ID NO: 913177 - RNA, 19 nt, Artificial Sequence
  Description of Artificial Sequence: Synthetic oligonucleotide
  Antisense strand to SEQ ID NO: 913176
auuguucaguuacacucgg

SEQ ID NO: 913178 - RNA, 19 nt, Artificial Sequence
  Description of Artificial Sequence: Synthetic oligonucleotide
  Sense strand starting at position 906 of SEQ ID NO: 589047
cuagucugccacuaaguca

SEQ ID NO: 913179 - RNA, 19 nt, Artificial Sequence
  Description of Artificial Sequence: Synthetic oligonucleotide
  Antisense strand to SEQ ID NO: 913178
ugacuuaguggcagacuag

SEQ ID NO: 913180 - RNA, 19 nt, Artificial Sequence
  Description of Artificial Sequence: Synthetic oligonucleotide
  Sense strand starting at position 914 of SEQ ID NO: 589047
ccacuaagucagugaccuu

SEQ ID NO: 913181 - RNA, 19 nt, Artificial Sequence
  Description of Artificial Sequence: Synthetic oligonucleotide
  Antisense strand to SEQ ID NO: 913180
aaggucacugacuuagugg

SEQ ID NO: 913182 - RNA, 19 nt, Artificial Sequence
  Description of Artificial Sequence: Synthetic oligonucleotide
  Sense strand starting at position 931 of SEQ ID NO: 589047
uugggcaaguccuuacuuu

SEQ ID NO: 913183 - RNA, 19 nt, Artificial Sequence
  Description of Artificial Sequence: Synthetic oligonucleotide
  Antisense strand to SEQ ID NO: 913182
aaaguaaggacuugcccaa

SEQ ID NO: 913184 - RNA, 19 nt, Artificial Sequence
  Description of Artificial Sequence: Synthetic oligonucleotide
  Sense strand starting at position 938 of SEQ ID NO: 589047
aguccuuacuuuccagauu

SEQ ID NO: 913185 - RNA, 19 nt, Artificial Sequence
  Description of Artificial Sequence: Synthetic oligonucleotide
  Antisense strand to SEQ ID NO: 913184
aaucuggaaaguaaggacu

SEQ ID NO: 913186 - RNA, 19 nt, Artificial Sequence
  Description of Artificial Sequence: Synthetic oligonucleotide
  Sense strand starting at position 939 of SEQ ID NO: 589047
guccuuacuuuccagauuu

SEQ ID NO: 913187 - RNA, 19 nt, Artificial Sequence
  Description of Artificial Sequence: Synthetic oligonucleotide
  Antisense strand to SEQ ID NO: 913186
aaaucuggaaaguaaggac

SEQ ID NO: 913188 - RNA, 19 nt, Artificial Sequence
  Description of Artificial Sequence: Synthetic oligonucleotide
  Sense strand starting at position 1234 of SEQ ID NO: 589047
ggaugugugaccuauaugu

SEQ ID NO: 913189 - RNA, 19 nt, Artificial Sequence
  Description of Artificial Sequence: Synthetic oligonucleotide
  Antisense strand to SEQ ID NO: 913188
acauauaggucacacaucc

SEQ ID NO: 913190 - RNA, 19 nt, Artificial Sequence
  Description of Artificial Sequence: Synthetic oligonucleotide
  Sense strand starting at position 1236 of SEQ ID NO: 589047
augugugaccuauauguuc

SEQ ID NO: 913191 - RNA, 19 nt, Artificial Sequence
  Description of Artificial Sequence: Synthetic oligonucleotide
  Antisense strand to SEQ ID NO: 913190
gaacauauaggucacacau

SEQ ID NO: 913192 - RNA, 19 nt, Artificial Sequence
  Description of Artificial Sequence: Synthetic oligonucleotide
  Sense strand starting at position 1238 of SEQ ID NO: 589047
gugugaccuauauguuccu

SEQ ID NO: 913193 - RNA, 19 nt, Artificial Sequence
  Description of Artificial Sequence: Synthetic oligonucleotide
  Antisense strand to SEQ ID NO: 913192
aggaacauauaggucacac

SEQ ID NO: 913194 - RNA, 19 nt, Artificial Sequence
  Description of Artificial Sequence: Synthetic oligonucleotide
  Sense strand starting at position 1241 of SEQ ID NO: 589047
ugaccuauauguuccuuua

SEQ ID NO: 913195 - RNA, 19 nt, Artificial Sequence
  Description of Artificial Sequence: Synthetic oligonucleotide
  Antisense strand to SEQ ID NO: 913194
uaaaggaacauauagguca

SEQ ID NO: 913196 - RNA, 19 nt, Artificial Sequence
  Description of Artificial Sequence: Synthetic oligonucleotide
  Sense strand starting at position 1252 of SEQ ID NO: 589047
uuccuuuaucuugguaucu

SEQ ID NO: 913197 - RNA, 19 nt, Artificial Sequence
  Description of Artificial Sequence: Synthetic oligonucleotide
  Antisense strand to SEQ ID NO: 913196
agauaccaagauaaaggaa

SEQ ID NO: 913198 - RNA, 19 nt, Artificial Sequence
  Description of Artificial Sequence: Synthetic oligonucleotide
  Sense strand starting at position 1261 of SEQ ID NO: 589047
cuugguaucuccuuagaug

SEQ ID NO: 913199 - RNA, 19 nt, Artificial Sequence
  Description of Artificial Sequence: Synthetic oligonucleotide
  Antisense strand to SEQ ID NO: 913198
caucuaaggagauaccaag

SEQ ID NO: 913200 - RNA, 19 nt, Artificial Sequence
  Description of Artificial Sequence: Synthetic oligonucleotide
  Sense strand starting at position 2858 of SEQ ID NO: 589047
gagcgaguccuguggagga

SEQ ID NO: 913201 - RNA, 19 nt, Artificial Sequence
  Description of Artificial Sequence: Synthetic oligonucleotide
  Antisense strand to SEQ ID NO: 913200
uccuccacaggacucgcuc

SEQ ID NO: 913202 - RNA, 19 nt, Artificial Sequence
  Description of Artificial Sequence: Synthetic oligonucleotide
  Sense strand starting at position 2868 of SEQ ID NO: 589047
uguggaggaugcguuucua

SEQ ID NO: 913203 - RNA, 19 nt, Artificial Sequence
  Description of Artificial Sequence: Synthetic oligonucleotide
  Antisense strand to SEQ ID NO: 913202
uagaaacgcauccuccaca

SEQ ID NO: 913204 - RNA, 19 nt, Artificial Sequence
  Description of Artificial Sequence: Synthetic oligonucleotide
  Sense strand starting at position 3265 of SEQ ID NO: 589047
cugugaaaucccuggaaau

SEQ ID NO: 913205 - RNA, 19 nt, Artificial Sequence
  Description of Artificial Sequence: Synthetic oligonucleotide
  Antisense strand to SEQ ID NO: 913204
auuuccagggauuucacag

SEQ ID NO: 913206 - RNA, 19 nt, Artificial Sequence
  Description of Artificial Sequence: Synthetic oligonucleotide
  Sense strand starting at position 3266 of SEQ ID NO: 589047
ugugaaaucccuggaaauu

SEQ ID NO: 913207 - RNA, 19 nt, Artificial Sequence
  Description of Artificial Sequence: Synthetic oligonucleotide
  Antisense strand to SEQ ID NO: 913206
aauuuccagggauuucaca

SEQ ID NO: 913208 - RNA, 19 nt, Artificial Sequence
  Description of Artificial Sequence: Synthetic oligonucleotide
  Sense strand starting at position 3474 of SEQ ID NO: 589047
ggaugacuuuacccggaac

SEQ ID NO: 913209 - RNA, 19 nt, Artificial Sequence
  Description of Artificial Sequence: Synthetic oligonucleotide
  Antisense strand to SEQ ID NO: 913208
guuccggguaaagucaucc

SEQ ID NO: 913210 - RNA, 19 nt, Artificial Sequence
  Description of Artificial Sequence: Synthetic oligonucleotide
  Sense strand starting at position 3477 of SEQ ID NO: 589047
ugacuuuacccggaacacu

SEQ ID NO: 913211 - RNA, 19 nt, Artificial Sequence
  Description of Artificial Sequence: Synthetic oligonucleotide
  Antisense strand to SEQ ID NO: 913210
aguguuccggguaaaguca

SEQ ID NO: 913212 - RNA, 19 nt, Artificial Sequence
  Description of Artificial Sequence: Synthetic oligonucleotide
  Sense strand starting at position 3577 of SEQ ID NO: 589047
auuacuaagucggaaagga

SEQ ID NO: 913213 - RNA, 19 nt, Artificial Sequence
  Description of Artificial Sequence: Synthetic oligonucleotide
  Antisense strand to SEQ ID NO: 913212
uccuuuccgacuuaguaau

SEQ ID NO: 913214 - RNA, 19 nt, Artificial Sequence
  Description of Artificial Sequence: Synthetic oligonucleotide
  Sense strand starting at position 3636 of SEQ ID NO: 589047
uagaaaugauguuuagggu

SEQ ID NO: 913215 - RNA, 19 nt, Artificial Sequence
  Description of Artificial Sequence: Synthetic oligonucleotide
  Antisense strand to SEQ ID NO: 913214
acccuaaacaucauuucua

SEQ ID NO: 913216 - RNA, 19 nt, Artificial Sequence
  Description of Artificial Sequence: Synthetic oligonucleotide
  Sense strand starting at position 3651 of SEQ ID NO: 589047
ggguuuauauuagccacau

SEQ ID NO: 913217 - RNA, 19 nt, Artificial Sequence
  Description of Artificial Sequence: Synthetic oligonucleotide
  Antisense strand to SEQ ID NO: 913216
auguggcuaauauaaaccc

SEQ ID NO: 913218 - RNA, 19 nt, Artificial Sequence
  Description of Artificial Sequence: Synthetic oligonucleotide
  Sense strand starting at position 3652 of SEQ ID NO: 589047
gguuuauauuagccacaua

SEQ ID NO: 913219 - RNA, 19 nt, Artificial Sequence
  Description of Artificial Sequence: Synthetic oligonucleotide
  Antisense strand to SEQ ID NO: 913218
uauguggcuaauauaaacc

SEQ ID NO: 913220 - RNA, 19 nt, Artificial Sequence
  Description of Artificial Sequence: Synthetic oligonucleotide
  Sense strand starting at position 3699 of SEQ ID NO: 589047
uucucaaaguugguaauca

SEQ ID NO: 913221 - RNA, 19 nt, Artificial Sequence
  Description of Artificial Sequence: Synthetic oligonucleotide
  Antisense strand to SEQ ID NO: 913220
ugauuaccaacuuugagaa

SEQ ID NO: 913222 - RNA, 19 nt, Artificial Sequence
  Description of Artificial Sequence: Synthetic oligonucleotide
  Sense strand starting at position 3900 of SEQ ID NO: 589047
acaguucuccgccacaguu

SEQ ID NO: 913223 - RNA, 19 nt, Artificial Sequence
  Description of Artificial Sequence: Synthetic oligonucleotide
  Antisense strand to SEQ ID NO: 913222
aacuguggcggagaacugu

SEQ ID NO: 913224 - RNA, 19 nt, Artificial Sequence
  Description of Artificial Sequence: Synthetic oligonucleotide
  Sense strand starting at position 3963 of SEQ ID NO: 589047
caaauucggguuuauuacu

SEQ ID NO: 913225 - RNA, 19 nt, Artificial Sequence
  Description of Artificial Sequence: Synthetic oligonucleotide
  Antisense strand to SEQ ID NO: 913224
aguaauaaacccgaauuug

SEQ ID NO: 913226 - RNA, 19 nt, Artificial Sequence
  Description of Artificial Sequence: Synthetic oligonucleotide
  Sense strand starting at position 3968 of SEQ ID NO: 589047
ucggguuuauuacugugau

SEQ ID NO: 913227 - RNA, 19 nt, Artificial Sequence
  Description of Artificial Sequence: Synthetic oligonucleotide
  Antisense strand to SEQ ID NO: 913226
aucacaguaauaaacccga

SEQ ID NO: 913228 - RNA, 19 nt, Artificial Sequence
  Description of Artificial Sequence: Synthetic oligonucleotide
  Sense strand starting at position 3971 of SEQ ID NO: 589047
gguuuauuacugugaucaa

SEQ ID NO: 913229 - RNA, 19 nt, Artificial Sequence
  Description of Artificial Sequence: Synthetic oligonucleotide
  Antisense strand to SEQ ID NO: 913228
uugaucacaguaauaaacc

SEQ ID NO: 913230 - RNA, 19 nt, Artificial Sequence
  Description of Artificial Sequence: Synthetic oligonucleotide
  Sense strand starting at position 27 of SEQ ID NO: 589053
aagguuucccucuggaaag

SEQ ID NO: 913231 - RNA, 19 nt, Artificial Sequence
  Description of Artificial Sequence: Synthetic oligonucleotide
  Antisense strand to SEQ ID NO: 913230
cuuuccagagggaaaccuu

SEQ ID NO: 913232 - RNA, 19 nt, Artificial Sequence
  Description of Artificial Sequence: Synthetic oligonucleotide
  Sense strand starting at position 142 of SEQ ID NO: 589053
ucagcuuugucuccuggaa

SEQ ID NO: 913233 - RNA, 19 nt, Artificial Sequence
  Description of Artificial Sequence: Synthetic oligonucleotide
  Antisense strand to SEQ ID NO: 913232
uuccaggagacaaagcuga

SEQ ID NO: 913234 - RNA, 19 nt, Artificial Sequence
  Description of Artificial Sequence: Synthetic oligonucleotide
  Sense strand starting at position 202 of SEQ ID NO: 589053
cggcuuaccugacucaguu

SEQ ID NO: 913235 - RNA, 19 nt, Artificial Sequence
  Description of Artificial Sequence: Synthetic oligonucleotide
  Antisense strand to SEQ ID NO: 913234
aacugagucagguaagccg

SEQ ID NO: 913236 - RNA, 19 nt, Artificial Sequence
  Description of Artificial Sequence: Synthetic oligonucleotide
  Sense strand starting at position 457 of SEQ ID NO: 589053
cccucucuguagguuagaa

SEQ ID NO: 913237 - RNA, 19 nt, Artificial Sequence
  Description of Artificial Sequence: Synthetic oligonucleotide
  Antisense strand to SEQ ID NO: 913236
uucuaaccuacagagaggg

SEQ ID NO: 913238 - RNA, 19 nt, Artificial Sequence
  Description of Artificial Sequence: Synthetic oligonucleotide
  Sense strand starting at position 513 of SEQ ID NO: 589053
ggugaacagccuggagaau

SEQ ID NO: 913239 - RNA, 19 nt, Artificial Sequence
  Description of Artificial Sequence: Synthetic oligonucleotide
  Antisense strand to SEQ ID NO: 913238
auucuccaggcuguucacc

SEQ ID NO: 913240 - RNA, 19 nt, Artificial Sequence
  Description of Artificial Sequence: Synthetic oligonucleotide
  Sense strand starting at position 738 of SEQ ID NO: 589053
cucccuuccucagaggaga

SEQ ID NO: 913241 - RNA, 19 nt, Artificial Sequence
  Description of Artificial Sequence: Synthetic oligonucleotide
  Antisense strand to SEQ ID NO: 913240
ucuccucugaggaagggag

SEQ ID NO: 913242 - RNA, 19 nt, Artificial Sequence
  Description of Artificial Sequence: Synthetic oligonucleotide
  Sense strand starting at position 773 of SEQ ID NO: 589053
ggcuucuccucuccagaaa

SEQ ID NO: 913243 - RNA, 19 nt, Artificial Sequence
  Description of Artificial Sequence: Synthetic oligonucleotide
  Antisense strand to SEQ ID NO: 913242
uuucuggagaggagaagcc

SEQ ID NO: 913244 - RNA, 19 nt, Artificial Sequence
  Description of Artificial Sequence: Synthetic oligonucleotide
  Sense strand starting at position 1636 of SEQ ID NO: 589053
cccuccuuggccgaaugaa

SEQ ID NO: 913245 - RNA, 19 nt, Artificial Sequence
  Description of Artificial Sequence: Synthetic oligonucleotide
  Antisense strand to SEQ ID NO: 913244
uucauucggccaaggaggg

SEQ ID NO: 913246 - RNA, 19 nt, Artificial Sequence
  Description of Artificial Sequence: Synthetic oligonucleotide
  Sense strand starting at position 2194 of SEQ ID NO: 589053
gugcgcgaagccuuucuaa

SEQ ID NO: 913247 - RNA, 19 nt, Artificial Sequence
  Description of Artificial Sequence: Synthetic oligonucleotide
  Antisense strand to SEQ ID NO: 913246
uuagaaaggcuucgcgcac

SEQ ID NO: 913248 - RNA, 19 nt, Artificial Sequence
  Description of Artificial Sequence: Synthetic oligonucleotide
  Sense strand starting at position 2196 of SEQ ID NO: 589053
gcgcgaagccuuucuaaua

SEQ ID NO: 913249 - RNA, 19 nt, Artificial Sequence
  Description of Artificial Sequence: Synthetic oligonucleotide
  Antisense strand to SEQ ID NO: 913248
uauuagaaaggcuucgcgc

SEQ ID NO: 913250 - RNA, 19 nt, Artificial Sequence
  Description of Artificial Sequence: Synthetic oligonucleotide
  Sense strand starting at position 2197 of SEQ ID NO: 589053
cgcgaagccuuucuaauaa

SEQ ID NO: 913251 - RNA, 19 nt, Artificial Sequence
  Description of Artificial Sequence: Synthetic oligonucleotide
  Antisense strand to SEQ ID NO: 913250
uuauuagaaaggcuucgcg

SEQ ID NO: 913252 - RNA, 19 nt, Artificial Sequence
  Description of Artificial Sequence: Synthetic oligonucleotide
  Sense strand starting at position 2410 of SEQ ID NO: 589053
caaaguuaaggcugggaca

SEQ ID NO: 913253 - RNA, 19 nt, Artificial Sequence
  Description of Artificial Sequence: Synthetic oligonucleotide
  Antisense strand to SEQ ID NO: 913252
ugucccagccuuaacuuug

SEQ ID NO: 913254 - RNA, 19 nt, Artificial Sequence
  Description of Artificial Sequence: Synthetic oligonucleotide
  Sense strand starting at position 2411 of SEQ ID NO: 589053
aaaguuaaggcugggacau

SEQ ID NO: 913255 - RNA, 19 nt, Artificial Sequence
  Description of Artificial Sequence: Synthetic oligonucleotide
  Antisense strand to SEQ ID NO: 913254
augucccagccuuaacuuu

SEQ ID NO: 913256 - RNA, 19 nt, Artificial Sequence
  Description of Artificial Sequence: Synthetic oligonucleotide
  Sense strand starting at position 2412 of SEQ ID NO: 589053
aaguuaaggcugggacauu

SEQ ID NO: 913257 - RNA, 19 nt, Artificial Sequence
  Description of Artificial Sequence: Synthetic oligonucleotide
  Antisense strand to SEQ ID NO: 913256
aaugucccagccuuaacuu

SEQ ID NO: 913258 - RNA, 19 nt, Artificial Sequence
  Description of Artificial Sequence: Synthetic oligonucleotide
  Sense strand starting at position 2423 of SEQ ID NO: 589053
gggacauugucuuugucac

SEQ ID NO: 913259 - RNA, 19 nt, Artificial Sequence
  Description of Artificial Sequence: Synthetic oligonucleotide
  Antisense strand to SEQ ID NO: 913258
gugacaaagacaauguccc

SEQ ID NO: 913260 - RNA, 19 nt, Artificial Sequence
  Description of Artificial Sequence: Synthetic oligonucleotide
  Sense strand starting at position 2424 of SEQ ID NO: 589053
ggacauugucuuugucacu

SEQ ID NO: 913261 - RNA, 19 nt, Artificial Sequence
  Description of Artificial Sequence: Synthetic oligonucleotide
  Antisense strand to SEQ ID NO: 913260
agugacaaagacaaugucc

SEQ ID NO: 913262 - RNA, 19 nt, Artificial Sequence
  Description of Artificial Sequence: Synthetic oligonucleotide
  Sense strand starting at position 2839 of SEQ ID NO: 589053
ggagguugcaaguauaaac

SEQ ID NO: 913263 - RNA, 19 nt, Artificial Sequence
  Description of Artificial Sequence: Synthetic oligonucleotide
  Antisense strand to SEQ ID NO: 913262
guuuauacuugcaaccucc

SEQ ID NO: 913264 - RNA, 19 nt, Artificial Sequence
  Description of Artificial Sequence: Synthetic oligonucleotide
  Sense strand starting at position 2895 of SEQ ID NO: 589053
gcuugcggugugaguauuu

SEQ ID NO: 913265 - RNA, 19 nt, Artificial Sequence
  Description of Artificial Sequence: Synthetic oligonucleotide
  Antisense strand to SEQ ID NO: 913264
aaauacucacaccgcaagc

SEQ ID NO: 913266 - RNA, 19 nt, Artificial Sequence
  Description of Artificial Sequence: Synthetic oligonucleotide
  Sense strand starting at position 2900 of SEQ ID NO: 589053
cggugugaguauuuccagu

SEQ ID NO: 913267 - RNA, 19 nt, Artificial Sequence
  Description of Artificial Sequence: Synthetic oligonucleotide
  Antisense strand to SEQ ID NO: 913266
acuggaaauacucacaccg

SEQ ID NO: 913268 - RNA, 19 nt, Artificial Sequence
  Description of Artificial Sequence: Synthetic oligonucleotide
  Sense strand starting at position 2902 of SEQ ID NO: 589053
gugugaguauuuccaguga

SEQ ID NO: 913269 - RNA, 19 nt, Artificial Sequence
  Description of Artificial Sequence: Synthetic oligonucleotide
  Antisense strand to SEQ ID NO: 913268
ucacuggaaauacucacac

SEQ ID NO: 913270 - RNA, 19 nt, Artificial Sequence
  Description of Artificial Sequence: Synthetic oligonucleotide
  Sense strand starting at position 2935 of SEQ ID NO: 589053
ccauuacuggcacguauuu

SEQ ID NO: 913271 - RNA, 19 nt, Artificial Sequence
  Description of Artificial Sequence: Synthetic oligonucleotide
  Antisense strand to SEQ ID NO: 913270
aaauacgugccaguaaugg

SEQ ID NO: 913272 - RNA, 19 nt, Artificial Sequence
  Description of Artificial Sequence: Synthetic oligonucleotide
  Sense strand starting at position 3166 of SEQ ID NO: 589053
ugcacuuucuggcugauca

SEQ ID NO: 913273 - RNA, 19 nt, Artificial Sequence
  Description of Artificial Sequence: Synthetic oligonucleotide
  Antisense strand to SEQ ID NO: 913272
ugaucagccagaaagugca

SEQ ID NO: 913274 - RNA, 19 nt, Artificial Sequence
  Description of Artificial Sequence: Synthetic oligonucleotide
  Sense strand starting at position 3167 of SEQ ID NO: 589053
gcacuuucuggcugaucau

SEQ ID NO: 913275 - RNA, 19 nt, Artificial Sequence
  Description of Artificial Sequence: Synthetic oligonucleotide
  Antisense strand to SEQ ID NO: 913274
augaucagccagaaagugc

SEQ ID NO: 913276 - RNA, 19 nt, Artificial Sequence
  Description of Artificial Sequence: Synthetic oligonucleotide
  Sense strand starting at position 3184 of SEQ ID NO: 589053
aucuaaaggcucggaaagu

SEQ ID NO: 913277 - RNA, 19 nt, Artificial Sequence
  Description of Artificial Sequence: Synthetic oligonucleotide
  Antisense strand to SEQ ID NO: 913276
acuuuccgagccuuuagau

SEQ ID NO: 913278 - RNA, 19 nt, Artificial Sequence
  Description of Artificial Sequence: Synthetic oligonucleotide
  Sense strand starting at position 3229 of SEQ ID NO: 589053
ugucaugguguugaagaca

SEQ ID NO: 913279 - RNA, 19 nt, Artificial Sequence
  Description of Artificial Sequence: Synthetic oligonucleotide
  Antisense strand to SEQ ID NO: 913278
ugucuucaacaccaugaca

SEQ ID NO: 913280 - RNA, 19 nt, Artificial Sequence
  Description of Artificial Sequence: Synthetic oligonucleotide
  Sense strand starting at position 3289 of SEQ ID NO: 589053
aguguaaucucucccguau

SEQ ID NO: 913281 - RNA, 19 nt, Artificial Sequence
  Description of Artificial Sequence: Synthetic oligonucleotide
  Antisense strand to SEQ ID NO: 913280
auacgggagagauuacacu

SEQ ID NO: 913282 - RNA, 19 nt, Artificial Sequence
  Description of Artificial Sequence: Synthetic oligonucleotide
  Sense strand starting at position 3298 of SEQ ID NO: 589053
ucucccguaucauucugaa

SEQ ID NO: 913283 - RNA, 19 nt, Artificial Sequence
  Description of Artificial Sequence: Synthetic oligonucleotide
  Antisense strand to SEQ ID NO: 913282
uucagaaugauacgggaga

SEQ ID NO: 913284 - RNA, 19 nt, Artificial Sequence
  Description of Artificial Sequence: Synthetic oligonucleotide
  Sense strand starting at position 3442 of SEQ ID NO: 589053
gcagcaagucaggagcaau

SEQ ID NO: 913285 - RNA, 19 nt, Artificial Sequence
  Description of Artificial Sequence: Synthetic oligonucleotide
  Antisense strand to SEQ ID NO: 913284
auugcuccugacuugcugc

SEQ ID NO: 913286 - RNA, 19 nt, Artificial Sequence
  Description of Artificial Sequence: Synthetic oligonucleotide
  Sense strand starting at position 3445 of SEQ ID NO: 589053
gcaagucaggagcaauuga

SEQ ID NO: 913287 - RNA, 19 nt, Artificial Sequence
  Description of Artificial Sequence: Synthetic oligonucleotide
  Antisense strand to SEQ ID NO: 913286
ucaauugcuccugacuugc

SEQ ID NO: 913288 - RNA, 19 nt, Artificial Sequence
  Description of Artificial Sequence: Synthetic oligonucleotide
  Sense strand starting at position 3478 of SEQ ID NO: 589053
ggcugauuguaccauuucu

SEQ ID NO: 913289 - RNA, 19 nt, Artificial Sequence
  Description of Artificial Sequence: Synthetic oligonucleotide
  Antisense strand to SEQ ID NO: 913288
agaaaugguacaaucagcc

SEQ ID NO: 913290 - RNA, 19 nt, Artificial Sequence
  Description of Artificial Sequence: Synthetic oligonucleotide
  Sense strand starting at position 3504 of SEQ ID NO: 589053
ggaucuuggaguuggacau

SEQ ID NO: 913291 - RNA, 19 nt, Artificial Sequence
  Description of Artificial Sequence: Synthetic oligonucleotide
  Antisense strand to SEQ ID NO: 913290
auguccaacuccaagaucc

SEQ ID NO: 913292 - RNA, 19 nt, Artificial Sequence
  Description of Artificial Sequence: Synthetic oligonucleotide
  Sense strand starting at position 3615 of SEQ ID NO: 589053
gcuggauuccuuugcauug

SEQ ID NO: 913293 - RNA, 19 nt, Artificial Sequence
  Description of Artificial Sequence: Synthetic oligonucleotide
  Antisense strand to SEQ ID NO: 913292
caaugcaaaggaauccagc

SEQ ID NO: 913294 - RNA, 19 nt, Artificial Sequence
  Description of Artificial Sequence: Synthetic oligonucleotide
  Sense strand starting at position 3616 of SEQ ID NO: 589053
cuggauuccuuugcauuga

SEQ ID NO: 913295 - RNA, 19 nt, Artificial Sequence
  Description of Artificial Sequence: Synthetic oligonucleotide
  Antisense strand to SEQ ID NO: 913294
ucaaugcaaaggaauccag

SEQ ID NO: 913296 - RNA, 19 nt, Artificial Sequence
  Description of Artificial Sequence: Synthetic oligonucleotide
  Sense strand starting at position 3648 of SEQ ID NO: 589053
ggugaaggcgcgguguuaa

SEQ ID NO: 913297 - RNA, 19 nt, Artificial Sequence
  Description of Artificial Sequence: Synthetic oligonucleotide
  Antisense strand to SEQ ID NO: 913296
uuaacaccgcgccuucacc

SEQ ID NO: 913298 - RNA, 19 nt, Artificial Sequence
  Description of Artificial Sequence: Synthetic oligonucleotide
  Sense strand starting at position 3674 of SEQ ID NO: 589053
gggcaagucuguccucuuu

SEQ ID NO: 913299 - RNA, 19 nt, Artificial Sequence
  Description of Artificial Sequence: Synthetic oligonucleotide
  Antisense strand to SEQ ID NO: 913298
aaagaggacagacuugccc

SEQ ID NO: 913300 - RNA, 19 nt, Artificial Sequence
  Description of Artificial Sequence: Synthetic oligonucleotide
  Sense strand starting at position 3676 of SEQ ID NO: 589053
gcaagucuguccucuuuaa

SEQ ID NO: 913301 - RNA, 19 nt, Artificial Sequence
  Description of Artificial Sequence: Synthetic oligonucleotide
  Antisense strand to SEQ ID NO: 913300
uuaaagaggacagacuugc

SEQ ID NO: 913302 - RNA, 19 nt, Artificial Sequence
  Description of Artificial Sequence: Synthetic oligonucleotide
  Sense strand starting at position 3680 of SEQ ID NO: 589053
gucuguccucuuuaaauac

SEQ ID NO: 913303 - RNA, 19 nt, Artificial Sequence
  Description of Artificial Sequence: Synthetic oligonucleotide
  Antisense strand to SEQ ID NO: 913302
guauuuaaagaggacagac

SEQ ID NO: 913304 - RNA, 19 nt, Artificial Sequence
  Description of Artificial Sequence: Synthetic oligonucleotide
  Sense strand starting at position 3725 of SEQ ID NO: 589053
gcaacaguccgagaagaua

SEQ ID NO: 913305 - RNA, 19 nt, Artificial Sequence
  Description of Artificial Sequence: Synthetic oligonucleotide
  Antisense strand to SEQ ID NO: 913304
uaucuucucggacuguugc

SEQ ID NO: 913306 - RNA, 19 nt, Artificial Sequence
  Description of Artificial Sequence: Synthetic oligonucleotide
  Sense strand starting at position 3861 of SEQ ID NO: 589053
cccuauauuccugagcaga

SEQ ID NO: 913307 - RNA, 19 nt, Artificial Sequence
  Description of Artificial Sequence: Synthetic oligonucleotide
  Antisense strand to SEQ ID NO: 913306
ucugcucaggaauauaggg

SEQ ID NO: 913308 - RNA, 19 nt, Artificial Sequence
  Description of Artificial Sequence: Synthetic oligonucleotide
  Sense strand starting at position 3863 of SEQ ID NO: 589053
cuauauuccugagcagaau

SEQ ID NO: 913309 - RNA, 19 nt, Artificial Sequence
  Description of Artificial Sequence: Synthetic oligonucleotide
  Antisense strand to SEQ ID NO: 913308
auucugcucaggaauauag

SEQ ID NO: 913310 - DNA, 4001 bp, Homo sapiens
aagatgttctgttgtaaattaagcccaggaaacaaaacgttgcctactctcttagatagttgtgataaatgacaatatttgcatgtgtcatgagtccccagtgctcgagcgtatgatataatggttacgtgcttgggctctggatcagactaccagacaaaggagcctggctctgccacttgctaactgagtagctgagcctgttaggtaatttgtctgtgcctccattttcccatttataaactgttataatagtatcacaccatagagttgttccaagaataacatgagataatgcatggagagaacttagaagtagacccgataatatagtgcttcacagatgcttgttatcattattactcaaaacactcatgtggtaacaaaacctgctataacttttctaacactgtttcctcaacttacttgacaatggagttgcttttcttttgagccacatttattaacatccactgaatatagtgtaggaaatgttgatatttgaaatgacataaaaccaccttggcattagtgcagtagaaaataagaacaaagtatttatagtgttttaatatccattatgtcattttataatgtttgcccacaacaatatttcttttccttgccagctgtcttcttttttcccttgaaatcgataaatagtaaaatagaacagtaaaatgttaagagttgtctgaaatgggcagagtcaatgttattccagaaagtatgaaccttataagtcatttgtctctttctctgtatttagcagggcaaaaccttactgctttgacaaataagtgatatcactgtcatttccagacctgtgctcccattgcatgctccatagcacacgttataaagaaaatttcagagcagaccaacacattttttgatgctcctaaactataactagagctgaatttgccaaaatacgatctataaaacactaatcctgcacaatgtgcaaataatgctgtgttcttcatcttcttggagatatacaatacatatctgaaaagtcctatagtaaataaaattgtttagtttggaatcctttcttcttggaatttacataggtaatcatgacaaaaagtcagagagtttagggggtttctggtaaaaatgggatatttttggtaaatgtccagattgatttctttctttagctaaaataccattataatgtttttggagtacacaaaaaaaatatgtgaaaatatatccacctcagcacagttgcccaaattgtggaaacaatataataattagccattccaaggttcagatttaacacactgaaaaccagtcattttccataatatttttttggtcagaatcaaaagtgaatagtttaaacattcctttggttagcaagataatggcaggcggaatcgcaagagttgtaccaagactttcttttttatggtggtagtagctctggagataattgaatatatgaagtctaaagtatgataggaattatgacccacacacagaactcaaaatctgctggtgatgttaatactatttcttttgttaattatatttttgtttctcagggtcctaggattgggacaggcactcaaccacaactctccctgctgtctggttagagctaaataaacttctcacaacattggctccactcttgaaccctccgtggtaagtctacagaaatttattaaatcctggcagctatctcatttagagattatataataattccaatatattcttttgttttctggttgtttcattagtctaaaaacaagctagataattctttgaattaggctcgataacagaagagggtaaaagctgttttcactgcattcccactgataccacaatacacagtttcacagagttgaaatagaaaaaagcaaaacacatggatcatacctgagtaatttcagagatccccacccggaaaaggtttccttgattatggcgaattcaacgtgtcactcgggttatgctctaatcgtcatatcaaactccaaaggttcagtggctttaggtttggtttacaattcctgggagttaaactttaactcaccctgtctcttgcatccatgcagccctttgaccagataattgggtcactacagcccagatataatctactaaaactatctttgttatttgtttataaaattaaaataaatgttgtaaaaatgttggggtaaatattattttgaagatattttattggcttatacgatatatttaaaaagtaaaaactcactgcaattggatacctaagctttcctttatgttacttcctttgttttttactatgtcaaagtgatattatagctaaggtaatttaggagaatatttctttgttttacactttttatatcactatattacatggagtaaagtgtggagttttaggtcaagtacgtagataaatgctggcttacaaacagaaaatacacaaagcatttatataacaaagtagatagatttaggccagatcaggttggggaaagcatacttctttgtatacaagctgctcatttagattttaagaggaggccactgtgtgagaagcacaataatcagctacatactggggttatatgatagctgatgctattgttcattgcctgaaatctcagtggtaactgagtttcttgaaaaatagagaaatggtgctttcagaaatacaaacattatactctgagttctctggtaagagctgtagtctacagaagaaatccctaagggtaataaagcccacatttaaaaaaggaagaagaaccaaaaccttcctaattttgagtaaattttggtttaagagcttggaaaccacacattccaaaactagaattagaggatacccctacttgcctttagttctagtaaaaggagtctaattttctaggaaccaactattaagagagcatttttgtctatagaaaagcacaaaacaagcaatccttctataatatagacgcaaaggaagatccatcaattaagcacatctatgaatatgtaagagaagagataaaagatactgttggaatgctagttctgcttacagtttttagttctcaaacatggaattatttcagttctcaaacatgaaatgatttaccattttcccatagcaatggatgatagagtttaacaaaaacaccccaggaacaattgttttaccccagaattgctcccctgatgttagacctagagaaagcatttatgccccacccagctagatagctgaatgagggacacatccctctacttccttcttgggaagggattccctcacaaagtagccctgatggtttcctagtgaaagctcagtctggggttgcatggttcccaattgagtggggaattctttgagtttgcccagtccaataaagaactgttgatgttgtaagatggacagttttgagagggtttcttttattgttttttgtgataggggcttagatggtgataagtggagatgaagaaaggaaagctaggatttttaggcatctgatggaaacaccaaaacacaacaggtaaaaggaacgatattaactagagtctcagtccattcaggttactataataaaataccatacaaggctgggtgtggtggctcatgcctgtaatcccagcactttgggaggctgaggcaggtggatcacaaggtaaggagattgagaccatcctgtccaacatggcgaaaccccatccctactaaaatacaaaaaaattagctgggcatggtggtgcacacctgtggtctcagctacttgggaggcggaggcaggggaatcacttgaacccgggaggtggagttcgcagtgagccaagatcatgccactgcactccagcctgggcaacagagtgagacttcatctaaaaacaaaacaaaagaaaacaaaaagaaaaccatacagtgggtagcttcaacaacaaacacttgtttctcatcgttctggaggctggaaatccaaaatcagggtgccagcaggaccctctttttggtt

SEQ ID NO: 913311 - DNA, 4001 bp, Homo sapiens
aaaggggaaggattgttgcatacatgcattgtgaagacagaaaaccaccctgcagcacatcccactgctttcacacaatttaaattcaactccatatccatatccagccttaccctttaactatccgtattttcctatttgtgcacatggatacaaattcaccatttaatgacaaatgtagtcactttctggccaacccaccctccaaaaacgtgtcttcttgtgattctaagtgaattttgtaccagctattctgagtaaacctcaccactgcatttgccaaattataggatgaagaaggactgttccccagtttaaaggacagaatagttccctgggatataaaaaattattcaagtttctagcactaactgaactcactggcagatattcaaacatgcaggcgccatgcagggagaatgcttagtcatactgtaacatttgctctctgatggcccaaagcgcttacattaaaaacctggccagtttcagcacagcagtgacaacagcattgttggacagaaggcttccaaccagcaagttttgtgcagtctttgcattctgcgataaatggaagtgtcttgtgaagtggaagttggggggtggggggtgggcaccaattcttgtatctgagtcacatgagtgtggatttttcttttcctataaatagttaaaaattgttttatatgattatttatacagactctttaaagaattgcttgcgatgccctgaccaagaaagtttgtcaggtagttctcagaaagaattctcaagagatggcctgtctagatactatagcccatgaagatccaccttgccgtggtatacactcctggcctcgagggtcttgggacccaggtcctttctaagacacgaggtgctgcccaggtgctctgctatctcatccctgcccctctcacctctatataaggttatcaaatgttagaattcagaagaatcacttaagatacttaaactacatttattgccccaggtgattctgatgctgaggctaggagtttgcagatgatactttctcaccaaacccttactaaaatcactaaatctaaggtccttttttgttttctattccactagacctttgatactgttgattggcccctatcttgaaattttttgctatctatgactccgtaatgttacactgttcttgttcaccctctaagtggtgtctcttcttttccttaaaaacaatattacccaactctagttgttcaaaaattatttcaatgctcatgatgcccaaagttgcatccctagactcaacttctagtccatatcattagttgccagttctagaacttatcattatcatttcaacatcaacatgtctcagcaagactcagtcacggatcttctcttccttctactagcaaagtatgcaacaacaattctccttcctcacacggattaaattggaaggtttttacctgtttctctttagagaaggcaattttgcgactagctagtacaagagtctgatataaaaaaacatatgacagagaataatttgcattacatttcccagatcttatatcctctggagatattatgaattatgctttctaaaaagcctgagctttagaccaattgcacatctaacatttctggttcttgttggtgaccaccctaagttaactaactaccacttgttctgagtctgagaagagtcaatatgaagataaatgtaatttctcacccaaaaagtagagttgcagaacttctccagcatgattcctggactgcgtctggaacgaagactcttctattaatatgattgtgttgtttcttctttacttgtttcatcaaagaaagtggaacaggaattatctaccattctgatgttctccgtaaaggatgacctttcatcccaaccatttaatcgttaaccttgcctagatgcatgttacattgaaacagtggatggacatgtgactaaaaagccctagggacagggagactcaccagttcccaaagtacaagaggcctctgtaggagtggccatacataaaaggaaccactgaaagatgtcaacagagctggccaacaaatcaagagtgcacagtctttcattttcctaaggacatatgacccacaaagggcagcatcagtagaggggcaggcacccctaaatgtgcagtttcgcttctgctgcaagatcttagagtttatagaaatgtgaaatatccttcttccttagatttttaattaaaaatatagaatctaaaacatggtttaaacatgatgtaaactttctttgaagaagtcaggttataaaatagcttatccagtgtgagcctatatgttatatacataatacaggctttcaaaagttctatttgcctgagaggtagtatgccaaatgggaatgaagcctttgccaggcattgtaaatatgatatcatgataaaacatcagggccagaggagaggggtgattctgtaaacagagtggtggcatcagtcgctagaaactgtcatcgacccaaccttttctttttttgttattgttttttgttttttgagacagggtcttggtctgttgcctgagctagagtgcagtgttgccatcatgattcattgcagccttgacctcatgggttcaagcgatcttcctgcctcagcttcctgagtagctgggactacaggcacatgccaacaagcccagctaattaaaaaaatgttttctgtagggacggggtctcactatgttgcccaggctggtctcaaactccaggcttcaacaatccttctgccttggcctcccaaagggctgggattgcaggcatgagctaccgtgccccacctgacccaaccttttgtactgtcacttaaattgctttaagaacatgcttttttcatgatatcatgaaccacccatgcggtatcctagctaaaacataaccacccatgcagtatcctagctaaaaaaaattggccttaaatctggtcaaattctagatctaactaccggattataagaaacacaggaacatgctaaaggactccattggaatgcaattgtcaaaatccagaatgtgggagattctatagtgcaaatgattccattttttaataaataaattaaaagaaggaaaggagtcaaaggaacttacaaattacaagagaatcaagaggcatatcagccaaatgtgaattgtatggaccttgttactgattttaaaagtcaagtatacacataaaaaaaatgaaaaggcagcattcagtgtgggagaaaatatttgcagaccatataactgatgaagagttaatatccacaatatactataaggaactcatacaactcaatagcaaacatacactaacaaattaaaaagtgggcaaaggacttgaacagacacttttccaaagaagacatataaatggccaacaggtatatgacaactgaatcaacttcacaagtcatctggaaaacacaaatcaaaaccacagttagataccacctcatacctattaggatggctattacaaaaaaaaaaaaaaaacaacaagataagtgctggcaagggtgtggagaaaagggaaccctagtatactgttgatggaaatgtaaattggtctgaccattatgaaaacatatggcagtttctccatcattttccataccactcaccagaagagccaggaaaggtcagctgtggaactaagagatctcacttggggcagggtgcacctttaggctgcatacttctcttggcactggtggtaggactcggagtccgggggaactcttggtaaaactttgagaaatataaggtcaaggattaacacctaattttctttttttaatttttttgtagagcctcaaactcctgggctcaagcgatccattcgcctcggcctcccaaactgctgggattacaggcatgagccatcgtgtctggcctaaacgttctaagtaatcaaaaaaagagagggtggagaatctaaatgttcatcaaaacaagttgcttaaagta

SEQ ID NO: 913312 - DNA, 4001 bp, Homo sapiens
agatcacttttatatttgcaaaccatatccacatccctactagatttttaaaagtttttcgaagggctaaatataaagtttgcacaaagtgatacagtagatgtggcaggcattcaacaagttcacttatcaggagaattcctaaagtgaaagcttgaaaaaaaaattgtgaagataaattccgagtagtgctactgaagatacaatgttactaacatgaaaactgagaaatattcaaaacattctgaaaacagcatctccctctaaaaataaagaggggaagcatttgccaacacagaaacatcggttcttaaaaattataatcacatgggagacatttctataaacaatttagttctgaattgcaataaccctaacctttcaaagcacgttttggccttgccttaccaaaagcaagagcattcctggtgcctttatatttatacaaaggactgtgctactttgtttctagcgcaaactgttggtttacacagttaaagatcttcaaaacaaactaccacacacaattcacttccaatcatccaaagagaaacgaacaaacaagcatctgtcacaaagtcccaagagttttctaatttacaataacagatatttttacgttgtagttcagaggctacctctgttcgtttctgtatttggattcacatactatacatttacttagcttgttaagagagaaacctcagaaaataagcaaccggcgatgacaccagtctattttaagttacttatgaagcctacagctcaagaacttttgggagaagggagggtaagccgtttttccaaggagttaagaacaattcgtgtttgataattaatgatagcagccctaacaacctcttagaatacattatggtggggcggaagtgaaaacgatgagagggggaaaaaaataaaaaaaacccgacttgaaaatggacaagcagacagatttacaaaccttcaattaaaggaattttaagatgaacttctctcaaacgccctccctcactccccacacccgcttcctcctctcctccgggaggtcggtgtaatgtgactcatgacaaattttttttaaataaataaataaataaaagacacaccctctgggggctgaaactgacataatcgcccccaccccaccctccgccgacacacaacacacaccccgctggtcctctcccttctgcggcttcagcctcgtccctgccctctcctctcccctctcccgtcctggacctcctctcccggcgcagagaggcggcgcggcggcagctcgggggtattccgggactccagccctgcggactggaggctacctggggggcgcgcgaccccggtggccgggccctgggggaagcggacgcgaggggggcgccgggctgcggcagcggcgggctcccggctccctcgcccattttctctctccccttctatcggtttccaccaccacagccacttcctgtatcgcagcccgactccctcagcccggccactcgctctgtccccggttggggctggggttggggctgcggtaggggctcgggttggtggcagccgctgaggtcagggcagttccccaccccgcccagtgggctggtcactccggcgggtcctcgacccggccagcgcccgccggccgccagagcgcctcacctgtatgtagttgttttcacagtagtctgccacccgagtcaggttctggtaactctcgatcagcgccctcttgccagacgggatctcctcctctagtaacatctgcagctctgccattttccacccctctgcatcgcttcctctcgcgttaaagagacagaggcagcaaggtccgccgaggctccgagcacctcacagcccggatacaaaccgcctacccgccctcccgcctggtattgtgggacggcacctcctccccttcctcctcactctctccagcccccctccacccccttcgtgcagccgcctgaacctcgttctctcgcgagcgtttatttctcccacccccacggaccgcgggattttttttttctttcgcactgtcttctgggaattgtagtctctcctaggctaggcggcccgtccaaagcgcatgcgcccagacacctccgaaaaccaacgcggcagagcgcagaaagcggagaccgagggtggagggagggggcggtgttggggggaagtccggagtttcctcacagctccggaaggtggcgccacagggtgatactgggggaatgaaatcggttccccaagtttcatgtgaaacttggcagaacttggttaattaggaaatgtcagtgaatcaaggacacccattcagagaaggattaaaaaggggacagagtacggaaaactagatttttacttcctctgccttcttagaaataaagcgagtcaggctttactttctgaagttccgcccccatcaattcatttaaaatttagcaaacatttcttgattgccagctgtttaccaagcagcgtactagacactgggggtacaagttgagtacgaatactccgtacccttaaagactcaattataaaataaacatacatagcttgtagtgctttcctgtcctaatttctcttttctctgactctccttatcatgtaatcttcctacacttttaaggtcatgtgcacgtttttttaggggtgggagttgtttgcttgtttgagacaggatctcactgttacccagcctggagtacaggggcacaatcatgggtctctgcagcctagacctcctaaagtcaagcgatcctcctgcctcagcctccagagtaactgggactacaagcgtcggtcactacacctggctgagctttttaattttttatagcgacagggatcaaattatgttgccctcgctcgtctcgaacccctggcctcaagcaatccttctgcctcaacctcccaaactgctaggattacaatcatgagccacccaccctgatccttcgttttttgctcctggatttttgttttgttttgtttttatcacctgctttggaatagtctcaaaaggccctatatttcaagctcttcacttcaacaggaacattaaatgcttcggatataatcagctatgaaaagtgttgtccaaagactttggacatatgttcatgtatctccataaagtcatttagaatcaaaataactaggagtaaaaacatcactcaaccaaattaaaaattgccagcaccaggtatttattgaatattgcctttactggggccttattcagggccccagggaaccagtttccctcttcgacctctgaaaggaaaaactcagtttcctactaaaaacgttaacttccccttgccaccagattctccatcaaggaatctatcaaaagataactattatacctattccagatattatggaaagtaatacatttattatctggaataggtgtaatagttatcttttgatatttatcgttaacccaaacacgacttaatccaagttattaaaatttaatgtattattgatcttggtctctacttgaggtttaactgtagaaatcactcagtttgtatatattcaaatattgacacatttcaacaacattggggaagtgattagggaggtgatactaatttactattttcaacgtactgtccatgcagttgagcaatgaatgaataataatgatgatgatgataaatacaaataaaaagtactgtcagatttcttctcacaactctgagagacagataatataaatattattttccttccttatcaaataaggaaatttaagcttagataggttaaggagtttagctaagggcactgaaaatgccgtcaagtttcctaggttactgattgatatggtttggatctgcatccctgccaaatctcatgttgaattgtaatccctaatgttggagttgggacctgggggaagcgggagtggatcatggagcagatttctcacgaatggttatgcagcatcctgttggaactctccttatgatctcgagtga

SEQ ID NO: 913313 - DNA, 4001 bp, Homo sapiens
tgagtgttctagagatacggtttctgtagattccagctggtagcaagtggaaagactccaaataccttaaaaatatgccacggagtagaagggaggagagtagttaaaaaacaaggaagagaaagaacgttgttctttctggcttgaccactaaaaatataattagatgtatcacttactctgtttacttacagtctctctgcgtgtaagatttcttccaaaacctgccctatctttctggaaagccaaactaaaatccactctttgtacagtacaagaaaaacagaggactttaaattcatttaaataaagacatctagacatcttgagatattctaattttatcactaggaccccattcagttggaaaagacatagcatcatagttttccactctaaatgtatcaggaatacacgaatgcattctaattaatatgcatagtgtccttattaaaattcaaattctatatttgaggaaagtccagaatgtcaaagaatcttgtgtaaacctgaggtgacgttatcctttagaaagaacaggggagggctgttcttggctgaccacccacgtggggccatcgtccactttaagttttcctattctaatgtttgtcaactttcgtctttccagtaaacgtccaaggcaggtcagtgaggaataggaaaccacattactggacttttaaatcagcatagtctttcaaaatcatgctcatttacaggagaaaactgtgtggcataaaaagccaccatgaattattcatcagttacagcgtgtgccaacctcagattcctttgtacctcgtaacaagtgtatacatgtgaagtgtagcagacccggctccccagtcctaccagtcctgggtacaaaggcaaacccaagctcaccggaggtcctgcgaaacagagaagagtggcgagattggaagtgaaggagggagggggcccagcctacctgccgtatctggaattacccacgagtctactctccaggaaccaaaataagttacactctcttatcttaaggggtccagtatcaaaggaatcagcaaccgatcgccacagtccctaggtttcaatggagcagcctgtgagactgcgtggggccaccctctgcagttctgttggacgtggtgttggctgtcggcccctggggatgctgagcaggaccagccggggcactcctgaagccagccagcctcaccacggaacaaactctcccatcaaacacaactgtagggaaagcatcctagagatgacatccaaactcaaacaaaatgcccagaaataggatcacaggtgtttgcccacagtcactgaagatgccttttaatgtgcccaaaggaccaacctactgttggttgagttgagctgggctactgctacaaaagagtcatgtcgattttaacatcctgttatattaagaatatatgtaaatatgttgacaaataagatgtgcattttatacagatatgtactatcacagaaatagattgtaaaacaatcttttacttattatcataagtgtaaaacaattttatcaaatggaaaagccctgcatctttcctcatctttaaagacacggtcgaccccagacagaatatatgctgactttacaaaatggacggtctaacctttgtagtctcccatggtgtgatgagggtccgtgagctcagtcatttccaaggtcattaacatgcacaaagctccagggtttcagcttttcttcactaggcatctggcacacagaaaggctgcaacactcctcaaaggagaggctggggccctggctctcctcccaggagtctgtgggctgaactggacccgagggaggggtgtgccaccggtgggtgtgccacagccagcgcaggaagaatgaggagtttcctgagtgactctggctccttcctcatgtacagattctgcatccccttcttctctcgaccctgcccctaccacttctaaagagaccccttgcaaaagcacatcagctcaatgacgccacacccactgaaaacactcgtttctgggaagccactattagaacacgccaagaatgttcctaggattttcctgcattctgcacaatccagaatccagattttgatcactatcatttcacaataactgaaacacatgaaataaagaaagaaaaggatcgattattccccagccttctgcctcctctttttccttaatgaattactatctcaaccagatgggcttttaattattttcttcactactagaatttttaaaaaatgctataacttggagaggcttcttttactaacagcctgattattcattatggctttggaaacagttccctgacaaactcctggtatgagacgagccgtggactttgagcctttttatattaggtatacaagctgtctgaaaacaatgacctcatccggaaagactcaggaaagaggcatttttttcctttcgtcagtaatgccctgatgttgggctggattatccaccacccacaatccaacttttctcacagttatttttgaacaccgggaattttgcatattggaaaagttatgaagacagtttaaatggaaaaagacccttaggacaaatatccttggcatcagatacacacattggctaagaaataggaggaaactggcataattgctttaaatgtgagggtaaaacatttaattcctccaataaagatgtaaccagcagcacccgttgtgagatattaatttaatgtaaggcctataatcaatccactggaaaacaagactatttgaaacacattggccaaatgcaaagtttgattaattgaagagtcctggcttactctcttccccagctaagtggcttttttattttgttttgaaatgactcgggtagacagccatcctcatgggtcaccctatgtgcccttcccctggtccaggctactgcctggaacttggtgcctctgataacgtcctcctgacttggctgtagcaccaggcgccagacaaagaatcacaactggattgctcgttgataaaatgcttgccatttgcagagctgtcatgtgtcagctgctgccaaaggccagtcgcatcaactgaaatcttctgattacacctaatgccttgcattctcatgatagtgattccatattttagcctaatgtgttttttgttagtgtcttgggatttttaccataaggatggaagtctttcatcgttgcattctttattcttgttagcctgcatttaaaatgtaatggaggctagtttttcctactcctttaaatctcgaagtattattcctacttgatattaaatgagagaagaaaccaagtacagagctacagctattttcaggggctaaaatagggtgctagtttaaaaataacctgcattgcattggttccttgccttttacaaggcaggacaggggcaaagtgggggagcaggcaatccaatattgaaactttgatttttttgaatgttaagcaataaagtgattctttcctaatcatagtcctccaaatttgacttgtgttagttgaaccacaatttggttgatgatttattatagtcaagaaactggccaggtgtggtgactcatgcctgtaatcccagcagtttgggaggccgagatgggaggatagtttgagctctggaatttcagaccagcctggaaagtattgcaggaccttgtctctactaaaaattaaaaaaaaaattaggcaggcatggcggcctgcacctatagtcctagctactcaggaggctgaggcaggaggattgcttgagcccagaagattggggctgcagtgagccatgatcacaccactgcatgccatcctgggtgacagggtgagaccccgtctcaaaaaaaaaaacaaaaacaaaagaggtgaaaccaactgcctagaaacttgtttaaaatgcacaattttctttctctcttccttcctcttttcctttctcccttccttcttctctctttatctctctttctttctgagatagagt

SEQ ID NO: 913314 - DNA, 4001 bp, Homo sapiens
aatagcaagtgttagcaaggatgtggagaaactgggaccttaatatgctgctggtgggaatgtaaaatggagtaactgctttgtgaaataatctagaagtccttcagaaggttagacatagttattatatgacccagaaattccacacctaggtatacacccaagagccctgaacatatcatatgtccacataaaaacctgtatatgatgatccttttgatgtgttcacacacgcgtgtgtgaggtgagccaccctcgaaccttgttatgacattggcacattacccatctgacacgaaaaaagaaaaaaaaaccttgtatatggatatgcatagaggcattattcataaaatccaaaagttggaaacatcccaaatgtccatcagctggtgtaagcagaaacaaattgtggaatatctatacggtgaaatagtatttggccataacaaggaataaagtactgacacgtgctacaacatgggtaaaccctgaaaacatgctaagtgaaagaagccataaacgaaagaccacagattataaattccattcacatgaaatatccagaatagggaaatctaagaggcagaaagtagattttgatttcttaaggctgagagatggggatgaagaggttggggtggggaggcgatagctaaagggtacagggtttctttttgaggcaatgaaaatatatatgtaacatatcagttgcatactaaaactcgctgaactatagactttaaatggatgaattttacagcatatgaattataactcaataaagctgttgaaagctgattgcaacaaaacagaacatcttaactccagtacttcagctaaactgaatccaattcaactctggctgtccaagaatgacgaggaatgcgttatgcttcctggcttatttgacttaacttcatacattcgtagggaccatggttaattgccttctgcttcctgtaccaattctaggtctgactttgacaaggtgtgagcagttgggtaggtatcatcttcattaacaaaggcaccatgataacttcaaagtctgaaaactcccaagtgcaataactctatcctcagagtgggccttctccacctctttcccaggcagagggatgagtgacacgttttaatgagcttcactgaaaagaagcctcaacaagttctctcaatattaaaacactttctttttattttatttcttttttagaacatttcacaagacgagccctccctacacagtgacacaatttggacctcaactttacttatcttttgctagcctccatctccccccttgaatatttcctttccattcatcctttgtcatatgaaataataacatctacagatagagatctttcttttccatcatacttcctattactgacaattattcataccaagtttggaaagagatacatttgttactgaagatcataaaatcctggacaaaaatatccttgggatttagctccgtagctacacttatgttacattctccatctctcccaccctcacccccattaattatatattaaggatagtgtttcctttgaagaacacattacagaagaatgatctggatagtactctcttaattacgccaatcacaaaacacaaaaccatgtccagagagggttattttacttaccaaaaggatcaacgctgttacatacacgcccacgtgggcagtagtccttgggacagagatacagcaaatgagtgatagtggcacgcctatgagcggtgaaggaggtcccagagaccctccggtcctcaacaatcagtctctttctgttcgagcccctggcactggttctctcagatgaggtgactttgcttttctcagagctgcacaatttccccagacactttagaccaaggaaggcaggcatcttggcatggatttccaagcaatgagaaatggggagtggggacccaaggagcggtgctgccccacaattctctctgttcccctggctccttactgtctccttttctcactgcccagcaaagaagattaagggagatgtatttaagtgattaccctcaagagcttagggcaccatattctcagtcagatgactaggtataaaaacagccactaccaggaactcgagactttcagtctcagacatgaatgcatatttgaaaatcagattaatatccagaataagagaaagaatataactgcaatatctaaaagaattctcctgcaaatactcctagaatattcagtatcatctggtaagagtactgagaatagggctagggatatatacacatattttatataatctaaaaatgtctatcagaaaaatcccagggtaataattccaagttttccagtatttcagatctcacaggtggaggtggggaaggctcgataaagatcctcagcttcaattcgtgacaaatccagctctcagccatagtaaacgatcatttcctttccattttctagaaggggacccctcccctcagtaccaggaaaatccttctgcctcattccattaagccaatgtttactgtcgtaatgtttcatgggttttctgtgatggcagaatcatatgatggagacagaattaacatgtaggtagcttcagctttacacaaagttacaagctagaaggaccttcatggaattagtgtattgatataaaaaggacaaccccagtaattatcatttactctttaacatccacacagtaagatgcagtacaaaatgtgaccgtctacaaccatacaaaagtcccaagtcaaaatgaataaactcacactccttctcctgtcattgggctattatgttctaatataaattccttttcattaaaaccctagaatagaattatagagctgacaaggccatcaaaggtaatctagtccagtagttcccaaatattgctgtgcataagaaccatctgcaggtgcggttgctcacgtctgtaatcctagcactttgggaggctgaggtgggaggattgcttgaggccacttcgagaccagccctggcaacatagcaagactctgtctctacagaaaaaaaaaaaaaaattaaaacattggccaagtgtggtgtcatgcatctgtagtcccagctactcgggaggctgaggcaggaggattggttgagtccaggagtttgaggttacagtgagctatgattgtgccactgtactcctaggtgaccgggcaagactctgtctcaaaacaaaaaatctgtagaacttttgaaaaatacaaaatatatatatacgggattcttgcacgtaaaggtcaggaacttacatttcttttctttttttatactttaagttctaggatacatgtgcacaatgtgcaggtacatatgcatacatgtgccatgttggtgtgctgcacccattaactcatcatttacatttctaaacattctcccagactagtgccagcactcaggaagcactgatctacgccagcctttaagatgaggaaggtgagtctcagagaagatgtgactttctcaggacaatgcagagagcctagggtggagccgggtcttctgcctcccatgctgactcttcctatccaatagtcgggtccttccacaaaggccccaggcagatgaagcagagaaaggaaattcttgcttcttttgttacaagttcctaatctattggcaacacaattcaagaacctgagaattccaatttgctagaattattctatgccaatgtgaagcacggtgggaatggaagaaacagacgctgtctagaggcactcagactgaggtggacttggggaaagtgggaacatgggacttctaccactactgaagtcacacctcaaaatttctgctccaaaattctgggaattaagcccaacaccaacctccaaagtcttcctctaaaaacagtttacaaagcaggtcaaacaatctgtatgtgttcttttccctgtttgcctattttgaggaaccttcagatatacaatgtaagatgttctatcaatgtttc
